United States Patent Application Publication US 2015/0376612 A1 - sequence listing, part 5

SEQ ID NO: 10497 - DNA, 1676 bp, Homo sapiens
ctagagtgcagtggtgcaaccacggttcactgcagcctcgacctcctgggctcaagcagtcctcccacctcaacctcctgagcagctgggactacaggcgcgtgccactacacccagctaattttttttttcctttggtatagatggggtcttgctatgtcgccggggctgatcttgaactcctgggctcaaacaatcctcccttcttggcctcccaaaatgctggtattacaggcatgagccaccacacccagccatattggtattagtaaaggaaaattagatgccatcatatcagtgtccatggttacctatttccttgatggcgatttgccaccagccagtatgaggccaggcactgtgagagcactaagcaggcagcatgccaaaggtttcttcccaatttgtagaagtgtcaggatttcacatgccccatgctgtccgtaatctccctgcctgccaccctagaaggaaaaacaaggtttgtctttcttctatagtggtacacacacttgatctttttgactttgcaaataaacacagcagcataaccaatctacaccatgagattaccaactggaactcacaaagaaaaccacatcctcttctctgagctcagtcagcctcagctttattactcaggcctcatagagcagtaaaatgctgacagagtgggaggggttaccccagaacctttaaggggagtatgcagtcacgttattgctcccattttctctcaaaacccagtaagtgagtcaggacgagtcaacattgacagattcaatagagaattgtgcaggttgccccaaagttccccgggaaggtgggtggcgtgcattgtgtccatttgtgcacttttccccttgtgtgatcggacgatcatcccacctctgcactctcttagctttagtttgataaatattcgagcatgtagctcttgggaaccatctttcctccatgactttggtagctgctgaattggcataaagggttgccaaagatttgatcctgaatgtcatgttccttgggcagtgggttagtctgtttgtaccccccaaaatggtcgatagggtcttatttatagagtgtcacaaaggacttctagactcagggtcagcattcttaccaaaaatcagacttgacttatttggtcttttacagttgattaaagactctttcacatgtgttgtcttttcgagcccccaaacaaccgtcatttttcagatcaggaaccttgaggagaagctgaaagatttgccaacactttgctggtgagggagctgggtcctgacttcaagttttctgatcccctggtcatgtattttttcctttacgcctccttgcccactctgcaccctccaagcacagctgccaagtgaaagatgctagcccttccaggtctttgacctactgatgatactgaaacttgagcagacagagccctggggtatcccctgactcctattaatactctttttcatctggcttttaactgacatttgtctgtcctgaatcagaggcttctcctggaaattaaagtttccctgagtcatttgttcatttacatatgggtatattgtccctcataattctgcaagcagggttctgtgattaaatcaatttccttgtttgtttttgtcagctgactcagcacgtccttatgcactcagaaataa

SEQ ID NO: 10498 - DNA, 1025 bp, Homo sapiens
ggtatgatctcggctcactgcaacctccacctccgggttcaaatgattctcctgcctcagcctcccaagtagctgggattacaggcgcccgccaccacacccagctaatttttgtatttttagtagagacagggtttcgccatggtggccaggctggtctcgaactcctgacctcatgatccgcccacctcggcctcccaagtgctgggattacaggtgtgagccaccacgcccggcctagagtctgcatttttaaccagatgccaggccatttgtgtgcatgtgaaagttcaagaagcactgcctagatccgagttaccccatgtaatccatggaccagcttttaagggaacttgttggaaacacaaattcttaggggcccatcctgacctactgaatcagagtttgaaacagaattatatagataggacccaggaatcttctgtttaacaagttctccagacttgtcctatgctcagtgcagtttgagaagcactgttctagctggtatgtcgtctgagtattctcattagctctcattacttctggctggctggtggcctgggcacttggtcactctgaggttcctttctctccaggggctgcatcttcttcccagtttcaaggcttaccttcccgcagtgcaatctttcagcagcaacctgagaactgttcctctcctcccaacgtggcactaacctgcttgggtatgcagcagcctgctcagtcacagcaggtcaccatccaagtccaagagcctgttgacatgctcagcaacatgccaggcacagctgcaggctccagtgggcgcggcatctccatcagccccagtgctggtcagatgcagatgcagcaccgtaccaacctgatggccaccctcagctatgggcaccgtcccttgtccaagcagctgagtgctgacagtgcagaggctcacaggtaagaccgcctaacgtcacccagccatctatgcatgggatccaggtgggaggaagccccttagcagagtgagagaaaaggaggga

SEQ ID NO: 10499 - DNA, 1024 bp, Homo sapiens
attactgaaagggttctggtcatcaacatgccatttcaccagggttttgtactcttttcccttctctcttggtagtcattaagatcagatgcctatgatcactatagtgcaatctacagcctgctgtgtgatcgacataagagacataaaaccctgcgtctcggagcacttcctagcatgccccgagccctggcctttcaagcaccagtcaatatccaggtgggcaataactccagtgacctagttcaggacaagtaacaccaggggggtaaaggttagctgttgctcactaaccctaagtcgagagtttcttgctcttccttacctctgtctcctcccatttgtcatctcttcctttgtcagaggccaatcaaagatctgaaccttttttgatggagaggagggatgagcaacaatagttgtgccttttgtttttttgaagaaatagcaaatcatgaggcgatgctatcctcttcacaggatgcttccttgttgtgacttctaagggccgatgaaccaaaaactttagtaatcagggaaacatagactttagcaatcaagactacttggaaagactcattatttctctctagtgttaaaggtatgcgtgtatatgtatgtactgctttccaggcggagcaggcaggtactgctatgaacatcagcgttccccaggtgcagctgatcaacccagagaaccaaattgtggaggcaagtagcaacctgtgggagctgtcagctgaaaccactttctttgccatatccttgcttcccttccttctgatttctaactcgatggtgtttccctccacctcagccggatgggacactgaatttggacagtgatgagggtgaagagccttcccctgaagcattggtgcgctatttgtcaatgaggaggcacacagtgggtgtggctgacccacggtgagtatccggccaacagccctcactaacactggggcaaagaattgtcacctgactttcagtgtctaccatggcacatttcctactacattgtatc

SEQ ID NO: 10500 - DNA, 1035 bp, Homo sapiens
ccctaaccccctgcaactactgatcctttcactgtctccacaagtttttccttttccagaatgtcatatgggtagaaacatacaggatgcagccttttcagattggtgtttttcaaatagtaatatgcaataaggttcctccatgtctcttcatggcttgagagcccgtttctttttagcactgaataatatttccttgcctggatgtaccaccctttatcctttcacctacggatgacttggttgcttccaaattttgacaattatgaataaagctactgtaacatctttgtgcaggtttttgtgtggacataaatttttaattcatttggttaaacactaaggagcacaattcctggatcatatggtaagagcatggatagttttgtaggaaactgccaaactgtcttccaaagtggctatgctattttgcattcctgccagcaatgagtgagagcttctgctgcgccacatccttgtcagcatttggtggtgtcagcattttggattttggccactctaataggtatatagtgatatttcattgttgttttaatttttaattctctaatgatgtatgaggatgagcatcttttcttatgcttatttgccatctatatatctttgttgaggtgtctcttcaggtctattggtcgtttttaacttcaggttgttttattttcttattgttgagtcactcattacattttaaaacactttttctcattgcttctgagacgccatattctccagttttcctcctgtcctctggaagcaccttctccatcttctctaccagacttatttttctctgctcatcctttagatcttttcatctttacaacatctttctggagccatgttatttactgctgtagcttcactgatcactgtggtgatcagtcctcagttaactttttgtcccagacctctcgatctagggcgacatatccaagtatttgctaaccattatcttcactttcatgtattgaagtcagatcaatggagacatattcagaaatgaacttgacttcc

SEQ ID NO: 10501 - DNA, 1078 bp, Homo sapiens
ctgtctcaaaaaaaaaaaaaaaataaataatatatatgtatatgtatatgacagaacagtaatgggatgtagaggcgtaaacaaaaggctgtggaagcacggaggaggaagccattgacatggtgttttctggtggaaatcagttaagccttcatacaggaagtaatatttgactgggccttgaaaatgagtgatactttaaagatggaaaagaaaggaaaaggcatggtacagagaggaaatagcatgtggaaggcatgtaaacacaggatgtgaatagtctagtgatgctagcatggccagggataaattggaaacataggatggagctgggttgtgaagggccttaaatgacaatgctgagatgaagactcttctgtaagtagaagggaggcagcccatgttttttgagcgaggaggtaacaggatctggtttgtgtaactttgtgctatgaatggatagcttaggggaaaatgaaataggaagtaagcaatagcatcagtcaagctagggatgataagagtatgaactgcagtggtagaaatggaaatagaaaagaggaggtggagtcaagacacatggagttgaagcagtaagagttttattaccaggttgaaatgggaaacgagggagaaaggacttgaagatgactccagtgtttctagtaacacaggtggtgatgtcactaatgagggtaaaagcactgaaagcgcaggtatgactttggaaaatggtgggtttgaggtgtttcttcccaagcaagtattggggattcatgccaagaacttaagagtggtaccagggccagacatataaatttggggtatttatatcaaatgctggtagaagtagcgagattaaaagagttagccctgagaaaacatagagcaaggagaggcagttaaaatcagcagagcctgctgaaaaacaccttctgtagaaggtagaaagaaggaaagcaaatagcaaaaggagagttgtcaacaagagtaaaactggaaaagagagggacgggtttcagagagtaggtgggtgcttaacattttcagatgctgtgatttcagggagcatggtgtc

SEQ ID NO: 10502 - DNA, 1091 bp, Homo sapiens
ctgtaagatatcatttcacatccactgggacagctgaattgacaataataagtaataataataaagacaataagtgttggcaaagatgtggagaaattggaatccttgtacgttgctggtagggatgtataatggtacggccactttggatagcagtttggatacttcctaaaaagttaagcagagttaccatatgacccagcagttccactcccaggtatatatccaagagaaatgaaaccatatggccacacagaaactcacataaatgttcatagcagcattatttttagtcgctgcaaagtggaaacaacctgaatgttcaacagatgatgaatggataaataaaatgtggaatgtccataccatggatgttattcagcagtaaaatagactcaagtgctgacataggcaacaacatggatgaacctccaaaatattatgctcagtgaaagaagccagacactaaagcttatatattgtatgattccatttatgtgaaatgtccaaaattgacaagtctcatagagacagaaagtagaaagcctagggctgggccattggtgaaagacttgaagggtgttggggagtaactcctaattagcacagggtttctttttggggtgatgaaaatgttctaaaatttcttctttggttttttcactgccttttccttacaaggtgaaaaatgttctaaaactgattgtggtcatcgtcgcacaactctgtgaatgcgctaaaagccgctgggcattacactttcaatgcgtgaattgtatgggatatggaatacaagaaatatgttatggccaggtgcagcggctcatgcctgtaatcccagcgcttcggaaggccgaggtgggaggatcatgtgagctcaggagttcgagaccagcctgggcaacacagcaagaccctgtctctattttattctatgttttaaaatttaaaaattaaaaagaaaaaagaataacattttataagaaaatattttatgagagacttataaaagagacattaagaatatgaagtaatatatttcgtattccttatctcaataatgctgtagggaaaaaacaattgaaataaaa

SEQ ID NO: 10503 - DNA, 1037 bp, Homo sapiens
taacattattccttttggcaaatctaaataaatatatgcatatacatacacatgcatatttgtattttcccttccttcctacacaaacagaaacacactctacatatttttctacgtcttgcagtgcttcatggatataaacccatccatggaccaaaaatccatgggctaggagggaagacacacaagataagaaattactgtaatataattgtttgctgatgtcatagaggcagatagattaaatgtcattagacacaaattatggagcagtttttctagggcgggtgagtaggttagggttagcttcagagaaatgacctttaagctggactttaaaggataaccttgaattccaaagttcagctggggatggggatgagaataggagacaggcattccagcaagaagtaaaaccctgagcaaagtgtacagcatgttggtgaaacagcaagtacacatgcaggtgaactatgtttatgaattagaactatatattgtaggctgtgagattttgttgaaaagttctaagttaaatgaatgacacgaccaaagaaatgtgttagaataactggtaacaatgtaaaggatgatgggcagaaagggaaacctgaaggatagagaagaggaggcatactctttaaatgtaagtcgaaaatttagcgtattttgtaagtaattggatgttaagagtgaggaagaaagaggagttgaagatgattccaaagtttctttcatggacatctagatgatggtaatagggattcaggaggagaactaggttacagcaggaagataaagagaacgttagttcaggccaggtgctgtggctcacgcctgtaatcccagaactttgggaggctgaggtaggtgcattacttgaggtaaagagtttgagaccagcctgaccaacatggtgaaactccgtctctattaaaaatacaaaaattagctgggcatggtggcacctgttgtcccagtgacttgggaggctgagataggagaatcacttgaacctgggaggcagaggttgtgat

SEQ ID NO: 10504 - DNA, 1023 bp, Homo sapiens
catttagttgcctagctatttcattagaagttgcaaggccgggcttggtggctcacacctgtaatcccagcactttgggaggccgaggcaggtggatcacgaggtcaggattttcagaccagcctgaccaacatggtgaaaccttgtctttattgaaaatacaaaaattaaccagccatggtgatgcacacctgtagtcccagctacttgggaggctgaggcaggagaattgcttgaacccaggaggcggaggttgcagtgagctgagtccgcgccattgcactacagcctgggtgacagagtgagacttgtcttaaaaacaaaacaaaacaaaaaagaagttgcaaaatggtgattatttgaattctctcattcattcaacatttatgagttattcttcttctgtaaagaactttgccttataaactacttagaaattatagtaatgacaagataaatgcttgattctttcttttccttatgtatcagtttttagaataatgaattggttctctgcaatctccagtggagactaaggaagttggttttctattttgtaacataattatgcaattatggattttagtatattttatgtgcttcagtccattaagtcattcttcttttgaaactgaaattattccacttagccagtgggagcctggagcctcttcaggctgactcctgtgtccttttgatgtgagctcaatagtctttgatatttttgttgcttttaggcaagatgtcctatgcttatcttgaacatttcctgtaccagacatggaatcaaacatttctcctaggaattctggtttggtctcctctcctctcctctcctctcctctcctctcctctcctcccctcccctctcctctcctctcctcccctctcctctcctcccctcccctcccctcccctcccctcccctcccctcccctccccttccgtcccgtccccttcttttcattttccttttctttttctctccttctcttctcctctcctctcctctcctctcctccc

SEQ ID NO: 10505 - DNA, 1069 bp, Homo sapiens
tttcccatctatttggaataaatttataattcctactatagcctataagattatataatttggtctcctgctgtctctcaccacagctcctagcactctcctcctcacatcggcatctttctttttcattaaacccttcgctgtgctcccgctttaagaccatatattccatttcttcttcctgaattactcttttcctacatatccacatggctgtctctcctgtttcttgccagtctcttatcaaatgttatctcattagagaggtgtttgctcaccatgctgtctaaaatctcattcttcctactggcccattgctctgtagtctctgtcttgctttacttttctttttggtttttatcatgaactgacatatatttatttgtttttttactgtcttgagtcaataaaatttacgtgccattaaagactttgtcatttttgtttcctaccaaatcttcaatactcaaaatagtgcctacagggaatgcatgttccataaatatttattgataagttgaataaaatactaagtgaatgaaagaacatcactggattgctgattatggcgtttaagttttattcatctgtgtcttccttgtttaatgtagtgtctaacatatagtaggcactcagtaaatgtatttcattgtgtcataatgaaatataactaagtcaagcatggaatttgcatgttatttaataacatcttagttaaatgagtttttgacatggggaaagcaccttttttgggtaactgtatagagaaagacatattgaagattatgaattctaagcagtgtaataaatagacttcagtaattggttatttcatgaatatttactactcattcaattgacttatccagtttatttttgcatactattcagccttatattatgaaggagcagtgatgacagtgtgggtttatttaatgttacaaacagaattgagaaactggttagttttgtaaaccactaaatttataatttaaaacttccacactctgatatctttagatatatatccccaaacttcctatttgagaccatgaagtcataaatccag

SEQ ID NO: 10506 - DNA, 1044 bp, Homo sapiens
ttcctcctacatgttctctataaaagaactgctagtgacaagcattttattatattaaaaattctacttcatactgttttaagttaaaatgtatttattatgaagccaatattgtgaaatgtttttttctttttccagaatgtggtttttttttcttgtaatggactaagatgcaggcttattgtgtagaatgaggagctattgcccagatggaccttagtgaaagtaacttaaataagcaagtagattttgcttctgtttgggaaaatgatctaagacggatgctggtattttgggcaggtggagactaatgttttatctcaatgtttgcaacttaagttcagcctacttaagggctgtcccttaagggtgtccaattgtttggcttccctggccacactggaagaattgtgttgggccacatataaaaatacactaacactaacaatagctgatgagctaaaaaaaaaaaattgcaaaaaagtgtgataatgttttaagaaagtttatgaatttgtgttgggccacattcaaagccgtcctgggacgcatgtagcccacaggctgggttggacaagcttggtctagaagttttctagattttactacaatgttcaaatggcaaactttaaaagtggggaaaggaattttgggtgagataaaaagacaggtttgaaaaagcatacaagttcagggaactgcaaatggtttcttaagaccaaagcgcaatgtcagtgtgaagaagtggcaggcaatgggaaaggataaatcagtggagcccagacaatgaaggagctttgtacttgatgctgaggagtgtggatttgtttctgcagataatggggaacttctgatttttctttttttaggtggacagatagaatcaagtttgcttttgttaattcatgtgacaatgtagaaggtggactgaaggtagggagagtattgtattcattggagactcattaattgttagaagactattgtaatcattcaagcaagaaataatgacctaggccaggtacagtggttcatgcctgtaat

SEQ ID NO: 10507 - DNA, 1030 bp, Homo sapiens
acaagattaatctgggccaagggctttcctgtgaaagttactattttcattatgggagaaaaatagagcagcatggccagtgtgcatttttgttatcccatccttaggtaagtgagtttagacagcctgagctaaatacctagatttgcaaaaacacctcctacccccatgctttccttttaccatttaaaattgtttgtgaagatcttttttttctttctttctttcttttttttttaaacacagagatagggtctcactgtgttgtttgtttgggtttgcaactcctaggctaaagggttcctcccgcctctgcctcccaaagtgctgggaatacaggtgtgagccgcagtgtgcagcagcttaagtttctgatctccctcaccacctcgcactttcactcctcataccccttccttgtttaatagaaggatcctttgttttgagtagtctccaagtggagtattttggagagactttgaataaatcctggcccaagcctgatcacaacacttggacattgagcttacctgcattctgctgttgggtagatatggaatctctgcccctcttgatcaaagctacatagcccataaggaaacatccattgagcagccttctttcctttcacttaatcaatttcaatgtattgtggtagaggtctttgtgatattccattttagactatatgatctttaggaatgcttaaccctgctgtgccaaagaccaggggaaggctgtgtattcaaactcatttgttctctgcttttttctttttaattattagtagttaactctaaatgaaagtatagaactgtttagtttgagcaaggaacactatttgttggcctctgctttctgttccccttccttcccttccctccctttactgtggcatcatgattcttccttcctgtattcttggtcattctcccagcacctcactttagccctacagtggagattcttctgttcactaataactgcagtggtgtcagtttcagtagatcagccttcgtcttcctttgct

SEQ ID NO: 10508 - DNA, 1025 bp, Homo sapiens
caggcgtgagccactgtgcctgaccttatacaaagttttaaataacatggccttctgactttaacttagaaaccaaagagtggtaggagtagggggaaggtattaaataacagaaactatctttggtgattaaaaagttgggtacctactattctaataacttttaagggctcttctgtaggttagtgtaaaagtaattgtggtttttgccattaaaagtaatggcaaatggcgggcgcttgtagtcccagctactcgggaggctgaggcaggataatggtgtgaacccgggaggcagagcttgcagtgagccgagatcacgccgctgcactccagcctgggcaacagagcgagactctgtctcaaaaaaaaaaaaaaaaaaaagcagtaatggcaaaaaaaaaaaccctaagaatttcaatatattatgagtcagtgaaaatatagtatttgttgttttgtttccctaagtgcccaattgagagatctggacaattactattatagagattgtgaggatggacagagaaccttttgttgactgaggtagtcaaagaaggaaggctaccagggtgagctaggattgagcagtgagaaggattgtttctatgtatggagaaaaatgggaaagagggaattgtggacagagcagtgtaagcaaggatacggaaatagcaaagtacaggtcatttttagggacagaagatgaatcagtttagcattagaagatgatgaaaaagtagtctgaagttaaagtatggaaagccttcttcaaacataaggtcaaatacagctttggaaaagttaacagttacaagtatgatggtgtaatgaagattctagttcttctgtaagccaagcaggggccattggctttaggatgccctctatgctccaatataatggtgctgcctggcatcattgaaaacattaaaaaaacttttctaaaaagtatttgaggactgggcatggtggctcatgcctataatcccaacactttggaaggctgagatgagagaattgct

SEQ ID NO: 10509 - DNA, 1050 bp, Homo sapiens
ggcaggcctgttgttacaggtagaaggtgctcaaaagctggtttcttaactaatttatggattatttttattttttatttgttattttgttatttttaggtttttttttttttttttttttttttttttttttgtagagacagaggctcactgtgctatccagggtggtctcaaacacgttggctgaaatgatcttcctgcctcggcctcccaaagtgttgggtgtgagccactgtgcccagatttattttattttattctgtttttttagagatgacgtcttgttacgttgcccagacaggactcgagttcctaggggattctcctgcttcagcctcctgagtagctgggactataggtgcacaccatggtgcctagcttaattaatggagtttttgataatggttgacaaagatagtggtaagcaaagcagcccttatatagactttacatcttaaaacataatcccctatgtgtgaaattgagaacagctttctagaataataaacagagatctgtatgctaactaaaaggcagagagaatattggctcagccaggccctcacttttttgttcctccctatctgtaaaacatcatttacctcatcagcgtgctacggacatgggttaatgtttggaaaattctgtggaaagagtggggttctgacaatgtgctctgaccaaggcagtttagcaaatttgtactaagtggctgacctttgataagcaccactccttccccacctgacctgtgattccatttttcttttgtgcaaatagttctgaaggtttaatgtttattttttactacgatgcagtagactttcttctctcgtgtagaaactgctcgaatgactgtggatgactcctagaatataggaataacagaattggtttctcctgtactctcaacacaaaatacttctgtgaccaaatgtgtgggagtgtgtccccacacaccaagcagtcaaccagttctgcagcagctgccagctggtgtcctctaatgcagttcagttcagttcagttctgacactgtctacctggaga

SEQ ID NO: 10510 - DNA, 1054 bp, Homo sapiens
gaaattccttgaataatatgtttttacccccttacttgtattacatttaatgacatctctggctttattttctccattcttttttccatggagtttcttaatttcactgtttttgccttgccctttagacgggtgaaacaatgatgactcattttagattgatgaaagggacagcttagcagctggagagctggtagacactagagcactaaattgccagcaccagccttctcttcattgtccacgtaaggcttgtggcagaggtatgcccattcagtcatttattaatatgtaatttgtaggttagatgacttcatcaaattatatttacatctgacctggaggttcaaccatgttttgctttgggacatttttaattgttaaaaatcatagttgggttctgatcaatatgtacatgctgaagttcttatttagccacattatgggcttttttggttttcttcagcatgtcaatagtacacagcagctcagaatggtcaaaattgtttcattagtgccttaacaaccattcatgatatatcatattgtagaatgcaagtatagtcacgcactgcttagcgatggggatacattctgagaaatgcatcattaggtgattgtttccttgtgggaacatcataagagtgtacttacacagacctagatggtatagcctactacccacctagggctatgtggtatggtctgttgctcctaggctacaaacctatacagcattttcctaactcaatattgtaggcagttgtgacccaacggttaagtatttgtgtatctaaacacagctaaacaggaaaggtgcagtataaatacagcgttatcatcttacaggacctctgttggtatatggtgcacgactgtatatcctttatctacatttcccccttttggcttggatagaccatcaattccttgggtttacatttatttcatgtaatcttaaaggattttgttttatgcatggcaccattttttttcaatacaaatggttagtataaaacccaaatttgagaatttgataacaatggcttagtat

SEQ ID NO: 10511 - DNA, 1094 bp, Homo sapiens
gtatttttagcagagatggggtttcaccatgttggtcaggctggtcttgaactcctgacctcatgatctgcctgcctcagcctgccaaagtgctgggattacaggtgtgagccactgcacctggccagaggtaaaattcttaagtttaacaggatctttctggttttctagcctcatctctgtcctcttagcgccttagcttcactggccctttttcagatccttcacatgccaagctcattcttagcacagggctttgtatatgctcttttctctgctggacaccttttttcttggcatgtttaatttgtatttatcttaaggacttagcttatgtgttcctttctcaagaaagttttccctgaccttccatttgcctaaaggtagattagattccctctgaaattattaatagtaatgatggtaacaacaataatagcagcaacctttgagtgtttatgagttgcagagactgttcttagcacttacacataggaagttttttggttttcatagcaaccctatgagttgtataggtgggtaaataagtaggacctagaattatctgcatcttatagatgaggaaactgaagtgaggaatgttaagtcacttgtccaaagtcacacagccatttggtagcagagttggaatttgaacccgggcagaccccagtgcccacgttctaaactgctgtgctctactgtaatggtgagtataactgtgtaatgttttttgttaatgcctacctttgttggtaggctctaagctcctcgaggtcagaaatcatacctgtctggttaatttccatggcctaggacggagcctggcatggagtagtctgtgaccgagtacttgttcctattgaatgaatcacagcttgccagtctactaaattgaggaaatagagggtttcagtgtgatccttttcacttttcctccccactgcttccaaatattaaactcccttggttaaaagaataggtgcctgtacttatttcaaaatctaacccctctacctgtttgccttgtatattctaggagtaatttatgtacttcgtaagaaaaattagtgcagatgtacataaagtaaagg

SEQ ID NO: 10512 - DNA, 1050 bp, Homo sapiens
agaaatgattcagaattgaaactaaagtgaatttggacttactgtatttctttgcaattacttttaaacaattgctgtctgttactattaggcatattttggacctatgggttccattttgggccgatatttggtgttatgttgttaaatttcttgcctggcttagatggttcattgttgaaactaaactggaactaggtttgatcagagggccaatggaaatgcacgttgtggcccatttggggaggacaaaatttgacatatttttactttaagaattcttaggaaaatttggataacgtgagaatatatttccaaagggttaagtaattttcgagggaaaatcagaaagcttgtaattcctactgaaaatattagcctgctgaaatattagcctatttcctactgaaaatataacattagcaggccgggcacagtggagttcacgcctggctaatttttgtatttttagtagagatggggtttcaccatgttggccaggctggtcttgaactcctgacctcaaatgatctgcctacctacgcctcccaaagtgctgggattacaggcgtgaaccactgtgcctggcttgacttttttatttaaaaaaaaaaaatctatacccaattgccctatcagtttatcatttactcacttatttgaaacggtcatattaacatacactctttatttatttatgtgcctatactttgttttaattactgtatctttagaatatgtttcaaaatttcattaactattataattgattctctttttttgtaacgtatcatcagcaaataataatttggactcttctaatatttctgcttatttattgacattttcaaagaatagcttatgattgataataatcataccagcgaatacagtgcttttcaacttaaatatgcacagcaattacctgaggatcttattaaaatgaagactcagtagggctggagtggcctgagagtctgcattttgacaagctcccaggtaatgttgacttatgggttcatagaccttatgttgagttacagggaacta

SEQ ID NO: 10513 - DNA, 1100 bp, Homo sapiens
taaagtattctagtgaagaccggattccttggcataagacaccaggaattttagattgataggagtaaaaataaataaagaaatattggctcagggaataaacttcattaaaatcaatttatgggccaggtttggcggctcacacctgtaattgtgcagcactttgggagactgaggtgggcagatcacttggggccaggagttcgagaccagcctggccaacagagtgaagccctgtctctactgaaaatacaaaaattagccaggtgtggtggtgcatgcctgtaataccagctactagggtggctgaggcagatgaattgcttgaatcctggaggtagtggttgcagtgagctgagatcgtgccactacactccaacagtgtgagactctgtgtcaaaaaaaaaaaaaaatcaatttatgaaagttatttttaaatttgaagatattgaagatactaaatttgtgtttaaaaagcatttattttgatcaactccgctgtatagaatattttgtcttaagtcactgtaaagtttccatgccctcaaatgaaatacagtgccaggtttaacattcgttttcatggattgttttcaaaagttattgagttgtctgatttgctgtaaaaaaaatgaaaaattcatttcttttattaacatgatgtatttactgtgattattctaatagactaatggacttttaattttactgtttaaaatagtttataattaaaatttaatatccagtcttcacttgttctttcattttttaaaataataaagtagtttggggtttatcagaacaagggaagaaaccaagctacgtctcattttatgttgggtaagaatcactagagacgaaattattattattattattgttattattattattattattatttttgagatggagtctccctgtgtcacccaggctggagtgcagtggtgcaatctcagctcgctgcaacctctgcctgctgggttcaagcagttcttctgcctcagcctcccgagtagctgggactacaggcgtgtgccaccttgcccagctaattttttgtatttttagtggagatggggtttcaccatgctgaccgg

SEQ ID NO: 10514 - DNA, 1051 bp, Homo sapiens
agtgttttgcagatttcgggttaaattaaaaatatgacaattttaatttaatttaattaaaaatatgacaattctcaggccgggtgtggtggctcacgcctataatcccagcactttgggaggccaaggcgggcggattgcctgaggtcaggagtttgagaccagtctggccaacatggtgaaaccccatctctactaaaaatacaaaaaaattagctgggcctgtaatcccagctacttgggaggctgaggcaggagacttgcttaaccagggaggtggaggttgcagtgagccaagatcatgccactgcactacagctgggtgacaaagcaagactccgtctcaaaaaaaaaaaaaaaaaaaaggtgttatgcagatttcagtttagccaccttgatcctcccaccttgtgcatgacacgttaccttcctgtggcatgcagtatttgactgattcattggatgtgacttgcattaagttcagataacattgctgaataatcactttcttattctttagtgtagcctcctttctctgtagaacatcagaaattcttaaactctgaaatacagcattctcttgggattttctgtaatgtctttctcatgtaggaaccaacttcagggtcttgtgagcatcagagaagtttaaggtctagggaactgagctaatggaacaaggcatgcctaatgtgataaaatccttgctttctttgcaattgaaattgtttattctaaataactgctaatttacaaatgtattttcacatgattacccattctgttctcaaagagcataataggggttttgtgactttcagactttcctgaaaaagcctaaccgtggattttagaattattaagctagaaaaatacacacatacacacacaggtttgtttgggacccttagtctccaccctggaattaagtgacactgaaaataactctggaataaaaggtttttatgtagcagaatagttgacttacaggggttcttccctttgcacattttctctgggtagaaaatgagcttgtttttcttttagttgt

SEQ ID NO: 10515 - DNA, 1050 bp, Homo sapiens
ttataattttttcaactgctttattgaggtacatttcacagaccatacagttcacccaattttttttaagtgtattcatggagctgtgcgaccatcactataatacattttagaacattttcattatccttaaaagaagcatggtacccattagcagtcactgcttatttcttcaacctctcttctcagccctaagcaaccacaaattaatttttatcgatttacgtcatctggacacttcatataaatagaattatgcagtgggtgtcctgttgtattttacttctttcacttggtgtaatgccttcaaggttcatgcatgttcttacatatgttggaatctcattatttttttatggctgaataatattatgttgtatggatacgccacatttttaaaatcaattcatgaattggtgggcattgtttctacttattggcgattatgaataatatggtcttgaacatttgtgtacaaatttctgtgtgatcatgttttcatttttttcttgggcatatacctaggagtggaatcgcttggtcatgtggtgactccttgtttaaggttttgagcaacttccaaactgttttccacagtagctgccccattttatattcttacctgcaatgtatgagggtttctgttctgtctacatccaaaacttattttcttttttttgattttagccatcctagtggatgtgaagaagtattgcattgtggttttgatctacatttccctaatgaacaatggtagtgagcatcatttcatgtgccagttgatcatttgtatatttcctttggagaaatgtctattaacatcctttgcccatttttgaattggattatttgtctttttattgctgagttgtaagagttctttatgtttgggatacaagtcccttatcggatacatgatttacaaatattttctgccattctgtgggttgtcttttcagtttcttggtagtgttgtttgcagcacaagtgtctttaattttgattctctagtttcttaatttatatagttgtttaaactctgaaactata

SEQ ID NO: 10516 - DNA, 1053 bp, Homo sapiens
tgcagaacagttaccaggagagaatgttcagctgtgacatactttggttagtagctcaccctggctgtctttgtcctacctgctttgatttccttttctttggaagagccttacttagcctgaggttctctggctctgtttttttttttggtaggaaactataaagtattacagatatttttaaaaaagaatgttttctgctctcaaattgcaggtagtctgttgcctgtgcctaattataccttcactagttggatgattgggaacaaagagtagatagattttgtatgcattttttttccttttttaaaatattggggcagggtcttactctgtcacccaggctagagtgcagtgacactgccagagttcactgtaacctccaactcccaggctcaagagatcctcctgcctcagcttcctaagtagctgggactacaggcttataccaccacaccaggttaatttttaaattttttttgtagagatgggggtctcattatgttgcccaggctggtcttgaacttctggactcaagtgatcctcctgcttcagcctcccaaagtgctgggattacaggcatgagtctgtaacccaaatgcttggcccatatgcattttttaaagtatgcatgactataaaagcctttggccaaatacgtttaaactatatttcaacaaatatatatcacttgcctgttattggtttgtggtaagagttccagctttggataaagcaacctgagtttgaatcttttgctgcttaatagttggatatttttaggctgtgagaagttatttaacttctgtgtgcttgggtttcctcatctgtaaagtgggatgacagtagtacttacctcacaagtttaggtgttatgaagattaaagaagatagtgtatgtaaagctcttagagcagcatggtgccctaatagcatgacgtaaatattaccatcatcatcatcgttatcagatgttttagtaacataataatattatggacataataatagtcctcctttttttgcttctcaccccttgggcacgattcatga

SEQ ID NO: 10517 - DNA, 1997 bp, Homo sapiens
gaagatgatgaggagtggaaaaataaagacagctaaaccttcaagatcgtattgacaagggcgtgtgtgtttgtgagaatgtgggtgtgatcattcttgtttgttgatttgccatcccctcctttcctttcatagatctggacatctgtcccttacttagcatcctacgtcagtcccgtgttaaaagaaaacaaggcgattccgcagtccccccgttccctggaggtcctgtggaatggtaagtaatcagcacaaagggggttaatcttaggcctgaggtttggggccgggtgacaaggaagttaaactcgtcctccctgccagattctaccccctttcggagctgagctccagccaaacctgtggagttttctttgaccattttaggacatgttactgcttctgagttggctcccccagctgcttaaacaagacctttctcctgggttcctagtagtgaaaaggagcagcagagcaactgaggaggagggcgggtgggaggcatgggactggggcttggggaggtcaggcgagaccggggtgagagctcagagaagctcctgtgacttccatgctaagatcttgccagagaactctggtcagtcctcgggtgtctggatgaagtaaaggagttaggcatttcttcctttgattctctggcttacctaatagagagagtcagatgtggtctgctggggatggacagagggtttgtagaagtctcctaggctttagtgacccatcctctgcctccgcctccatggtggccagcatgaaccaggattgtctgaaggggttgtatcctctaagccagcgacctggttttatgttgagcgaagaggcggacgccctccctagaggagagtgcagctggatcaggatgcttgtgcagaggatgccctgtctgcacatttaccagcgttttccctacccccagctccttgggggattctttttcctggagtcatttactactttttgcaaaggaagtatgctatgcttagtgcccaaaccaaaactgtcttcactttttctgtcctcctagaaagtgatcaattgagagccatggcaggagaaggaatggccagagaaggttactcagaagggaggatgaggggtggcttccctcaggtgaaggtttcacagagaagaattgagttttctcctcctaaccacatccagcacttgcccaatttccctcaatgtggaatgaaacccctgggccagtcactgcatttcccataaaaggaatgttatcttggaaagggcataaagcgtcagccaagtcagagaagttcagaaacatttccaggaatgcagttcatttggaagcccctggctttgcacttgcgtgtcttagagatagtgtgccttcaactttaccttctatccagggctatttcctgttgcatctgtcaaatgagggcagtgacttaaaagagtaatatggtcttcccagcttcgtcatcctctgcttcctgctgaccaggggacgttgccacggaatgtctaccctaggcattgaggcatctggcaactgcttgcttgtcactaaaaagtaagagaaagaaggacagattgcctgggtggagaagagtgggaggtggcctagtggagaaagcaggattaagagaagggagggaaagatttagggagtttggctaatggagccctttacctgttggaagggcagcaagcaaaagttttaccagagttttccctacccccagctccttgggggattttttgttttgtttcatttttgtttttgtttttttgccttgagtaattttgacatgcagagttattcacaactttttgcaaagtactattttcattggcttttcagagccagtgaagttgccttctcctccaacatgaccacattttcctctgagcagacaaaaacagaacaaataagtttgtgggcttgcttggaggttgaaagaaataagtccagttaaaatgagagttgagccaggtgccctggctcatgc

SEQ ID NO: 10518 - DNA, 1049 bp, Homo sapiens
gcttgaataaacaagcccatgtgctgagcgtgacacaggtgccatggtcagcttcattttcaactgaggacagagcaagagaagattcaagccactgtaacctgtgggtgggacaaggttaaataacaggaaggacttactgtctgaccatgaaaaacaggtggcgaatagctgctgtgataccttgtggagcatgggttttccaggtgggttccgcagaggctaaaggtgctgaagagatgcctcaagagccagcacaggcaggggagggaagcagaggaaatcaaacctccccttcaaacagaacacctctgtctttttctctcttgtacactaggatcctgcatacaattggaaaaggggaaaaggattccgctgctttattttttatttttatttatttatttatttttgagacggagtctcactctgtcgcccaggctggagtgcagtggtgcgatctgggctcactgcaagctccgcctcctgggttcacgccattctcctgcttcagcctcccaagtagctgggactacaggcgcctgccatcacgcccggctaattttttgtattttttagtggagacggggtttcaccgtgttagccaggatggtctcgatctcctgactttgtgatccgtccgcctcggcctcccaaagtgctgggattacaggcgtgagccactgcgcgcggctgattctgctgctttagaaaaaaaaaagtttgaaaattactgtcataaactcttggaccatcgacatccatcattctattggagtaggaggcactggcaaatattagttgagccgggttacaggctgcggagaaatggggcatcccatccaaagggggaaaggtatactagataaggtttggggcgacccagccacattgggactccttgaaaaaccagccagaggtggggtaagtggcgccagggagcctgcttgctcccaggtaccaatggccagctacagccaggagaggcaagtggaaggcagaggaactagctgggaaaaggagtccatttgcacagggctggctgattt

SEQ ID NO: 10519 - DNA, 1031 bp, Homo sapiens
gagtgggggctgtgtgtggtggctcacgcctgtaatcccagcactttgggaggccaaggcaggtggatcacaaggtcaggagttcgagaccaacctggccaatatggtgaaaccccgtctctactaaaaatacaaaaattagctgggtgtggtggcgcgtgcctgtagttccagctactcgggaggcagaggcagaagaatctcttgaacccgggaggcagaggttgcagtgagctgagattgcgccactgcactccagcctgggtgacagagcaagactccgtctcaaaaaataaataaaaataaaaagagtaggactgaaagacacaggcacagggggctgtcacaacagtccaggtgtgaggccctctatgacaaggagggcatgaggctgcaataagatggaaagagaaaggaagggcaggatgcagagaacgtgccagggcaggtgggaaggatttggtgacattggtgtgaagggaaaggaagagggcatcaaagatggttttgagattctgatctggggtgaactggaggataacaagactgtgggaataggaaaggtggcaggaggggatggcttatagtacttgtatacaaatttatttgcttgtttattaattacagggtctctctctgttgcccaggctggagtacaggggcacaatcgtaactcctgggctcaagtgatcctcctgcctcaggctcctgagtaacttggattacaggcacatgccaccagccccagctgattttttcaaattgtctcactatgttgcccaggctggtctccaacttctgggctcaagtgatacttccaccttagcctcctattagtttttcccttacagcaattcctgcaatatataaaaggtctttacttcagtgagctgtgattgcaccactgcaatctccagcttgtcagaggatgacagagaccctgtctccaaaaaagaaaaaaaaaaaaaaaggtctttatcactcacagtgtctagcagaagaaatggggttgaaaggttaaaccactggcc

SEQ ID NO: 10520 - DNA, 1035 bp, Homo sapiens
cctgaaataatgcatacatcctgcagcccagtacttagcagagagtaattgctcaataaatgtcagttccttcctcgttcctttctagaagaggaaagtgggcttaaagttcaacaccagtccaggaagctagtgccagggagcccacaactaaagcaactgtgtggcttgcactatgatttctaactaagcctgcatcagccagtctctgctctctggtggcttggactctctccccatctgtctgtaagaaggacgccctttcttcctacctggcgcggctgttgtaagtgccaaatgagaacttggatggcattgtattctgaacaagaaaaagtaaaatttggggagcactttctctgtgctaggcaattaattggtggtgcctgggggctgatccacaaagagacaagaagacatgttttctgcccacatagagttacagtggaagtgaaagggcggaagtgacgagtacaaggtcatccatgcagatatactcaaagcgaggtcggcaaaccctcattggagtcagctaaaaatgtaaattccctggccccatccctgacctctagagacaggatctctgacagtggggccccgtagtttgtgcctcaaatttgagaaccatttatggctggacgcggtggctcacgcctgtaatcccaacactttgggaggctgaggccggcggatcacctgaggtcaggagttcgcgaccagcctggccaacgtggtgaaaccccatctctacgaaaaatgcaaaaattatctgggcatggtggcaggcgcctataatcccagctactcgggaggctgaggtaggagaattgcttgaacccaggagacagaggttgcagtgagccgagatcacgccattgcactccagcctgggtgacagagcgagactccgtctcaaaaaaaaaaagaaaagagaataatgtatttataggagtgcagagagtgagtgccacaggtgttcagaaagtgataaactcatccaggaaagccgcaccagggacatgtgctctgagcatg

SEQ ID NO: 10521 - DNA, 1033 bp, Homo sapiens
agacatggctcctgacttcagggagcttagcatctccttgggcagttaccaccaaacagtgaacccttgaaagaagatactgtggactgaggaggggctctaaatgctggaagagttcagaggaggagaagaatagagaaagataaggctggggaggtgagcaggagccagatgttgcagggcctgggtcaggttgtgaaattttacctttatcctgagaacaaggaacaactattgaagaattttatgttaggaatggcagtatcagatttgtgttttgagaagactactctcagactctcagggccaagatggaatgctcacctgtaagaggagctcgattgtatttgtagagtggacaatggccgcagtgtagagaacagatgaaagaaacagggtatgctgagcacgtggagagctagggaagaggccatttccctggtctaaggagggatgacagtggctaagcctgaggtagagatggggatggagggaagcggaaggattcaagaatgacacagaggccaggcgcggtgactcacgcctgtaatcccagcactttgggaggccaaggtgggcagatcacgaggtcaggagatcgagaccatcctggctaacacggtgaaaccccatctctactaaaaatacaaaaaaattatctgggtgtggtggcatgcgcctgtagtcccagctactccggaggctgaggcaggagaatggcacgaacccgggaggcggagcttgcagtaagccgagatcgcgccactgcactccagcctgggcgacagagcgagactccatctcaaaaaaaaaaaaaaaggaaaaaaggaatgacacagaacacaaaagctatcccacttgataaggagaaagggagaaggaagagtcaagaaattgataatggtggtgccattcaagatagaacccaggaagttgctgggtaagcagggtgtatggtcaagagttctgtcttggacaggttgagtttgaagtgtccatgaaacatccaagatgagccgtcaactaaaaactt

SEQ ID NO: 10522 - DNA, 1667 bp, Homo sapiens
gagtgcaggggataccaggtgggttgcacgtgtgactgttggaatggtggtttccatcccggcccagagccgtttgcttgtttcccaggcaccaggcatgcaccagttgggggtgggggagtccccttcttcctgggcccttttcctgctttgctcctctgccctgtacctccctcaggagccactgccttccctacagcagcacctgaaagctggaaggggctggaggggcttgcgggatcattcaaggccctttaggaacggccttgtctctcttcctacaaagagattccgtagggaagacctgtttgacctgctcctggctcttcatttttgaagtgaatatggagacagagaagacatgtccagaggacacggaggaagaagcattattaatatctattaatatgcacatgagagttttgagtgtcaaactccaagagattagggaatgatatttattcatccaggatgtaatctcctcataaatcatagccagactttaatgtaagccgactccatctctggcaacggcatctcttcctgtttatattggtcagatttggcttttggcagctccctgcattgggtaagacacacggtgtaggtatttctgctgaaaacagggagacagaaccctataagggaagtggctactgtttctgcgaatgtaaactgtgtgcagatctagcaggttggtgcctggtggtgaagaggggagagagtatttcttgtacttgggatgtttatttacctctgtaccgctagatggaagacacccttgttttctcctgtaccttggcacagatgtcatgctggtttcacagtgaccttaatgaagtgggccttagtgacgcctgaggctccttttcacagggtgggcacagcgccattccatgctacttcccctcatcccatctcagatcagcccaggtccccatggtggcaatggcaggggtaaaggatcactgaggaattcaaactcagccagtcattaaactaccccacttcacacctctggcttaccttcctgggtggtgggatgccagtcccttgtttgttagaatactcatagaaccaggcctctgtgggcaaccaagagggccctgaaaatgatgtgtgtgtgtgtgtgtgtgtgtgtgtgtgcacgtgtgtaagggggattgtaggcacagtcttggtacattgctccaggtggaagccccaccttctccaaggactgttcagctgtatagaccaggtaggggctaaggcctattgatataggtttagatgaatttctgagctaccctttgggagcccaggagaaagcagagtgacttgtaggtgggagacctgcaggccccaggactggcctcatctgctctgtcccctgcccctctggtctgcagagggactccaaccaaagtccctttggcccttgaccaggtaatactgactgagccctcacaggggcattggtctgagcttgggacatagatgacatccttgcttctcagtccagtgggggagatacagagacgactggacagccaactggaggtgttccctgggaacatcagagttggcagcaactctgggaagcagagcacagaactctcctagggatgaggaagtcatggtccagagagggatggtgacttgtctaggggctcatggccaattga

SEQ ID NO: 10523 - DNA, 2029 bp, Homo sapiens
aaagcaaaaaacaaaattaaaaaaaattgatttccatattttatttttcaaaaccctaaaatattacaaaataagtcccgcatatactttaatgttttaactcttttggacaaaggaatcaattacttgaagttgcttttttgactctgcctacttctgagcaaactatttgcgactcacccacaattgccttggagatcaaaatcctacagatgcctcctgatgggacatagccctaactccttaacaactgtagcaagaactgcacggtacaaacccaaaaaagaacaagctcatctatttggaacccaagcctcatattttctgtccagtcaatgttggttactaaatagaaaacctaattaaggaagtaacttttttccagggaggggtgggagagggaatttaaaaggtgtcaacttttgaccaaaaaaattgtgcccttgtaccgatgcagctctctttctcccccacctcttgcgagataagagggatcattcatgtagaagaaaagagtataaatgcaattctgtatctcgctagagaacgtgtgggtgactaaacaaaaagtgcagtctccttcaccaactttagactgcgtggtgccacatgcctgtgggtccctcttaaagcacagacttaaaatggaaagtattactgaagtatagcctctaatgaggagtggcacttaaactatctgggacaccactactggacacggtcttgtagaggcagctgtccagttttggtgcttgactcttgaataggaattgttaaatggaaagatgctctgaggactaggtcaaagcctggtctttttttttttttttttttttttctttcttttttgggccctcataataagcattgttactattggaagttgttttcacattctttccaatattaaatatgtatttttttaagtaatgataatattttccagtggctcatttggatgagaactaccctctatttttaatattaaaactacatccaactcatcatttagcctttggttgtacagttgtgtaatgggctatggactgttacacaccttaccacctctaggcctatgttttttctttccccatatattctgatggggataaatactgttttgcctctcccataggaatggaatacatttattctaaaatgatctttcacagaagtaagagagagggaaacctaaatatacctctaaattgtttgaagttggtcccagcagcataaaatgggttggccccaaagggttggagggtgggcttggttatcagtatttgttttcagaatgagatgggagcatctttcctttgccacgtgctttgtgcttgataacatcatgcttggttcaaacgacaactcagcacaaagccttgagtataaattgttggaatcaaaacatctcattctgatgacgtggtttaattttttaatttttttttttaataggggtgggagggagggtactttgccccagaagggagggtgtctgcactaaggatttagaaacactttggaagctcataacctcatcagaaactgcctttagccacactcctgaccttctagatgagtaacaaaaaaatgaaataagttcttggaaattaagccatttattttaatttgctatttttttcaatgttctaggtatctttaaatttgttattgtggaatcattttcctgccagatacctttatcaaaattattggcctcatgagagctgaagtaagtcagctttttggtgaactttagtggacttctgtgagattgtagttgtactttgtatctctaaatctaaagatagttttttaaaactcccaaagaaaatctgctctcctttctgatctaaaaactcatctttggggtaaagagttaagtgtccaaaggttgtcacagttcatgaggtcagagggagctagcctggcacctggactctgcccatccacagctgacagattccaacagaagtgtatttaaattctccagtagacaatgctgggtaagggagggggtagggctggg

SEQ ID NO: 10524 - DNA, 1030 bp, Homo sapiens
gttgaattgctagccaagaagatttctcaactgggttattcttgcttctatattcatgctaaaatgaggcaggtgagtataaaactagaacttgcacaaatttaataagaaatctctttctttattttgttttaatgttcttttaaatgtcctgagtttaagaataaactgttccttagtagccaaaggacctttcattttgacctccctcaggttcaattttctagcaataaaatagggataatagtacatattcataacttacaaggttgttaggaaaattaagataaatgtttaaatgagtactttggaagctgtcaggcatgatacaaatgtaaaattttattcttcccttcctttccatgtttaattctctgtttaatacagtaaatagccacatgtggcaatttaaatcagttaaaattaaaataaaaagtcagtttctcaatcacagccacatttcaagtgctcagttaggcacctgttgctactggatagtgtattggaattggaagtacagacacaaatatttcctttattatagaagttttactggacagcactgctctggatttttaaatatggcccctcagctggctgatttttctttttttctttactgtttgcctttagaaaaagatacaatatctaaatttcagaatttgatttagcaaaaaataatttaaaactgtaacaaaaatgacttttttgttaactacattatgaaatttcgtaagtaaacagtttctgtagacgaagatatcaagaacttaactcatttggttttgaaagcagcttaatatcatggatcacttataaacagattttgggtagaactgatcgtctgggagaaataattatgggaaatttggggctgtatatgagtgttaatcaaatggaatacattgctttctcctaggaacatcgaaatcgtgtatttcatgatttccgaaatggcttatgccgcaatcttgtttgcactggtaagtatttttgtatttcctttacccagtgtttttctcccaagttg

SEQ ID NO: 10525 - DNA, 1026 bp, Homo sapiens
agatagcagacattaggttttaattttttagtagaggagtgaataacctcaatgccaaatttattctaagtctctttctgctctgtgattaatttttaaaagcatataatatatattgtctcttctcattttgtgcatactactttgtactgtttggtttttaatctctgttacatgtattatctcaccatgttataaatgccttttaaaaacttattaaaatctgtagtcctgggatctagccatgttttgtacatgtacagatggtccctgacttaagatggttcactttacagtttttcagtggaagtgataagctttcattagaaactgtactttgaatttttaagattgatatttttcctggttagtaatatgctatatgatactcccatgatgctgggcatcagcagcaaactgcagctcccagtcagccacatgatgattgagggcagacagccgatactctacagtatacggcgttgcaggtgattttgcccaactgtaagctaaggtaagtggagcatgtttaaaggaggctaggctgagcgatgatgttcagtaggtttgggtaatattttcaacttaggatgaatttatcagaacataatcccattgtaagtcaaggaggatctatagtgatcagcgttgttaatgttttgacatgaggttattttcacatttgggttgaggtttattattattattattatttttttttttttgagacagactcactctgtcacccagactggagtgcagtggcgtgatctcggctcactacaacctctgcctccccgcttcaagtgattcttatgcctcagccttctgagtagctgagattacaattatgtaccacccacgctcagctaattcttgtatttttagtagaggcgcggttttgcaatgttggccaggctagtctcgaactcctgacctcaggtgatcctactgcctcagcctcccaaattgctgggattacaggcatgagccaccacgcccggcctggtttgtgttttaggtaac

SEQ ID NO: 10526 - DNA, 1023 bp, Homo sapiens
attggtaaagctaaaagtattagtagacgataatgtgagtttgtggacaaataggctacattgtaaatgtgggggtgtaaacttacatctctatcatgggcaatttgggagtatattttaaaattataaatgtatatataatgtgtgtgtgtgtgtgtatattttttttttttttggagatggagtcttgctctgttgcccaggctggagtgcagaggcgcaatcttgactcactgcaatctccgcctcccaggttcaggccattctcctgtctcagtctcctgaatagctgggattacaggctcccgctaccacgccaggctaaatttttgtgtttttagtagagacggggtttcaccgtattagccaggatggtctcgatctcctgacctcgtgatccacctgcctcagcctcccaaagtgctgggattacaggcgtgagccaccgtgcccggccataaatgtatatttttaagaatctttcctgaagaaaaaagttgggtaaatgcagggctgtaggtacaaagttgtttgctatggggtggtattgtcgtgccgaaaaattggccaacttagaaggagattggctaactaaatacgttaaggtataatctgaataggattctacatagtcattaaagagtaaagttgacctgtattcattttcatgaagaggattcatgatacattgccgagtggaaaaaggtaacaaaacagcaagatgagatcactcatataaaattatatcttgattttagttagaatattatatatgataattatgtgatacattctttgtattgcataggtttttaaaaaattatcttgtttgatccttttaacaatactcggctcactgctctagattagaggcattgctcttatgtcagaagtctggtgtgccttctgctattaattgagaattatcctaagacaagaaagtatgcctactgttgaaagcagcaggtgatttaggaagctgtaccccacccaatgtagaggtgaaacaaatattttttaagc

SEQ ID NO: 10527 - DNA, 1029 bp, Homo sapiens
ctgggttactgaactgaggtatatgttttattacaacctagatcttttcacttcctacagaaaaatagcttatacaagctaccagactgtcatatagttaccgtatgtggttcactaggacctctaagaactaattttcagcagaattggttaggtcattgggagaattggtattagtgtatattctgttatttttaaggtgaatgctttaattggtatagaaatgaatactacttcagttgtagtttgtcttggcagaatgtaagtaggttagcaaaatttagactatttttaattttttttataacttttttttttttttttgagacagggtctcactttgttgcctaggctggagtatggtggcacgatcatggctcactgcagcctcaacttcccaggctcaagtgatcctcctgcctcagccctacaaatagtggggactactggcatgcaccagtagcgacggcgttttgtcatgttgcccaggctggtctggaactcctgagctcaagtgatctgcccacctcgacctctcacagtgctgggattacacatgtgagccactgcgcccagcctatttttaattttttttttttttgagatggactctcactcactctgttgcccaggctagagtgcaatggtgtgatctcgactcactgcaacctgcacctcctgggttcagttcaagccattctcctgcctctgcctcccaagtagctgggattacaggtgtccaccatcacgtctggctaatttttgtatttttagtagagatgagatttcatcatgtttgcaggctaggcttgaattcctgacctcaggtgatctgcctgcctcggcctcccagagtgctgggattacaggcgtgagccactgcacctggcctatgagaatattttctatttaaaaaattctggggctggatatgatggctcatgccgttcatcccatcactttgggaggctgaggtgggaagatcacttgaggccaggagtttgagactaacctgggcaacatagcaag

SEQ ID NO: 10528 - DNA, 1053 bp, Homo sapiens
atcccctcacctcagccccgaacctctccactgaagccaccccccaagggacaccaaggaagtggtcctgctctctactgaggaatgaaagagatggggagcattggccaggtgtggctgaacaggtgggtggggggcagggctgggactccaccctcaccggtgagtcccacttgacctttgacccccacctggggcctctcacgagcccgtggtaactcttggcaggggctctgtgctgttgtctcggtgactagccttgtgccctcctctgaccggcagggacaaggatgggtgaggaagtaacggactggagttgggcggggctgggggaggctggagaactttgctctgtcctggcaccacaggccaggccaggcgggtacctgggttgagggagtggggagcggtgctctctctctgatcttccctgggcaagccccgggcacatcaggcatggagggaggatgtgaggagtgagagggtggggcctggacacccatgctttctttcgtcatcgttcagaggactgatactgtggtgcatctggagtattgtgaaatggcccagaacccagatgccagggtgtctgaattcaaatcctgcttcttctaaaattatgggccttaggcgagttatttaacttctcggcatgtcccttttcttagtgggaaagtgaggataataagaatactttcttaccagattgttctgaggattaaactagaggatgcacgtgaagcatttaggactggtgaagttacaaagtaaatgctcaataaatgttggtgatcctcccctcatttgattagtcagagctcttcacaggaacttttgatcctcccaggggttttagcagggaaagaattgatggtgagagagggagtgtgggggtggggaagagacagcctttccacactccagattcctggattctaatacccctccagatccactgtttgctgccgccgcttccccatcgttggtgcctgctgacttcttgattgcaagtttgccaaatagccaggggcctggagaaggcccagggagctt

SEQ ID NO: 10529 - DNA, 1067 bp, Homo sapiens
aggaaccatttgggtttctttgctgtatccctaacacctggcaagggcctggtatagtgaaaatgcgtaacaaataattgttgaagtctaggcacggtggctcacacctgtaatcccaacactttgagaggctgacgtgggtggatcacttgacctcagggagggtacaagaccagcctgggcaacatggtgaaaccccatctctactaaaaatacaaaaattagcaggacgtgatggcacatgcctgtggtcccagctactcaggagactgaggcagcagaattgcttgaacctgggaggtggaggttgcagtgagccgggattgcgatcctgcctaaaaaaagaaaaataacaaaataattgataagtgaaaactaggtgcaagtataggagttgagagcaaagtgggcaaaggcagattttttcttagtaaacgctgtattgttttgtactttctttctgatctgctgcattttgggatccacttgcaacttaaacctgatgttggccaggtgtggtggctcacacctgtaatctagtactgttggaggccgaggcgagtggattgccagagctcaggagtttgagaccagcctgggccacatgatgaaacttcgtctttagtaaaatacaaaaattagccagatacggtggtgcacgcctgcagtcccagctgcttgggaggctgaggcaggagaatcgcttgaacctgggaggcggaagttgcaatgggatgagattgctccattgcactccagcctgggcaacagggtgagactccatctcaaaaaacaaaaacaaagcaaaaaaatccctgatgttaacaagaatgtgcacagcgataaggctgtatacgaagtgcagatgatggggacaaattgaggccaaatcagatgaaagcagagcttgggactcaggacccctccttcctgggagctgaatagactcgggtggcaggaaagaggctctggctgccggatagctctgggtgggcccagagcaaatgacctgacctggtccccctcacccactcctgcagtggctatcacttagaaatcagcatcca

SEQ ID NO: 10530 - DNA, 2642 bp, Homo sapiens
ggaaaacagcgctatagtatgcgtcacaactagcgcagactccggcagtatttaggcggtgcggcttgggaactagaatccacttcctgtcttccgcctcaggctagagggcgagcgcttcgccgtgggacttcttctgcctggctccgccttttgccccggaagtactcacagcggacggtggtttttgggcccgtttctgagcagcgcttcctttttgtccgacatcttgacgaggctgcggtgtctgctgctattctccgagcttcgcaatggtaagcttcaggggtgtgaagtcgccggcgttcttgggtttgaggactcagtggggagagccttcggcgggagcgctccttggcctgccggcctcggttgcagggcgggcgcggttattgcttggcccatgtgctctggtggtggagtttgcgggggctgagggcgcagtattaggggactttggcgctatttgaggacctggttgcattcccgctgccctcctacagccgcctaaggacgacaagaagaagaaggacgctggaaagtcggccaagaaagacaaagacccagtgaacaaatccgggggcaaggccaaaaagaaggtagaaataagacctctctgaaagagactaggggtaactctctcgtaatcctctagtaataggtaacttgtatagtaagtggtttttcaggtgtagatttctagagtcaaaatgtgagagtttatcttcccgtcaccactcgttctttttcccattaggatcatgaaaatgggtctgttgtgcgaagtgtctgccgctgtgcctgctgtgttatttttaactgatctagtggggctcggcccctgtttgaaggccaaaaacgtgtcggtgttttttttttgtttttgttttagtaatgtgtaatttatccttgataacggtggaacagatttctctgacgcagattactcgagagggaaagggtgcttctgccagaaatactaacttgtttctgttttgttttggtgagcagaagtggtccaaaggcaaagttcgggacaagctcaataacttagtcttgtttgacaaagctacctatgataaactctgtaaggaagttcccaactataaacttataaccccagctgtggtctctgagagactgaagattcgaggctccctggccagggcagcccttcaggagctccttagtaaaggtgaggggtgtatcctacatgtgtgtttttgtaggttaaattgtcttgaccatgttaagcatcttcagtggttttgctggaaaagcagaattaaaaaaaaaaagcgtggcttgaccattggctgttagtaatgtaattctgacgtcttactcctgatcctgagatgaattctcagggttcttagccacttttgtgccgtggaccctgtggcagtttagtgaagcccaaggatcttttatgtttcgagtaaatggatgcatagaattacagggacaaccgtttttgaaataattagattactattttgaaacaactttgaaaatgtttaaaacctttatggtaaatattttgttgatgtattaaattttaaaaccagaaatttagtacggtctactcagtagtatggtctgattaccataattccacaataataaggctcagctaactatagtgactgaacgtctataattctagcactttgggaggccaaggcgggtgaatcaacggaggtcaggagttaaagaccagcctggccaatatggtgaaaacctgctctactgaaagttagctggacgtgggggcacacgtctgtaatcccagctactcaggatgctgaggcatgaggatcccttgaacccaggagatggaggtggcagtgagccgagatgacaccactgcactccagccttagtgacagcaaaagactgtctcagaaagggggggggggtggaagataatggagccctaatttaaaggaaaagtaaggatagatgatcgttaaaaactaggattctcggttaccgaacgtcagattaagcaattctggagccaggtgcagtggtacccttgtatttctagctacttgggaggccaaagcaggaggatcatttgagccaaggagttttaagaccattctgggcacctctgagagaactctgtctttttgttttccttttctttaaatagagatgcggttttgccatgttgcccaggctggtctcctgggctcaagagatccacctgtccaaagtgctgggattacaggcatgagcctctgcacccggccaaaacaaaccttactagagtctcattctgttgcccaggttggagtgcggaggggcagtcttggctcaatgcaaccaccaattcctgggttcaggtggtcctcacctcagcttcccaagtagctggaattacaagcatgtgccaccatgcccagctaatttttgtatttttggtagagatggggtttcaccttgttggccaggctggtgtgcaactccttacctcaagctatctgcccgtctccacctcccaaagcagtgggattataagcatgagccaccgcgcccagccaaaaaccttactagtttctattgtagcatctgttaagcatctcatcgtgctattctctccccctaggacttatcaaactggtttcaaagca

SEQ ID NO: 10531 - DNA, 1991 bp, Homo sapiens
gctccgcgtgcgcctacgccttctgctccagttgctttcccaattgagcggaaaagccggggcatgttgccggggccctgggcgggacggttgtgccctgcagcccgaagcccgccggggcaccttcccgcccacgagctgcccagtccctctgcttgcggcccctgccaacgtcccacaggttggaaaccagaccctgcagcccccagctagcccgaaggaagcccagactgacgtcgcagggtaatggggacccagaggtagctctgtggggccccatcaggacctcagcccttagcggggctttctgtgtgacaccgtgggacctgaactggggaggtcccccttgcacagaattacaaggggcaactgtaggaaacaattaaatctattatgtgctaagtattgagagttccacggattgaggccctctctagaaggcttagaagtggggtagccggggtatgtgtctgactttgtgttttggtgcggtggtggtgagtgggtgtagaaactaatagtgccaagtgcagtgcctgtcaactagtaagttaataaaccttccgtgaatgaatgagaaggttctgtgactgagggagcagggctagagagggcatctctgctcatcccacccctgcctcccctgggctcaggcagacaaaagtaattaggttgaacctttaatcaaagctggtttcacaggcaagcagacatgatagaggaggtaaaggcagaaatcctggggacacagggtgctggcctggctcacaggcatgcctccttccgggacctcctccaccccctacagtttggcgctcagtaatctcttgttttcttgtctccctcaggacactgggtccccttggagcctccccaggcttaatgattgtccagaaggcggctataaagggagcctgggaggctgggtggaggagggagcagaaaaaacccaactcagcagatctgggaactgtgagagcggcaagcaggaactgtggtcagaggctgtgcgtcttggctggtagggcctgctcttttctaccatggcagcccagggctatggctattatcgcactgtgatcttctcagccatgtttgggggctacagcctgtattacttcaatcgcaagaccttctcctttgtcatgccatcattggtggaagagatccctttggacaaggatgatttgggtgagccctgaaacagcagggtggtggacctggggacacagaaccagccagacacactgggtgtttgtgtacaggcatgtggtgtgggtggattgtctgcacagtagaggccaggggccagtctgcatatgccagataaagaagctctgagatccatggacatgggtgcctgcggggctaaggagggctgcttatttgacgtgtgtgtgcatgccctggaggcactgtttattccgagagtgtttgaggggcttctgagcatggttttcacacctgtgtgggtgcatgtggaggcttcagggtgagtgctggctactgacactgtgagcactgggaactaaaaagttggcacaacgacttcatgtggcctggcatgctacccttcaggagggacaaggtccctgactccaatcctgagccctttgccccatgttgggtggtggagcaacagaactgctagaggcccgggactggcatccagagtgaggtgggaaatcccatatgcaaatcccagggagggggaactgccacgtcctgctccctttttgttccctgacaactgtagctgagaatcatgggtcagtctggggctagtgccgatggtgaggcaggagaagtggccgaagtagtagggccccatgagtgtcagattgcagcacaggctcctcctgttcctctgggaagtaacctgtctcaccccactgggcacccctgcacacctgaccccatgccttctttcattgctcctgtgtttctcccctggtccctaacccctaagtgtaatgttccctgcagggttc

SEQ ID NO: 10532 - DNA, 1076 bp, Homo sapiens
tggttcctctgtttcacctgcggtgattcctttgctcccccaaactcccaacagaacctgaacagaaagaacaatcgacaggacagaagcggcctttgaagaacgacgaactataacccccacctctgttttccccattcatctccacccccttcccccaccacttctatttatttaacatcgagggttgggggaggggttggtcctgccctcggctggagttcctttctcacccctgtgatttggaggtgtggagaaggggaagggagggacagctcactggttccttctgcagtacctctgtggttaaaaatggaaactgttctcctccccagccccactccctgttccctacccatataggccctaaatttgggaaaaatcactattaatttctgaatcctttgcctgtgggtaggaagagaatggctgccagtggctgatgggtcccggtgatgggaagggtatcaggttgctggggagtttccactcttctctggtgattgttccttccctcccttcctctcccaccatgcgatgagcatcctttcaggccagtgtctgcagagcctcagttaccaggtttggtttctgagtgcctatctgtgctctttcctccctctgcgggcttctcttgctctgagcctcccttccccattccccatccagctcctttccccctgggtttccttggcttcctgcagcaaattgggcagttctctgccccttgcctaaaagcctgtacctctggattggcggaagtaaatctggaaggattctcactcgtatttcccacccctagtggccagaggagggaggggcacagtgaagaagggagcccaccacctctccgaagaggaaagccacgtagagtggttggcatggggtgccagcatcgtgcaagctctgtcataatctgcatcttcccagcagcctggtaccccaggttcctgtaactccctgcctcctcctctcttctgctgttctgctcctcccagacagagcctttccctcaccccctgaccccctgggctgaccaaaatgtgctttctactgtgagtccctatcccaagatc

SEQ ID NO: 10533 - DNA, 1884 bp, Homo sapiens
gttctgataacagtaagcagcagagccagaaatagatctcaggttgactccacattcaatgctcttcctattagccacagggaggagggttcaaatagtggcccagtcacatgaagctatcttccccccgcagactcaatatcaagacaggcaaactggagatgagctattccaagttcaagaccaagagcctctctttcttgggcacctttattttaaaggtaacagggtaacaaggaggtaaggccctaggctgccatcctgaccttgaggaatggggaacctagtcctacatcagatccaaggggaacttgaaagcattaaatagatccacattcctaaagcataggtattagctgaggttctcttcacctctggtccctccaggtggcagagagcctccagctggtgacagtacaccagagtgagactgaagatggtgaattcactgaatgtaacaacatgaccctcatcaacttgctacttaaagtccttgggcccatacatgagagaaacctcacattgctcctgctgctgctgcaggtgaggatgggaatcgagtttatacctccgtgtctccctttctgcgtgattcttactccagtccatttctccttgcagatcctgggcagtgccatcaccttctccattcgatatcagctcgttcgactcttctatgatgtctgagtcccttgatcattgtcctttacctcacagtctctaggattcctgactcaggctgacctctctctctggtcccagactgcctccttgcccaggcctctctcactcttcatactcctccagattttgttctcagcattttcctttctctgtgatcattggcatcctgggcgtttcttgccctctgctgactactgattggattttacctatggctttctgcaacttgctactctctccctctccatcccatctttgcagcctcatagggtgggatacagcagctttttttgcagttatccacactcacatttcagagtcctgactctcaaggaaccactggtttttgggatagaacttgggccagggctaggaacacaggctccacggtgacatgtcatttgattgtaaattaagtgttctgattagtaagaactaagcagggggccacatgctctcaatggagacaataaagtgttgtctttttcttattgtttatgtaggtatatttcctatatgggcatttttgggtagattgggaggggtggtgggggtacttcctccaacaggatgcctatctctctgccccatcagaccccgtctaacaagaagtgaacagaactgagaccaaacagaacatattgaataaatatttaaatcctgatactagaggtggcatggagggccacaaaattgaagttatcctgtttcctggcatgggaacaaactttcaaagagtcaccgggtgcagtggctcatgcctgtaatcccagcactttaggaggctgaggcaggaggattgcctgagcccaggaattcaagacagcctgggcaacaaaacgagactccgtctctacaaaaataaaataattagccaagtgtggtggagcacttgtagtaccagctacgagggaggtttagcagggaggattccttgaacccaggagttcgaggctgcagtgagctgagatcacactactgcactccagcctgggtgacagagccagtgacacccggtctattaaaaaaagaaagaaagaaaaaaaagaaaacttttaaggggtctaatttcttcacttttccattctccctttgtcaggtaggagaagggagtagggagtgactggacctggaaaggagggctgcagtagctataatattgacccctttcctttaaaaatcctacgccggcacagattt

SEQ ID NO: 10534 - DNA, 1035 bp, Homo sapiens
ggagcaggcttgagtcatggacctgcccgagcctcccccagtttgtggccctgataggtgccctccttgccatctgctgcatgatcttcctgggctttgcggatgatgtactgaatctgcgctggcgccataagctgctgctacctacagctgcctcactacctctcctcatggtctatttcaccaactttggcaacacgaccattgtggtgcccaagcccttccgcccgatacttggcctgcatctggacttgggtaggtagtcctaccactgctgcccctatggcacctacttcagggaacccttcctggtgctccacattctcctccaagtgttccttttttgtctctgtgtcttcccagatcctttctggtagcccttcatcctatcgtccgtcctcaccacttttctaaaaattcttaaatcctcctcccctaggtggcactacttcttttcctaccatctctccccgcaggaatcctgtactatgtctacatggggctgctggcagtgttctgtaccaatgccatcaatatcctagcaggaattaacggcctagaggctggccagtcactagtcatttctgcttccatcattgtcttcaacctggtagagttggaaggtaggtgggattgggggtggggagagagaagtctgagtgttaaaggtgtggcctgatatatgactttgggaaattcaggggaaaaaagcaatatgcatagtaattatagaagataagggaagctacttactttgcaaataacaatgcagatttattaaaagtgagaaagaaaaatagtagccctgtcatttatagctggattggcactaatagctaggccatgatcttctcccattgaatataaacagtttcacagaaccccaacgttacacagggtcattctgtgaccgtgatggagcaagactaaaactagacccctccctctgtaatcatgtttgagcacaggcaaaaccacaagaacactgagcaacccacaaaatggccaagatcccctctctcggctaacatgagc

SEQ ID NO: 10535 - DNA, 1077 bp, Homo sapiens
tcctggctaacacggtgaaaccctgtctctactaaaaatacaaaaaaaaattagctaggcgtagtggttggcacctatagtcccagctactcggaaggctgaagcaggagaatggtatgaatccaggaggtggagcttgcagtgagccgagaccgtgccactgcactccagcctgggcaacacagcgagactccgtctcgaggaaaaaaaaagaaaagatacgtgcctgcggtgaggaagctgggcgctgttttcgagttcaggtgaattagcctcaatcccccgtgttcacttggctcccatagccctcttgatggatcacgtaaaactgaaaggcagcggggagcagacaaagatgaggtctacactgtccttcatggggattaaagctatggttatattagcaccaaacttctacaaaccaagctcagggccccaaccctagaagggcccaaatgagagaatggtacttagggatggaaaacgggcctggctagagcttcgggtgtgtgtgtctgtctgtgtgtatgcatacatatgtgtgtatatatggttttgtcaggtgtgtaaatttgcaaattgtttcctttatatatgtatgtatatatatatatgaaaatatatatatatatgaaaaataaagcttaattgtcccagaaatcatacattgctttttattcatcatgggtaccacaggaacctgggggcctgtgaaactacaaccaaaaggcacacaaaaccgtttccagttggcagcagagatcaggggttacctctgcttctgagcaaatggctcaagttctaccagagcagacagtcaccctacttttcagcagcaaaactgccctgatgacgcagcacgaagggcctggcaggctgttagcaggagctatgtccccttcctatgctttcctgccacttggaactgccctccagacagcagctcaggctcaccgccatgaggaagggggccttggcatttggtcctacggcaactcgagtattgcctcccaaccccctgaatgagcaagaactcaagtctgctacaacaaaagaaactttatttaaaaatatttt

SEQ ID NO: 10536 - DNA, 1015 bp, Homo sapiens
atgtggatatacacagatataaagtaaaaggagatagatccttcaagattatcctgagcggaaggatcatgggatgttgtcactttcttctcatgatttttcagtgttgcctagagtgtttttataacaagtaattaatatttttacaatcggaataaaaacaataatgactgctataaaagacaaggccagagcacagggaactgtgtgggtggggggaggctgtgcctgacactgaccacttgctgccatcctcctggccaggcgtccactcccaggtggtccaggtgaacgactccatgtatggcttcatcggcacagacgtggttctgcactgcagctttgccaacccgcttcccagcgtgaagatcacccaggtcacatggcagaagtccaccaatggctccaagcagaacgtggccatctacaacccatccatgggcgtgtccgtgctggctccctaccgcgagcgtgtggaattcctgcggccctccttcaccgatggcactatccgcctctcccgcctggagctggaggatgagggtgtctacatctgcgagtttgctaccttccctacgggcaatcgagaaagccagctcaatctcacggtgatgggtaagctgccctgggccccctccctgttcatccagaggcctgtgacctcggggcgtggccatcctcaggatgcctcaatgaccccagacatcccccttgggtgggcatgctgccatcattctaggcatgaggcttccagtcccttctagccaggccaccccacaattcactagggattaggggcaggggcttatctctagacagtggggaacgtgattcttcaggttgaagcccacaaggcactgtgctggcagcagcatcagacaccacggtaaggaaaggagccacctgcgctgcttgccttagacatgctgggactccaggaggcctaagctcgatgacagggatatgactagtagggcagggaggacataacgttagacatgatgaacttcctgca

SEQ ID NO: 10537 - DNA, 1029 bp, Homo sapiens
ttgtgtacacagtttgcgctgtaatgataatctgtgctggtttatgtgtttctttacaagtgtttttatgtcctctgtgtgtgtatgaggaaggtttatggtgtgtgtgcgtgtatgaggtcacgtgctgtgtgtgtgtgcgtgcgtgcgtgcgcgcgcgtgtgcacgcgcctgcttctgattagactctgatcgccatcttctcccacacacaggtagggggccctcacccccctcctggggttgggggcacagcctggctactaagggtgggtggagaaggagggggagccaatcaaagatgatgactgtccgggcaaggtctacactgccccccagccgccagttagagaaccggcgaaggtcagtcttagatcattgttttgtctacagggtcacaaacaactagtttgactatttttccccaagaaattgactgaacccagtggttattttggagtcaaatgatctcagtcttttatgacttacctgtgtcagcgggtgtatctgtgtcttctctaaacaagttcccctagctgtacaatgggatgagatgataagaggctggaaggggcgaataacatatgtggtgtgcttagcacaagcaataatttgcttgatccagggaaagccttcgcaccgctggactgttgtgagctaccactgggagggactcccagtctggagaaggagggtccgttccctggggctggggaagccaggcccaggaaccctcctggctgtgtgtgccccagaacgctgtggggagcccctctgctgggctcctgtgacttctccagggtggtcaatgcaagcagagtatgtcttagtctcaggcccctgggctactggagatccgcccccccaacccagatgatcacctgggcaggtgcctcctgtgctcccttctgaaaggaaagcaagggtttcactcaaggtgcagaattctggctgccccaagcgcccagtgccagtccctgtaggaatcccactgccctggatgtgttgtgggagaggcagacaggttca

SEQ ID NO: 10538 - DNA, 5230 bp, Homo sapiens
cggggccgtccggagagcgggggcgagcttgaaagttccagaacgctgcggtgagtgcgttatcgtgaggcggagcgcggtggggtgggtgcggaagggggcgaggcccgaggagtggagccgggcttgtgattgggtcttgtaagggcagccgggcgtctattggccggggaagccgtaatggcaggcagcaggggcgggccccttctggaaggttctaagatagggtataagaggcagggtggcgggcggaaaccggtctcattgaactcgcctgcagctcttgggttttttgtggcttccttcgttattggagccaggcctacaccccaggtaaaacctctgctcaagagttgggttgtgggtctgggagcgtgcagcctccacacaggcctgttgggcttgctgaggcttgggggttctgagaatctcgtcgaggcgagtgtgcggctccttctaccggcttaaagggcctcagttttcggtgggatggcagcggtatttggttgcagccggcaggacggaaatgtagggagtgggccgcagtggccccaggggaggctgggagacgcccggcggccgcgtggcgggggagggttgctgcatcggtttgcctggcgcgcggggaagtggagccagcgttttctttcacccagttccctgcttagtccagtcccaccgtggttcttcagagctgttcttggcgtgcttccagtatgggggtacattccggagtagttaaaagcccgttgactcccgggggcactggcacctggcgagggaggggaacagacagtgctcagttcggggtaagaccacgtgttgagcaacgccccacgccgtctgggtagatgggtccttcatctagggcgtgctctgctgcggttggcacggcaacctggactgcagcactagttctggacctcgcgcgtgcttagacaggaggtgatgggcactattacctcttggcagtggccatacgtttttcctggttaagtgttctgttaagggatgagggaaatattttgattaattgaatttttaaaccagatttttctttttttcagcaaccatgtccaagggacctgcagttggtattgatcttggcaccacctactcttgtgtgggtgttttccagcacggaaaagtcgagataattgccaatgatcagggaaaccgaaccactccaagctatgtcgcctttacggacactgaacggttgatcggtgatgccgcaaagaatcaagttgcaatgaaccccaccaacacagtttttggtgagttcctaattttaaatgacagaacaaatataacagggctaggaagcacaaaagtttatgaaacgtgaggagggaactttttgattttagaaaaactgagctgagagacttgttatcaagtctgttataaaacaggttgtagaaacctttcaggctgaaatctggataacgtaggaggttgaagtttgaacctttgctacctatatggtagttgaattcacctacctatgaactgttaggtatttgagtaatcatggacttgagttttatcagaagagctatgaaattgaaagtgttttcatttgacaccttttacagatgccaaacgtctgattggacgcagatttgatgatgctgttgtccagtctgatatgaaacattggccctttatggtggtgaatgatgctggcaggcccaaggtccaagtagaatacaagggagagaccaaaagcttctatccagaggaggtgtcttctatggttctgacaaagatgaaggaaattgcagaagcctaccttgggaaggtgaggttggtttttcagtatggggtgcattccggagtagttaaaagcccgatgactcccgggggcactggcacctggcgagggaggggaacagatggggctcagctcagggttaagaccacgtgcccaacagtgccctaggctctctaggtagatgggtctgtcaacaccagaaaccagtgaatcttgacaattacacagtaatttacattttggtggggggggtgctccagctgttctttcaccagcattaatccatttgctggagtttgcatatatgtaagtataatagttaccaatctgtggtcttttccttattcctagactgttaccaatgctgtggtcacagtgccagcttactttaatgactctcagcgtcaggctaccaaagatgctggaactattgctggtctcaatgtacttagaattattaatgagccaactgctgctgctattgcttacggcttagacaaaaaggtatgtaccatttgtgatgcaagttcggattattttaagattaatttgatccatcgtaaatttaaatgagattgtttttaacggcaggttggagcagaaagaaacgtgctcatctttgacctgggaggtggcacttttgatgtgtcaatcctcactattgaggatggaatctttgaggtcaagtctacagctggagacacccacttgggtggagaagattttgacaaccgaatggtcaaccattttattgctgagtttaagcgcaagcataagaaggacatcagtgagaacaagagagctgtaagacgcctccgtactgcttgtgaacgtgctaagcgtaccctctcttccagcacccaggccagtattgagatcgattctctctatgaaggaatcgacttctatacctccattacccgtgcccgatttgaagaactgaatgctgacctgttccgtggcaccctggacccagtagagaaagcccttcgagatgccaaactagacaagtcacagattcatgatattgtcctggttggtggttctactcgtatccccaagattcagaagcttctccaagacttcttcaatggaaaagaactgaataagagcatcaaccctgatgaagctgttgcttatggtgcaggtaacaatggtatctcaattaaccctaaaggcaggcaggcccaaggtgactcgctgtgatgagtgattgttaaacattcgtagtttccaccaaaagcttggctaatgatggcaacaccttccttggatgtctgagcgagtgatagttaaaacaggagctatgtactgggttttcttttaacttcttttaacgttaactttttgtttgctagctgtccaggcagccatcttgtctggagacaagtctgagaatgttcaagatttgctgctcttggatgtcactcctctttcccttggtattgaaactgctggtggagtcatgactgtcctcatcaagcgtaataccaccattcctaccaagcagacacagaccttcactacctattctgacaaccagcctggtgtgcttattcaggtatgtttctgtacttctcttgtttggcttactgataacagataaagggaagtcttgactgactcgctatgatgatggattccaaaaccattcgtagtttccaccagaaagtcttatgttggccagttccttccttggatgtttgagcgaccattcttccttagcaggaccctagcactgtcacagacctggagtccattgtagtaatttgttttatttcctaccaaggtttatgaaggcgagcgtgccatgacaaaggataacaacctgcttggcaagtttgaactcacaggcatacctcctgcaccccgaggtgttcctcagattgaagtcacttttgacattgatgccaatggtatactcaatgtctctgctgtggacaagagtacgggaaaagagaacaagattactatcactaatgacaagggtaaggaggcactgtcatctggtcttgacagggataatggtatttcaattgagttactggtgcctaagggcgtctagctaagagaaactagagttacacatacacaggtaatttaaggcttttacttagagttaatttctttcctaggccgtttgagcaaggaagacattgaacgtatggtccaggaagctgagaagtacaaagctgaagatgagaagcagagggacaaggtgtcatccaagaattcacttgagtcctatgccttcaacatgaaagcaactgttgaagatgagaaacttcaaggcaagattaacgatgaggacaaacagaagattctggacaagtgtaatgaaattatcaactggcttgataagaatcaggtttgtgttttttttttttttttttcctcccccactcaatggaggggaaggggatggtaaaccaagcttgagctggatttcagtgtagggtcacaatgatgaatggtccaaaacattcgcggtttccaccagaattcaaggtgttggcaactaccttccttggatgtctgagtgacccaagatgttaaggaagaataaggccctattttaatgttggtagtggccctcttgtaagagtttgcgccagacttttagtatcagattgcgtcagggagaaagaagggttattaacattaaaagaacttgcagtaattcctttttctcttcctcagactgctgagaaggaagaatttgaacatcaacagaaagagctggagaaagtttgcaaccccatcatcaccaagctgtaccagagtgcaggaggcatgccaggaggaatgcctgggggatttcctggtggtggagctcctccctctggtggtgcttcctcagggcccaccattgaagaggttgattaagccaaccaagtgtagatgtagcattgttccacacatttaaaacatttgaaggacctaaattcgtagcaaattctgtggcagttttaaaaagttaagctgctatagtaagttactgggcattctcaatacttgaatatggaacatatgcacaggggaaggaaataacattgcactttataaacactgtattgtaagtggaaaatgcaatgtcttaaataaaactatttaaaattggcaccatacaattgctttgagtctttaaataatctcccaggccagctggtgggagaagtaggcttaggtgattatgtgactcttactttctccttcctcttaagcttgagttaacaagggctgggtggcaagttgcccttcagagcattgtggatggtacattttggaattcagagctttgagaaggggagcataagaaattggatctggatcaaactaaccttagtccttaggctggagaggcagaaagctgacttaatggtgttttctaaacttattctgtgtgtaagcctgcctaggagcagaggctttcctggagggttgtgctagatg

SEQ ID NO: 10539 - DNA, 1042 bp, Homo sapiens
aggtttctaactttatggattacttttcctgtctcaaaactttaaataaacagaatcattccattttgtctggtttctttaattccccattatatttttgagactcatcattgttgttgcttatagctagagtatgtcatttttcattgttttatagtatttcattatataactatacaattattcattttatttcagatgcaaaattgcattccattttatccagtaatatttctgtgaatttatcttttagagacatgccccaagtgtccaaatacatatggaaaataatgatttttttttctttttttttgagacagagtttcactcttgttgcacaggctggagtgcaatggtgcgatctcggctcactgcaacctccgcctcccaggttcaagcacttctcctgcctcagcttcctgaggagctaggattacaggcctgcacaccacacccagctgatttttgcatttttagtagagacggggtcttaccatgttggccaggctggtctcgaactcctggcatcaagtgatccacctgcctcaccttcccgaagtgctgagattacaggcgtgagccacagcactgagatatattattttccattgtgaaaaattgaaagtgacctaaatttccattaacagacaatccatctagattatgtgtcctggagctggggcagtggggaaaacagcatcctctatttgaaattactcaggtaaaataactccattcctttgagaccttaaataaaaatatccaaagtccaatttctttaaaaaatgaaattttggctgggcatgtggctcacacctgtaaccccaacactttgatggaggtgggcggatcacttgaggtcaggagtttgagaccagcctgaccaacatgagaaatcccatctctactaaaaatacaaaattagccaggagtggtggcgcatgcctgtaatcccagctactcaggaagttgaggcaggagaatcacttgaacccgggaggcagaggttgcggtaagccaagatcgcaccattgcattccag

SEQ ID NO: 10540 - DNA, 1031 bp, Homo sapiens
agggtacaacaaggtttaccacaatgtgagggactcagccattgcaaattgtacagatgaggtaagttacaggtttacatttttttttcccagtaaatttggcacagatttaaaatgtgaaacagttctataccccttgtttttgctgttctctcaccagcaaaccctttagtttggccagcaatggctttctgcatgaacttcagatttacttcatttgctaggtggtggttctcaaacttactataagcacctgaagggctagttaaacgcatattgctggggcccacccctagagtttctggtaataggtctgtgctggggcttgagaatttgtacttctaacaaggctcaggtactgatgctgcagatctgggttcttcactttgagaacaactaccttttggccaaatgtgatatatgtattgcagtaggttgaggttcagaatacctttgtttgagtacttctgtgttggaaactagtaatctgatcttttatagataatcacttaggtctgaatattttgttcgcaaaattaagaaagcgtacttaaaacaactgaatgctatatgccaaatttgaggtgaaatattgataagttcttccccttgattttcttaattctcttgataggggcttcacgttttgatcaaaatattacacctgtattctgggcttttgctgtgaattcctagtattgctaaaattctgcaatttcttaactacctgttaagttcctcaaggtcagagcttctgctttttttatctttctttgcccagcaccttgaatagtgtgggacacgtaattgacgctcagtagatatttgtgtattgaactccatcccttgtcctcctcccctcttgatgtttttctctactggccttatgctacacagtaaagcagggcatgattatgccacttgattacccccaagagattggaataaatgcttatgccaaattcctacagctatccctgtgaatggtttattacccaggagccctgacactggctgatttctgaattttc

SEQ ID NO: 10541 - DNA, 1044 bp, Homo sapiens
tcagactgagagcaaaatcgctatcatatctgcctctctcccaggcagagagagctatttccttgttatgagaacaagcattttgagtaactgaaaaaacatgaagacagataaaaggaaactatcactaaggttacagttttctcccttggaaaagattctccttagggaaggtttggaagagataatagtgttcagaccagcatattggtcttgatgctgtatcttctctgtgcctctcaatcttatcctacttttgaaagtcttagaaaacaacagaagaatgacctctgcccacccttctcacctcgacccacctagcagctgcagtttgtatccatcaacctttctctggctctttttctttaaccatttctctgaacagaaaacttaggccatggatatttcaagtacatgtcagcagtgtgctggctctttggacgtcacctttatgacactctgcagtatcccatcgggctgatcgcctccagctggggcgggacacccattgaagcctggtcatctggacggtcactgaaagcctgtggggtccctaaacaagggtaagacagcattctccagtctgagaaagagcctaccagggaattatgcaagagagagggtcatcgtcctctgtggggagttaagtatatggtgaatgtcccaatatgtgttgaatgtatgtaatttattcatgtagagggaaagcattattttcactgtcactgccaccacaatcgtttgagaacatgtaaaaaaaaagtatcttttcccccagtaatagtaatagctagtggttactgaaagctttttatatgccagacactgtgctaagcactttatatatataaattatgaatatattgaatatatattattatatattaatatattgaagtgtagatattaaagaccatgggtgaagacactacatttcagagagacttagtaacttgctcatgagcatgactagtaagtggcaagtctggcttcagtgtctgtgcacctaaccattgtgctgtattgcctagaagaataaacaat

SEQ ID NO: 10542 - DNA, 1035 bp, Homo sapiens
agtagcaagatctgttagtgtcttttgataaattgtaaaatgtgtcacctgacttttcttccatatctgtaaccattagatactgctagtttccttattcacaattacataagccaagtgaagtattaagctcaatttggtggttccaaagagagtaagagtctttgctgtggtttcctaccatgtctatcgccagagattggtggctttgcttatgcttgtgtcacttcctgatatgtgtggcacctttcttgaaaggaatgttagttttattccctgacttccgaaataaccgtcagcaacagagccaactgggcccttgtgtgtgctgaatgcttttctccagggagtcagtaagtagtgagcagtggcatggtttccttctccatttatggccttggaagggtgaaagggacatggttgggactctccatttacggtccttggaggagttgaaaagagtggttggggtgttcttggaggcagaaactagacattgtgagataaaaataaattggcaagggatgtttggaattcaaattccaatccctgcaaggagggcagagggcgctgggaaagggggagtgtgtagaaagtcaaatgagctctgccgcaggcatttgtctccttccattggaaggtttgcccatgacacacatttgccaagttcatatttctggtttgttctagaaagttttgtcttatgtaattgtgactatcttttacaaagaggaagaagaaacacttttaaaaagagtgtatcgttggaaacctcagttctctaaggcatcatttgaggctccagaagagatctcaagaaagggagaatgaggcagatgcttgtgcagggggtaggccggctggctttagggtgggagactcttaattgttgctctgtttttgtgtgaggaagatcatcacacatgtcgtgcttttattattccttttacccatctagatttctggcttcaagggacaaatttttaaagtatctgatagagtgtcttgtagattgtcaactgtgatttaaagata

SEQ ID NO: 10543 - DNA, 1089 bp, Homo sapiens
gagtcttctgcccagagaacaaaatgattaattttctggggacattgcttagatttattcatcagtaattgtcatcatctttggaacaaattttgtactctaacaggaaaatcaccatatagtatatttggtctttcattttagctctgaagccttgcaattatttataagaaccaacagggcaaagataactaacttggagcaaaaagctctcattgtccctgataagcattttaatagactctgcccatctctgaggacttctctttggcgtttgcagacaagacatttcttctatcttctcattgaaagatttctaagaaatatgataagctactcaaataggtttagatttatttcctgttattttttatatatttagtctctgttgttaccatcccaatgttacctgaaatcttgtgccttccagtttgcttatctgcttatgaatttgacagatgcttgatgtgtatcctctaagaatagaccatctttgactaccaatcatacacttatatttaagatttcagttttagaaggaaaggagctaagaagcacatgttaaaactgaatgagtagaattctgggtttattttctggcattttggaaatacagtgaagggtggagttaaatattctggttacttcattaagaggacatgttaaaggaaaaaataatttagaaagcatgtagtacaaatagtactgttccataaaattttgtgatgatggaaatattctctatctacctcagttcagtatgatagccactggtcacatgtgtctgttcagcccttaaaatgtgtggcattgtgcctgagaaacagaaattttaaattatatttaattaattcagttttaagttataaataggcatatgtgagtagtggctaccatattgaacagtttcaggtaaaaagttgttattcacagtattaaattcatctttgtaaaaggattctcctggccacacactcaaacctctagggggagctcaaagttccttcttgacctttctgtcactttacccctgtgtaggaggaatcttgataaaagtaaaaaaaaaaaatggcctgccattccaggagg

SEQ ID NO: 10544 - DNA, 1089 bp, Homo sapiens
cgccttgggacgactggcctttgtgtcagtcgctttgcttctatcttgagctacgaaggacgagtaagactagagatgctttggagaattggaaaggcttgattgtagccagattgtgtattgttaccgcggagttagtgtacaccataaaagttagcttggccaagagttggtctggaatttggattgtcgatgcctccagagttagattggcttgaggccctgcggtttcttaggaagctccttcaggaaagccagtttttccctgcttcagtttctgtgccggatgtggtgacaagtagaactctcagtgtgcatctggccgtccttgtgtacctgcatgtttaaatgcagaggcttaatttgggctagaaatcttagccaggttaagattttgctactagaactgactctaggctttcatatttgtattattggcagataaggagttgtattttagttaagctcatttcctcatcgtagtggctgctaaaaagattgtgataggattctcccagtttttactgaactacttatcctattatctgtgcacttcttttctgatacagctggcactttttctgggaacttcttgaggggggataaaaaccaccaagaacaattataaaataagaatgatcacactaaagagcaataataaagtctaataggcgcaatcatgagttagagtaagctaaaggagggaaattgcaccaaagttctccaggtcttggctccagtagtatttctttggggatgttgttgcttagaaaactgggtccacaaactaagatatttaaaacctactattgttcaaggaatttgccacccattaattactccattacaaatttaaattagtgtatttgataacatttatctttgggacttcttaagctttctctttttttaacaaagacattaaagtagtagctaataggacaaagctactcttctctgaatctcatttgttctattcaacgtcattaaggttaaattttaatttttatttatttatatttagagagaggatctccctctcttgcccaacctgaagaactcctgggctcaaacaatcctccccagtag

SEQ ID NO: 10545 - DNA, 1031 bp, Homo sapiens
acagaaactttagtatcaactctatttcatggttgttgcagttgaagtgtttctggtttattttttgctcaatgtgtaaagaaacctgctgtgattattttacagatgagaaacaggcagagaggacaagggatttaaaaagtttcacagttaattagaagtggggctccaacttgacatcaggattcctgacatctcatttctcaaatagttgaaagatcacttttgactttcaagtaactccttatttttacattggttaatactgtttcttagctgtttgtacctgacattttcttaacacatatccaaaaaggtaaaagtttcattaaaggattctaatgatcattttagtatgaataacaaacattcaatcataattcctttgcttaaacctttaagtatctggctgttacatagaaatgaatttccagatgtgagaatcagaactgtatggaaacgaatctagaaaagtgttgattatcctcatagaagcataagaactcaggattggaagagattttatagttcataaagttcaacctttaatctctagttccatcccaatacttggaaataagtctagggttccacatgtcaaaataacaatttttgttacatttagcaaacatgtgctaggcatttttctaagtgtgttgtaagtattatgtcttcttcatatcggccctatgaagtaggtactcttaatatccccacttcacagatggggaacaggcacgggctggtaggcgtaaacaggagtcaggatccaaagtcaggcagtttggctctagagtctaagagcctgactactgtctgttatagagcgttgctccataggataaactcgaaggaaaaggagggacaagggcaggcaatgcaaatccacttgacagaaataccaaggaaaagtagctgagtctggtggaaaaaccagaatcttaggaattgagcaggagtctggggaaaagcgtgaacaggcacgcaggcctcagagatagcttcacccattagcccagggtttctggcag

SEQ ID NO: 10546 - DNA, 1049 bp, Homo sapiens
tttaaatggatttttatcatctctctcagaatccttctctggagttctttaccatggctttaccatgcatggctggtctcagacccatgggatcttgacaatgacattgaccttttctgtcccattactccttctcacagctttcctctcaaccttcattttgatgttttaagtgatagtcatgaaaatagctaacattctttaagggatttccgtgtgccaggtcctgtgccaaacactttgtttgcactgtctcatttaaacctcaggacagccctaagtagtatgacataggtaccattattatccccattttataggtaagaacactgagtctgtcagaggttaaggtaacttgcccaaggtcacatagcaagaggcagaacagggattcaagctgaggtccgtcttcaaaatcttcagtgttgagaacttaacagaatattcagggcagtcccagagagctcatgggttagcattttgacactagacaacaacagtacacaagattatatgtgtaacttttgaactaaaattgacactgtaggattaactatggcaagaggaaggaaattaaactccaagggaaatagtactttaccacacacacttaaggaattatttccatggacacaagtttgttgtcagtatttggaaaacactctggaggtgtgggtaccacatgtgtgagccaggggcaaattcacacctcacttatctttttttttttttttttttttgagacagtctcgctctgtcggccaggctggagtgcagtggcatgatctcggcacactgcaacctccgtctcccggactcaagcaattctcctgcctcagcctcccgagtagctgagattataggcatgtgccaccacacccagctaatttttgtatttttggtagagatagggtttcaccatgttggccaggctggtctcaaactgctgacctcaggtgatccactcgcctcagcctcccaaagtgctgggattacagacgtgagccaccgcacccagctgctttccttgtcttttaagggggagagtg

SEQ ID NO: 10547 - DNA, 1002 bp, Homo sapiens
ggagagatggtgtgattgacagtggagtggcgggggggcggggagtgcagctcggaccgctgctacccaaccgaactgaggtcggtccaaaggctgacaggcaccgaccaatcggagggcgtaacgaagggtgacgagccaacccaccgcgctcggcgttgccgggagccgcgctaggcgtaagctaatgaggaagaagttggccgttgaaagagcaacgctgattagtgaatcttaaatcacctaaatgaaagcccacttgtgattcgccctaagtaaaccagagccccgtgggctggaacgcgccggaatctgaggtgtgagtagagcctgggggagagtggatccaggtgaagggggcagaggtgaggaaagcggggcggctgcggggaagggagaaaagtggagggtcgggctgaggtggttggaagaaggcgtgggcggacggcggtgcacggacctcgcagaccacccttaccgctgatctggacccaaggcccggctaataaatacttaattggaggcagagaaggaaggactgttttgtttcatgctcttaagaaaaggaagtgtcagtgcctgattcagatctcttatgaccgagaccttaatccctctctagctcctgggaggtggccaggtgcacattctgaagacgagacatggggggcattgttttcctgtcgccagtttgaatctgcaacagggttggggagaagcttagagttcaagtggggtgttcccaggctgcagtgctgtgagatccagagagcggatagaccgaggctctgcagcgcttccaacccacaacaccgtccaggagagggatgcaaggaagagacctaggtttactgatcctcctttttctatcaacgtgttaagagcagatgctacatcggtggcattttgggagcttggcaactgattttttccccaggcttgcattttatctaattacaaaggtagaggcgttattctaatattttaaaattcaaaagatag

SEQ ID NO: 10548 - DNA, 1045 bp, Homo sapiens
tcctttaggactatgtaaaaggcaggtttttgttccttctttttttttttttttttttgagacggagtctcgctgtcgcccaggctggagtgcagtggcgcaatctcggctcactgcaggccccgccccctggggttcacgccattctcctgcctcagcctcccgagtagctgggactacaggcgcccgccacctcgcccggctaattttttgtatttttagtagagacggggtttcgccgtgttagccaggatggtctcgatctcctgacctcgtgatccgcccgcctcagcctcccaaagtgctgggattacaggcgtgagccaccgcgcccggcttgttccttcttttgagctctcatcatagcccaggttcaagatcatcttaggcaagtatttcatgaaataatgttcaagttcatgaatttccaaaattctttaattggtaagtgtaatgcccagcaacttaaaaaacacacactgaagcacagcaactcatattgataggtaaaaaaagttacaggacacaaagggcccttactaatttgacaaaatagaaagaccaggtctgttgttctttctctgatatgatttatcttgcaattgctggatttgagtggcaatttggaagtatcatctgataccaatgtgatatatagctaggaaagaccaatgataggtgaagtccttaccataaaatgtttcgaagagcttctcaagacagttgtttctatttaaaagggaagatataaagagctaggttatctcaaacaatcctgtgaaagaagtttaaaaagatttaagaaggagaaagagggaagggaagcttcctgggtatgacaccatttgcaaggtcacaacgaacaccccaacggagtgcagaccttttcttctctgttggtactagataattgtttgggacatatatatgctgaggtttggattggggttctgctcgacaaagcatctgctctcggacaccccagcgtaattcctttctatgatcttcaccaggtaaacgtattgagtcccagtcccgtttgtac

SEQ ID NO: 10549 - DNA, 1011 bp, Homo sapiens
tgaatgtatcttaaaacgtgtgcccttttatattatttatgccttaaatgttttcttccccattccttcctccccctcggtaggaaacaaccttgttttgcatagtattcagtcacctggagggcagaggggtccttccatgttttctaacagctatagtgacagcaagagctcctcatgcaaaggatcccatctcttggctgcttcggctaggagggaatgcaggggcccgttgaaggttgccaccagctgggttttcaggtggaaaatggtctttcaatagtgtattctcagacttttttttgtttgttttttgagatggagtcttgctgtcatccaggctggagtgcaatggctcgatcttggctcactgcaacctccgcctcccaggttcaagcaattctcccgcctcagcctcctgagtagctgggactacaggcacctgccaccacgtccagctaattgtcttgtatttttattagagacaaggtttcaggctggttttgaactcctgacctcaagtgatccacccgcctccgcctcccaaagtgcgaggattacaggcgtgagccaccacgtctggcctgtattatcagacttcctgagaacactttgaaatcaactgcagttgtgacccatgtttataataacagacctggctgacggattttacaagagtgccttccacagaagtggtaatgtgacctgttgactttgtatctgcacgtgggcacgagtgatgttcagtttgctaggcactagtcatagtgttatggacgtggtggagtgtaaggtcttgatgaattacggcagtatgcagaaaaggaaccaaggccagagagacaaataatgcctcatgtcccactgctttaaaattacattaatttataaaatggccactatgggctctttttgactgtttctcggagtaggaacaaaataagacattaaatggtggcttgaagagaaagatacacattttcagaagaaagaaaggggagggctgcaggg

SEQ ID NO: 10550 - DNA, 1076 bp, Homo sapiens
gtttgctccaggagattgaagtgtaagtcagacaactttgaagcagacagataatagaaggaccttacagatcacagaatcaatattgaactaggacagaaataactatcattaaaaaagcaaaaagtctgatgttctaatgtttatcatttttaaaaaacatttttgaggtcctattgtgtgtcattttctatgtgcttggtgctagccattatgacattagttagagtttaatgtgaattaggacttttacgactttccagacaatacaaatactttagaacatttttaactccatttccccctccagtgttttgtgttgttttcttcatatgtttgtattctaaaaatatttaaaatcctctaagatattaacattactgcttttgcaatccatatttattcagaattccctgcattctttttttgttgctactcattcctttctgtatttccttttttttttttaaatctgttgctagtcattttccttcaacttgaagaacttcccttaatatttcttacagtacaagactgaaggtgacagattttcccagctttgttgtctaagaatatctttaatttgtcttcctttttgaaggttttttctttttttttttaacctctaattgacttctagattggcagttactgtctttctgtactttaaagacattattctgttactttattgcttccatcatttctgttgaaaaatcatctgtacagctattgttgttccctttcaaggtaatacatctttttcttctggctgctttttttgattttgtctttgtattttgcttctacccatttaattattggcattgatcggtgtaattttctttgtattctgcctggggtccacagagcttcttggatctgcggcttgagctttcatcaggtttagaaaactcttagcttctgtgtctccagtgcggcttctgttgcattctctcctttccccctgcagagagactccagttaaatacagagtttttcgccatacggtgcctcctctgttccttcagctgctttcatattttccatcccttgtcgtgggaactgatgtgctt

SEQ ID NO: 10551 - DNA, 1045 bp, Homo sapiens
tgagaatactgtcaactgcaaggaacacgacaatctcctctcagtaggcttcaacagtgaggaaatgtgttatccccaaaataagcagcccagaagtaggtaactaactccaacgttgttagttcaggaggctgagacaggagaatcgcttgagcctggaaggtagaggttgcagtgagccaagatcgggccactgcactccagtctgggcgagagagtgagaccttgtctcaaaagaaaaaaaaattcatttttttctgtctttcctgttcgtcatgttcccattgccaccttggctctaagactagcactgctgatagctcgccacagttctgggcatcacctttaaagtgttatcatatctgaccgtgtctattttcaggaacaaggaaaatttcccccaacgtcctctactagatcttcccaccagtctcattagccacaattcagccccacacagcccctaaaccattgaccagatttatcccagagttctgtggggttgaggtagacacccaaacaaaattggagctctcgtaacatgataaagaaggctgttgagtgagctgggcagccatcagggtctctacaggtgatcttattattcctttttaaaaatgaggacatgaaaaagtacgtttttaaaaaatgaggaaatggaggctccaaaagattgaatgataagccaaggcttagttccagcttttaaactctaaaccatgtgtgtttctgctgcaatactcacatcttaagcccatatttaaacatatatccatatacctttagacttaccttgaatttcatttgtttagcatatatttgagtgcctttttggaccagacgctgtgatgtgttcatgggatacttggagtaaagttaaataaaaatgaaatttatcatctctgtccccaggacatttaagaatctagccagacaaaacataaaacattataactgttatttataatagtataatagtatagctgtgattacaatagtatacctcattttctgacatcagtagggaatgaaaaggttctaccta

SEQ ID NO: 10552 - DNA, 1053 bp, Homo sapiens
atattggtcctgttcagccaagtagatttaacttgcatgtgtggttttgttttgctttttttctccccctttaattaattcttaaatcagttgggggtatacttgagttcctaagaaacagtggagacagtctgaagagatgtttccacaagggattaagggtgcttgaagagttaatttaatctggcaaaagtgtccctgcttatgaaagattgtcacaggtccatggaagtcaacatgaagagtgatttctactggagtgttcagtttaggagtgtttctaaatgaaatgttggctgtgtgccacggataacagaatcattctgctagagatacttgtgtggtttggagatcttgactcaaaagaaaagcaggagtgggggtggtggccaagagtttcccagagtagattttgctttttggtgatcctcagcagtttattcaggcattcggtcatatgtcagttcacgttgcatccatgacagtggaattgggagctttgctaaggccattcttgtaactggtcagttgctctgggtagtgtaccttttgctggtcccaaatgtcctgttgctttttggtgggggaacatggattgacttgctgggttaagatagggatgaaaggacttgggctttctttcctatgcatgaaattaacatgtattttatgaaagactcccactaattatttttagtgaaacaagtattattgccaacacacagatatagttttaggtcagtttatctcctctctttacctttttttcatgccgtgtaatagaaatgctgtttatctgtggtgcattagtcaaatacttactattaagtacatttttattgcacaaactactggatggtagtggatgctgctccagcctcatcctgaaaacattaactaattatattgacattatcatttaggctgtatgatgtgtaaagccttttatttttccttttaggttcaaagcagtggcacatgattggccacctgcagccagaaacctcctatgacattaaaatgcaatgcttcaatgaaggaggagaaagtgaa

SEQ ID NO: 10553 - DNA, 1027 bp, Homo sapiens
tataatcagattcctgcctcccttcccaccctaccccacaaaattgaccattttcttgaaggaaaattatctacttttatacttatttacacatttttcctgttaaggtctgaggtttcaaccttatatgttctatatttgcagtggtcagatatgtgtagtgtaccttcagaaaactctcaaaagatttctttatatatattcctttctttctgaaggacaggaaatttacgtaggaaatgtttaggagcccacagctatgaaacaactctaccatttattgacagtcttacttggtgaaagttgagaagggaactaataaggaggtagctatcttggttttaatcattactcccacatttacgtgataggatgaagttgttttgcatcgtaggtactacaatgttcttcatttttcatatgtgaattacttttttaatagacggtggattcaagccagttataattacggcaccagtaagtgcaaaggttgcagacggagactttgttactctgtcctgcaatgccagtgggctgccggttccggtcattcgttggtatgacagccatggattgataaccagccatccatctcaagtcctgagatcgaaatcccgaaaatcacagttatcaagacctgagggcttgaacctggagcctgtgtacttcgtcctgtcccaagctggtgcaagctctctccatattcaggctgtgactcaggaacatgcggggaaatacatctgcgaagctgcaaatgaacatggtaccacacaggcagaagcatctctcatggttggtgagttgccattattatttatttttagttgagtaatttccttttataatagaagataaagtgatttgaaatatgttattttaatgaatccagcaatctctctatattttttcctgatgacagtgaaatgtagaactgtatttcttggtatttcactttatgtgaatcacatgaattttggtctctgtttctgatgtgtttgttaagattgtaggtgcaatacagaaagct

SEQ ID NO: 10554 - DNA, 1035 bp, Homo sapiens
ctctgttacccaggctggagtgcagtggctctccactgcttggctcatcacagcctgaacctcctgggctcaagcgatcctcccacctcagcctcctgagtagcttgccccagctgctttctgagatgaaaagatcatgcagccctctggactggggtcagctgccacaaaaggccgtgctgcagatgttgtttctaatttgtaaatttcctttgggaaaaagaattcaaatttgcatgtatttatttatctgtttccttatatatttcagttcttggtgattttggttcatccacaaagcatgttattacagcagaagaaaaaagtgctggtttcattggctgcagggtaccggagagtaaccccaaagctgaggtgcgctataaaatccggggaaaatggctggaacattccacaggtgagaccttttgtgaaaagccggtggcacacacagaacaaatgctcattaaataagctacttctaagctctgtgtgctagggacgaactgtggatacaagaaggcatgagtggagaggactaaaacaaatggttacaatatacaaataattacggccccataccctgaggcctcactccctcagttccttcagacccccatcagatttcacttccttggaaaagatagccctcatggtcctatctaaaataatatgcctggtgctctctggcccctttatttcgttttgcttttctttatagaattgatcacacctgatactgtgttattcatatttctgttagtttattattgtttgtcttttcctctgacctccccacatacccctactggaatgccggctgcatgcatgcagggtttttgtctgctcttttccttgccgtagcacttgtgcctggccattgttggcagaaagtagccccttaatatgtatttgtggaaaaaaaatgaatgactagacagtgcaggaacaccatgtgaccagtgctgtagctagaggtttgccaaagtcaaagcatgtttcttgtgctttgagattcactaccgttaacatgct

SEQ ID NO: 10555 - DNA, 1040 bp, Homo sapiens
ggaaatggtgcacacacactgcagacagaagattagtagaatctcactaattagtggaatctcacagaagatcaggagaatgcccactgtcctccccctcagttggcatctgaacacaaagcacaatgtttgaggtcatccaaacacagcaagcaattcacttttttctacgtgacgtggtgtaaagtctaaaaactgtggtattatataaattggtgtgtgcagctttgcctgaagctataatatcactttttagagtgttttctttagtttctgattggaaaagttgtactgaataaaacgaagctgtattttaaaaaaagtgaaataactttctaagagccattattgcaaaaagttgctatctgagccattcccatgttagacgagtctgtattttaattgcttccttacttgtcacatgtcctcacctggttgtaagcctcatgtgggcagacactgtgtctcttttattcatggttgagtttccaggatagctcagtgcctggtatatagtaagcatgcaccaagtatttactgaataaaagatgaattcctctgctttgaactctttcaatactttttactctcttattgcatttaagacttttttctttattctggagataattatgttcgtgcccttcttagttgagcagtttcctttagtttggtatatctttgcacccctcataggttcttgcccaaagtagatgttctatgtattaaatggtttgattgaatgaatacttacttgaaaagcagagttatttgagaagtttgtgtaggaaatgatgttaacttcttagttaaattaaatattcagaatgaagaaaactgacaggagatttaaagttgcctgtggttaaggtcaaggtagcccaatgggttaaaaaacagtatatactatatttgacttccataattgaaattggactgcactaatcttgatagtacttaatgaagaatttttaagtagacatgttttagtttttctttgtagttctgaaaataattttttcttagctgatcaatagcat

SEQ ID NO: 10556 - DNA, 1026 bp, Homo sapiens
gactttattacaagcaggactacagtgatgtgttttcagcactgaagtgaactccagtgtaagtacagaaagtggcttctctgctttccctccgaagcacaagcatatacacgttgcagacttggtaagttttctttgaatgatcttttgataaatatgtaaaattatcttactgtttggtcttgcctgtaaaggctgatgtatcgttttaataactttcaaactgagagcaaaatcagacttcatgtgaaacaaatggttttgcagtgatgaaatgcttgttttaataggcatattttagtttactattgatagaatttgattgtttctgttacattattattattatagaattctaatttagattatgtcttttctgttgtctttttaagaattgtatcatttctagtgtttctgaggcattactttgcagacttgctagcagcgccaagtaaatgaaaatctatctgccaaaaacattctgtaaaatctttggagcaaaatttttgagaaacattagtgtgtcttccttcccaagtcccttttcccctgcctcaaataatgtttgggcacaaactttttttcagaatattagcccagtttgtttcttgtgtacttttcaaggaagaccagttctgaatggtggatggtgtagttaattggttttcatctaccaagaatgtgaattccaatgctcctggttttcagctaatgcagaatgcagtagcatatttgatggttcatttgatatattttgtttccaagtaaagtcgtgttgtaaatagtgcacagtcttttccgtcctactcccatgtagccctctaccaagttctcctcacaatacagtgtgttcagaaaataaagaagcctttttgaagatatgtttagcttttttccaccttaatcctgggcatttctcctactactatggccagattgaaaggacccttgaatgaattggagtaaacactgcagtttgtgcctgtccgcattcacagctgtttagtcgctttgctgtgcggtata

SEQ ID NO: 10557 - DNA, 1074 bp, Homo sapiens
taactaggagtggaattgctgggtcgtatggcaactctgtttctagagctgccagactgttttccaaaggggttgcaccattttacattcccagcaacaatgtatgaggggtccagtttctcaccagcacttgttattacctatctttctgattacagccatcctagtggatgtgaagtggtttctcaccgtggttttgatttgcatttcactagtggctaatgatactgagcatcttttcatgtgtttggtgactatacatcctaaagaaatatctatgcaaatcttttgcccatttttaaattcagttatttgcttttattattaatttgtaggagttctttatatatcctggattccacttttttgtttgtttgagacagagtttcgctcttgttgcctgggctagagtgcagtggcgtgatctcggctcactgcaaccaccgcctcctgggttcaagtgattctcctgcctcagcctccccagtagctgggtttacaggcatgcaccaccatgttcagccaatttttgtatttttagtagagatggggtttcgccatgcaggctggtctcaaactcctgacttcaagtgatccgcctgctttggcctcccaaagtgctgagattacaggcatgagccactgcgcccggcctggataccactgtcttattagaggtattgtctgcaaatattttttccctttgtgttgtcttttcactttcttgattatattatttgtaataggaaagttgtcgattttgatgtccaatttttccttttgtcgcttgtgcttttggtgtcatatctaagaaaccatcacctaatacaaagtcttggagatttccttctgttttttttgtctaagagttttctagatttaggtctataatcttaaatcatttctgtgtgtggtataacgatggtgtccaattttgactgggtagccagccgtcctagcaccatttgttgaagtctgttctttcccaagtgtaatttttttgtaagttgtgatttttgatggttacactgggtcaaatatagacaatttcatagggtaaaatgtagttttatt

SEQ ID NO: 10558 - DNA, 1661 bp, Homo sapiens
ttccatcattgacctgaaagaggcataaatttacagacagattaaacagtcttctacctgtctgtgaggtcatgaggtcatgggagggagaacaccaacagaagtgatttggaatgagttattgagttgtggttgtggtacctatgacttctttctttctttttttagacggagtcttgctgtgtctcccaggctggagtgcagtggcataatcttggcccactgcaacctccacctcctggattcaagcgattctcatgcctcagcctcccaagtagctggaattacaggcacgcgccaccacgcctggctgattttttttttgtatttttagtagagatggggtttcaccatgttggccaggctggtcttgaactcctgacctgaagtgatccacccgccttggcctcccaaagtattgggattacatgtgtgagccaccacgcctgtcccctgtgacttcttcgggtacagttccctcctgttttacctatgtggcaaatgagccaggaacggttctctgaatgttttattaggttcattcatccaattattcatttgttcatttaccatgcagtcagaatctacaatcttttattatttgaaaaaaaatacaaaactatattaccataattttattttaactgtacatatccatttttaaagactggaaagaccatgttattaatgtaatttttttctttttttaccccaaatattctacaattagcatgtatgactttagtagtaaaaaagataagcttgtgaaatctatcagctctcaggctaagcattacaccaagagaatcttgcacgatccttcaatcataagaaatcacatgttagtgcagaaggtccagcgtgaaatcctctaagtggccaaatctaggagttcttctctggcttggttggctaaagcagtgatctgtgtcacccccagggccatcactgtgcatgtccccatgccctcagcaggagtcgtggacatccccattgtggagaaggaggcgcaaggccagcagcaacaccacaaggtgagcgagcagcctccctgaggcatgggttgctgctcttccttgggaatcatatcttgatttctttggcttcagatgacattgtccccgagctaccgcatggacgatgggaaaatggtgaaagtgcggcgcagccggaatgcgcaagttgctgtaactcagtaccaggtgctcagcagcactctctcctccgccctcgtggagctccagcccatcactggtgagagtgtcacttttccgcagtgggatcacaaaaccctgtgccaccaggttttgtccagggcctcgttctgagcagctagtagtgtggctgacttgtgtgagaatgtgcttctggtgctgatctgaggccggggactcccagagagatggttgtggctagcagaagaatacaaacaggttgaatgcctctatttaaaactgtgtagagtggttcctcaaaacgattaaacagaattattgtaagatccagcagttccacttctgggtatataccccaaaaatcaaatatttgcacacatattcatagcagcgttattcacagcaacaaaatgtgaagataatcccagtgaccattgggggatgaatggagaaacaaaatgtagcatacacataaaatagaatgtt

SEQ ID NO: 10559 - DNA, 1091 bp, Homo sapiens
tagtgcactaaggaaccttactgcttctttgttatgtaatgcaacagtctaaagacatatttattttttgctaagatttagtgcaacagaaacagttatgcagacggattttgctgttttaaactttagcatctttcctcagcatatagatcaaaagaaatatgtagaacttggatatgtatgtcttgttaatgaaaacaacatgtgcaacagaaaagccttctcaaagtctcaagtgtgggcaaacaacagcaggagagtctagaacactgcaggacaccagaaaaactcatttccaacaaagaatagtaaatagttttcacaaatgagacttgttcatgtggtgatggcttttaaaagtctggttccatcaaagcatagccatggaagaagctgtgtaatttttcattacaggagaattctacttgaagccatctgattcagttaagaaatctggggatgatttgatttaggaaaactgctttatgtttattaaattacctgtatgttatttattttagaaacagcgtcttgctttattgctcagactgtagggcagtgatgcaatcatagctcactgcagactccaactcctgggctcaagtgatcctcctgcctcaacctcccaagcagctggactacaggtgtgtgccaccacacctggctaattttttgcagagacaggttctcactatgttgctcacactcatcttgaactcctggcctcaagtgatcctcccacctgggcctcccacagtgttgggattacaggacaaattacctgtacttttgccctcctaagatgcattcaggttgacaatgaaaatacttacataagttttcaggaaatattctgtgcacaacagccaagtttttttggaattagatggatgagtcacactagccatactctggagcctggcaatgtgaggttttgaaaaagcattcttcagtttagctgataccaaaaatgtttgtgttttgtgcggttactgggaatttgcctgcagccactaatcagctgaatctttaatcaccattttgctctttattgttagaatgtggaggtaaaatatcaagtgtatgatacc

SEQ ID NO: 10560 - DNA, 1085 bp, Homo sapiens
ttttgttgtttcgagcctaggtgaaataacagatgggaaaacacctttacaaaactaaatggtgtatagctgctagtaatctgattgtttacatgactacttcccttttggctcccatgtgtcttgctctctctctcatctttttcccccaacttggttatcttatttctggtggaatgccagagagaagtgccccaacatcctcttgtcctggggacagatttgagtttgggggaaatgtttggctctttcccaaaggttatccaaacccagggcccaaacctgggttttctggggatagtctgaacactgagacatactctttctccaggaacggggaggtaacaactccttcacccatgaggcactcacactcaagtataaactggacaaccagtttgagctggtgtttgtggtaagtggggtgttgtagagggacgattgcattgttaacatagccctgatttttaagagaactctgattaattgcagccagtgtatatgatgacgtaactgaaaaaactagaaaggtagatgggggaaaacagcagctactgggcccaggcagggagcttggctgcctctcaggacagggaaaccggccaggtagctgaacctatctctgaaagccagggttgagttggcgtccctccattctaggctagtatgtaagcagatctgttggctgtttcttcccctaaacaggttggttttcagaagatcctgacactgacatatgtagacaaattgatagatgacgtgcatcggctgtttcgggacaagtaccgcacagagatccaacagcaaagtgctttaagtttattaaatggcacttttgatttccaaaatgacttcctgcggctccttcggtgagagacctgccttctctaaaatcaatttatttccatgatttgatgacctctctgaaggtggttcaaaggtggtaaattgatgtgttcaaagacattcctaatttgctacccagttctcattgtcctcttgggtgtgagagtcctttctctggaccgttatttttccttctgcatggggtagaaagataaaccattctcctttttgtttagtga

SEQ ID NO: 10561 - DNA, 1051 bp, Homo sapiens
gcatcatttgatttgtaaatattctaaaggttaaaaattaacataatatgttaatctacttaatatatgtagattttaaagtttcagtttctcattttatgaaatgacttgcccttttggcaacgcatgctaattgggggaaattgcttttccattgcttggttaagaagaaatccagttgtccagcagtatatgccaccagaagtgcggtggtataagccctcatgagaaacatggaaacgttttaaagagaaaaataacagcacctttgacaggataattgagcaagatggcaggtaaattccagtaaccatacacactgcctacttcctggaatccaagacgccatgcaccttccctgttccttttcagttcttttgtagctggagctgtggaactgtcacatattcaaacacgtgttaatctttccaagacctggtaactgtcatcatatcttgagatgtggttgacaagtaggtaaggtaatgaacccaaatctccaactggaagctctactcactagctctgcctattctctgatttgctgtgtggtctaatacgcagtcgctttctttgtgctttgaaaaaattcataaagtagaatcataccaaaaatacccactttgtaagaactatgacttgatagaaaattagtaaagggaacgggctcagtggctcatgcctgtaatcccagcactttgggaggccgaggtgggcagatcatgtgagctcaggagttccagaccagcctgtcaaaaccccttctctactaaaaatacaaaatttagccgggtgtgctggtgctcccctgtaatcccagcactttgggaggccgaggtgggcagatcatgtgagctcaggagttcaagaccagcctggccgacaggtcgaaaccctgtctctactaaaaatacaaaaattagccaggcatggtgtcgcacacctgtaatcctagctacttgggtggctgaggctggataatcccttgaacctgggaggcagaggttgcagtgagccgagattgcaccactgtgctccagcctgggtgaca

SEQ ID NO: 10562 - DNA, 1088 bp, Homo sapiens
acagaactttctatagagctaagaaccctgaaggtccactagctcaatgaaggggccaacaattttttttttttttttttttttttggatacggagtctcactctgtcgcccaggctggagtacagtggcgcgatctcagctcactgcaacctccgctgcctggattcaagcgattctcatgcatcagcctcctgagtagctgggattacaggcacccaccaccacgcatagctaatttttttgtatttttagtagagacggagtttcgccacgttggtcaggctggtctcgaactcctgaccttgggtgatctgctcgccttggcctcccaaagtgctaggattataggcgtgagccaccatgcctggccaggccaactatttataaaaaagaaaaatgctgccctactaaaggagagaaggtgattaggaaacttgcctgcttcaaccgttgttccagagggaagaaggaaaaaacctcctaagaatttataaccacagatgattcttcatgcagacagacttcacattcatgattgtgtacatgatccaggacactcaaactgaaaaatctacttaaactggtcttgtagtctttattgactgtttgtaccaaattgactccaggagaaatggaaaatctaattagatctataactcttcaagacattgaaattacagctttaaattttacaataaagaatattctggccaggcatggtggctcacgcgtgtaatcccactgcactccggcctgggcaatagggcaagactccgtctcaaaaaaaccagaatattctaggctcaaatggtattacagatgagtctaccaaacattcaaggagcaattaattccaatcttaaattcttcaaataataattaaaaaaaggctgggtgcagtggctcatgcctgtaattccagcactttgggagcccgaggtgggtggatcatgaggtcaggagatcgagaccctcctggctaacacggtgaaaccctatcgctactaaaaatacaaaaaattatctgggtgtggtgacacgcacctgtagtcccagctacttgggaggctgaggcaggagaatcgct

SEQ ID NO: 10563 - DNA, 1218 bp, Homo sapiens
agccaggcgtggtggcgggcgcctgtagtcccagctacttgggaggctgaggcaggagaatggcgtgaacccgggaggcggagcttgcagttagctgagatcgcgccactgcactccagcctgggtgacagagcgagactccatctcaaaaaaaaaaaaaaaaaaaaaggactactttgtgtgtgtgtgtgtgtgtgtgtgtgatgcagaaagcattattaggagagacttaggatctgtcccccaggctggagtgcaatggcgcgatctcggctcactgcaacctctgcctccaggttcaagcgattctcctgcctcaacttcctgagtagctggtattacaggcggctgctaccactcccggctaattttttgtatttttagtagagtcagggtttcaccatgttggccaggctggtctcgaactcctgacctcgtgatccgcccgcctgggcctcccaaagagctggcattacaggcgtgagccaccgcaccctgccaaagtagctatgttttaacaaaaagagcccataattgagagccatgaagtcgggccccaacactgactagctgtgcaactttggaaaagtctcttaacctttccaggtctccattttccatgtgccagcggctattagttctaagcaagacaacgaggcctcttctttcataaaatgtatattcaaatggggtacatgaggtaaacaagataatgattaagaactgttttttgttttttgttttttgtttttttttgagacggagtctccctctgtcgcccaggctggagtgcagtggtgcgatctcggctcactgcaagctccacctcccaggttcacgccattctcctgcctcagcctcccaagtagctgggactacaggggcctaccaccacgcctggctaattttttgtatttttagtagagacggggtttcaccgtgttagccaggatggtctcaatttcctgacctcgtgatctgcccgcctcagcctcccaaagtgctgggattacaggcgtgagccaccgtgcccggccaagtactgttaataggacaaaactggacagtgtgaaagagcctggggataggagccccccccccccgcccttttttttctttctttgagacagagtctcactctgtcacccaggctggagtacagtggtgcaatcttggctcactgcaaccttcacctcccaggttcaagcgactcttctg

SEQ ID NO: 10564 - DNA, 1073 bp, Homo sapiens
tttaaggctgttggacttcagatcataatggtgtagagatagaaaatcgtataatttaccacccaaactgggatacctttgagagtgtaaaggggcactattaataattgcatcagaatgacagacattaactggggctctccccacagatgagggccacccgagttagacactaaatttggtcaatcgtactttctagaatatcttctctcaattgccaatttcagggtttagaccatctaagtaagctaataaggcacgattaagagtttgaagccctttaagtttagtatggttttcccccaaacatggattatattttaaatttgtttctcagtgtctgagaaacccaaatcaacctcagacaagttcacttcaagcatttgaaacctcttggtagctttgggtagctgtgataagccatttatttttgctttgcaaggttctgtggagaaactgtaaactctgcatgtagtgtgcacgcgcgcgtgtgtgtgtgtgtgtgtgtgacagagagataaaatgaactttgaagtagagggacgtgtcttcattacacaagtgaagacaattgcaatttttgttttgttttgtttaaatgtttatcgaagataagaaattttactttgggctgaaaaggggcaaaaaaaatgttgtgttttctttttgtaccattaaagtgggcaaaaacaaaagcaaaaataaaaaacaagccctcaattctttagaaggggaggaaaggaatggtggattcaattgcaaaattctttttgaattaaaaaaagacaagaataagaatgaggacaggaagagtaagaaagtatgaaagaatgaatgaaaggaaattgtaaaactaaagatgaacgaatttaagtgatattacatagattcttggaaaagctttcatctgggccaagcattacacctggttaggaattccaggctcaggtggccccatgggcagttttgggtctgttgtttctactccttgcctgtggtcatttctgaatactttaaatccctcatgggtagatgggtggtcaggacaactcagatgaagtcttccctgggtt

SEQ ID NO: 10565 - DNA, 1089 bp, Homo sapiens
attttattccaaatgctttacatgtataaactcatttaatcatttcagaaaaggtaccaggtagatactgttctccccattttatagatgagaaaactgaggtgcaggagggtgagtcaactgccccaaatctagtaagtggttgatctggagttgaacccaggctgagtggcccttgactcacactcagtgtctgagcaactccacaaaaatggaatgcttaaatgattcaagaaagaggagatagacaaatatcatggggtaagaaatgaaacagaaaaatccattgagaataagagaaaaacaaagtgaaagaaataggaaaggccaggcacggcggctcacgcctgtaatcccagaactgtgggaggccaaggcaggcggattacctggggtcaggagttcgagaacagcgtagcgaacatggtgaaactccatctctactaaaaatacaaaaaaaatgagctgggcgtggtggtgagttcctgtagtcccagctattcgggaggctaaggtatgagaatcgcagacagcagaggttggcagtgagccgagattgcgccactgaactccagcctgggtgacagagtgagactctgtctaaaaaaaagaaagaaagaaagaaatagaaaaatcagagtaaggagttgagaatgaaagaaggatttaaaaaagcaaaggacaaaaaggaaagacaaagtgaagtgtaagtggatgtgggcattagaacgaaagctgaggaggaggaaacaaagaacagatgagagacccagctgaagggaactgcatcttggcgcttgccatggggcactgctcatgcgctaacttatttgactttcccatggcatttcaaggtaggtgttattagacacattttacagaaagagaactgaaggtctgaaagactaatgtccaaggcgacacaattagttcatggcagagcaaaaagaactgctgacaattacaaaatgccaaagaaagaaactgaagaatagcaaataaatggagaaacatactgtattcatggattggaagactcaatatagtaaaaacgttgattctctctgaattcatatacagattcaatgc

SEQ ID NO: 10566 - DNA, 1029 bp, Homo sapiens
cctcaatattcagctgttgaatattggttttcctattgagagtcaagttgcaaatcattcttcattttgaggtgttagggccctatttttttttcttgccagcaataggaaaagttgcctgtttattccagatggccctagtaagccaaccgtcttttctgtgcctgcataccacactccagacctcagcaaagatacagcatctgctttggtaagcgtcctcagacctgaataagtgttcccatggaaactgctcagatgggatgaaagaaaagatacagccgcagctccactgggtcttctcagttttcaggactctgctttccatgccaactatttcatcaccaaacttatgttatactgacaaaaatatggtacctacctcttaaaatgtgtatcactgaggaatcagtaacacatacattcttggtggttgagattttagtcatttgtggttgtacaggaagaggcacattttaaagtaacactgactccccatccagtaaaaccttgggcatctggaaacaccagaaataagacattttagttggtcatgtttttcatacagttgacagtgtacctctgaaaaagtataaggtgtaattttattttagacccttgaatcaaaatacttccagaatgtatttccaaccacaaattttgtggccagtgtagtttcatcacttgtatcaatagattactgcaccatgcataacttagggatatcctcgggggcacactgagataaaagatctgcgtttataccaagtggtttaacaccagttctttttatatttttatacccctttttttcagtttcgtatgtctttgctgctgtcactttgtgttactgtctaagaactacctataaaccctcctcttcctttttctctttgtaattctaatctggggagcaaaagtagttctgaactggagtcctgaaaggttatcctgaatcgtgtggactttgtattgtctattttttgttactctgaggctcttgttttctcctagcaaagggcttggata

SEQ ID NO: 10567 - DNA, 1316 bp, Homo sapiens
tatagggaaaattgtttggaaaaataaggatatactgtcactatatgggttgattttgctctctgaactatgttgtttataaagttgtttagaaataagctgtgttggaagagtttgttcagaaagtcaggaatggacagtgacttgtttgacattggtttcacattaaggttagaagagattaatagtgtggtctcccagccaacagcatcagcatcacctggtgataattgctagaagtgcacattgtgcagtcgtccagtcacaccccagacccgctgaatcagaaaccctgggcgtgggacccagcaactggtcattcatctaactttccaggtgattctgatgtctgctaggacttgagaaccactgcagcagttcactctttcaatgtcccttccagctctgaaattctattactctaaagaaatgataataacatggtttctgtatcttctttactaggttatagtaggaagactaatgtatgtaaaagttatttttgatgtctctgctactcctttggctattacacatgaatgtaaggattttgattctctggattgggtagtactaatataactttagaatttgttcttcccgtattttagtatactcctctaacttcctttcacttcctgtgactaaaaacattctatcagcaaaaagttggaacatactcttactttgtcatcctgagtttgtctttagcatcttgattttatattctagttccataatttactcaaagatttatttatggagtagtagttaagagagtagatactgggatgtagattggcctgggttccaattctgactccatcatttaatagttttataatgttaaagaagttatttgaacttcttagtgtcataatttccttggctgcaaaatgagaataatagtacttacctcatgtggttgtatctgatttaaaggagatattacatataaggcaggtagcacagtgcctggcattcagtatatgtttgttattattcttaatccttgtcttctttgtttgcctttattctctactcacacctaaaatcattttctttaactctgtgttatttttggacacttaatatttcctattcccagatacgtcttattttcacttatttttcagtttgtgaggttggatccaaatatgaagatatatataaaaatgatctttgtgaaaatatttactagtactaaaatctgcatgtttactatccattttctgctttggctgcactgtgtagagtgtgctgtctggaaggtggatgtttgcttactgtttcacttatgcttctccagcctgttt

SEQ ID NO: 10568 - DNA, 1048 bp, Homo sapiens
ataaagatgctatgtattttgcatatcatttcgacacagaggttgcttctaatatcaattaaatccacaagaagtacccagcaattctacctgcccttcatctttactacataaccataaccttttcttgttactgaaagtcttgaatatttttagaggtagaaagcatgtagttgaaaatgtattcatatgaaaactaaggttccttccctgctaacttgaccagataatgaccatttcaggctctcagggcactggtaaattaattcacttgctaattttatacattgtgtcaggacggtgttcctgagttttaaatatacaaagatggacgatgcatggttttgctcttgaagagcccacagtcagaaaagggtaatagttgtatgaacaaataaatgataattttgaaatatttttctatgagcacatagaacacagtgctcagccacctctacttgtgggtattcaatgaaggctcgctaaagagtgatagtttacctggattttgaacaatagccaagaattttttctatacgaagagcgttatgggagagagtccagctagaggaaattgttttgtgaagaagtcatagcatggttggtttgtatggcaaaaggtaacacttcacttggcctagggttgtggaatatggaaatacaataataattaaatgtaaattatgaaaggccttctctgccaggcagtatattgcagtagtcaaaagcattggctctgactggataaagaaaaatgtggcacatatataccatggaatactatgcagccataaaaaaggatgagttcatgtcctttgcagggacatggatgaagttggaagccatcattctcagcaaactatcacaagaacagaaaaccaaacaccacatgttctcactcataagtgggagttgaacaatgagaacacatggaatagggaggggaacatcacacaccagggcctctcggggggttggggggctaggggagggataacattaggagaaatactcaatgtagatgatgggttgatgggtgcagcaaacc

SEQ ID NO: 10569 - DNA, 1053 bp, Homo sapiens
tgaggcaggagaattgcttgaacctgggagctggaggttgcagtgagccaagatcatgctattgcactccagtctgggcaacaagagcgagactccatctcaaaaaaaaaagaaaaaaaaatgaaagagagttttccaatttgtcctgccatgctcattagctttcaaatatcaattcaattttagttgtacttagaagtttcagttatgtttccattcttcataaggatgataggggaggacagaggctattatatcacttctttctgaaaaatagcaggttaaactacagtgttcatctgttccctaattatgataaaatctatttgagtggaacagagttttttggtatcattgattttttgtcattgatttttttgtagggacagtgtctctacaaaaaattttaaaaaattagctgggcatggtggcacgtgcatgtggttccagctccttgagaggttgaggtgggaggatctcatgagcccaggaggtccaggatacagtgagccatgatcacaccatagcactccagcctaggcaacagaatgagaccctatctccaaaaaaaaaaaagacttcatatgtattgtccatgacctataaccacagttatatcatatgtgtgtatatatttacacatacaaatatatatagagactattttaaagtctaaattaaaacaatgagaattgattatatattttaaactctaaaataattagaataaaatgaagaaaaaatgattatatattatatacataattgtgaggagagatgagacacatacagtatatataatattgatatatatcatatataattgttctttctcaaagtttagactttaatatagtgtctttaccctaaataaaattaaccttgcactagatttttctgagaaggaagctcgtatcaaaattacgttttatgtgcttgcttcgacagcacatatactaaaatttgaacaatacagagataagtgtgacccctgcacaaaaatgacacacaaattcgtgaagcattccatataaaataaaaattttttttaaa

SEQ ID NO: 10570 - DNA, 1046 bp, Homo sapiens
tcatcctttcttatgctaaatatgctgttctctgctttgcttttttgacttaatgtatcctgaagattactccctatcagtaggtagagatcctccttaaaaataaaaaaaaagccaaccaataatcctctgtgcagatgtaccataatttattcaaccaattccctattaatgctcttttgggtttctgataaacatatttggttatttttaaaggaacccagtgttttaaaatgttttgaaatgtttaaaattgtttatttgtaaactctctattctggcctatgctcccagcctttacataccccttgagcctcatttcataccactgtcccgtggctccctacccctctcatggcttccagctcagatatgacttcctcagagaaactgttccttaactctctgtttaatgcagtttctttcaagtcactaatacgtcaccctgtttatttttttattagccactataaataatctgatattactttgttgccttcatttaggcagtatcatttagtggataagagtttggactctgtgctaaatgccctgattcggaatcctggttatgtgacagtgggcacattaacttagcattctctgcctcagtttattcctctaaaaatgggtataaatattttcctaatagtgggctgtgagaaatgaatgattaataaatataaacacttaggtagttacttgcacatactaagtgtaaagtaaatgctggctatatccgtattactatttaatcattcattgtctgccatcagtaagctctgtgacagcaaggaccttgtctctcctgttccccatcgtaatctcatgacttagagcagttcctaggttatggcagacacttactcatttgttgctaaatgattaatagttaatattcactttccattcctttgaaacattcttagaaatatgttacttaaagaatgctttcttatatacatcatatgcagttaccaaatttgacaattattttcatcagattcagcatcaaaatataaatgcctactgttaacatgtatttt

SEQ ID NO: 10571 - DNA, 1069 bp, Homo sapiens
tcagtagttttaaagtagtattttcagtgtcaaatattaggaggttgaaggtagggtgggtggaccacataatattatacaacagaaatcatttttttgtgtctccacgtctgctacacaggctgtgaggtgaaagaaaacttgtttacaaaccccataggtatgacacatgaaattgcagccattatagaactacaaaagatgaataaaagaaaagaactctttccgtgttccatttgcaatccgttgattaggctttggtgaatggtttcttctgtgggtgggtggtatatttttaccctgctctatgctactgatttccattctccatatggagaaagaacttttctgaacatttgaagacttgctgaatagagttgtatttttaaagatcctaacaacactaattgtaattggtttccatggtgatagaaaagtgaactcaatacaggaaaaataactccaaagatagatttggaagaaatttagaaatgtgggatttggaaatcctgtttgccatttctaatagatgaaggactgaaatattattaaattgagaagtgaaaattatttaaatcactgagttgctgtcataaatttctacaggcaaatatagttcagtccttcatagtgtatagtctttgtacatgtagttcaggtactgcataaaatacattaatattcagacatgtatagggtgtattaaaacccacagttctcttaggatagttttattgaatatcttgtatgtgctagccacctatgtgagtaccactgatgaagcagataatctttcctcagagaaaacaagtaatataccaataagtttaagagaaaaacaatgttataaatgttataaaagtgcttgtaggtattcagtggtgagagagattatgtcctgtggcattcaaaagtcttcatctttattgaagattgaatagaatttggatatgcagagatagaagtgaagaaccctcagccaaggaaaaatagtacagacaaaggtgcttgtgttttcattgttcagctccctcttataagtgagaccatcaattgctttcttagtaag

SEQ ID NO: 10572 - DNA, 1057 bp, Homo sapiens
agagtaactaattgctgttgcaaatcttttcaaggttcaaattgtgttgaactgataaaaatcagtttttatataataaccatggaccataaaggttaactagctgtaaaccttattttatcttctggaataaaagcaggtgtttggtacattaggagagacctctgaaagccagagtagaaataaaggatcactgctattcagttaagctcttttagctaaacttcaaatctgacatgtagtttttctgctctttcaattgtgatcattggaaggctttcatagaattggaaattcttatcagaatctttcgtgttttgatctctaggaagatgaagtcctcagtacattctgaagaagatgattttgttccagagctacatagaaatgtacaccctcgagagcggcctgattgggaagaaactcttagcgcaatggtaaatcagttttatacaattgttcatatatacatatatatgtatatatagcacttatataaggaaaaggaactgaggacacattacacaaaaaattttgttgctttgttcatttattcaggaaatatttattgagtgaatactgtatacttggcactgtcgtagagtctgtgggcagagtaatagggttacagagtggtaaaaatacagtgtgaaaggataggtgctaattatatagggtagtcacagatggcctctgtgggaagatgaggtttgatcaaagacctgaaggaggtgagggagtgagtagtgtgtttatctggaaacacatcattttaggcaatggaagaacaagttacaggctgtggcataggattagagaacaagtcggaagaaacacaaataggatagtgtggctgaaactggatgagaaagaaatgaggtcagagaagtggtttgggtgggtggaaagcagatcgtgcagtttcttgtactttattgatgaagacttttgctttttatgcttagtgagatgggaaaccattggaggatttttggctgagcagtgacacaatctgacttaaaatgttaaagaagtctcaggttactgtgagtaggag

SEQ ID NO: 10573 - DNA, 1035 bp, Homo sapiens
ggcagaaaaggaaaaacataaatgttttaattctatcaagaaagaaaaactttacttagaaattgttatatgtaatgtactaggccatatatatgctttatacagtgtatcagttaactgcttatcactcctataaagcaggtatcatttttcctatttcctcggtgaggaatttatggctcagagagtcacacagcccacatttgtcatggtggagcaaaattttgcaagtggtagcacaaaaatttgaacccagatgtaactgactttgaaagtgaagactttaatgaaagatttttggggctatcttctgctaaatgctattttctgctaagtgataacttataagaggctacagctgatatctcaagttttgaaattccttttttttgaggaggttatgagcatcaatgacatatagattatgtgaccatcataaaaatgaagtaatgaacacaataatgtgacttttaaaaaatgtgacctctaggacacctaggaatcatgaaaggttctagttctttggcatttgaaggtagaaatgtttatcatatgattttgtttagacttccctaataccacgttatgggctgatagacagcctggcaaatatgacatataatttgaagcagctacagagatgatatagtgcttaattgaaccatatttttgatcacgatctgtagatgcccagatcgctgatcttcacgtatatctccattattaaggcaattcattttaagtgacgagaaagttctgactttagttaaactggatgatttggtgaacatattttaattgggggggacaatgcctttattgatttatagcattatagaactaatgatacttcatgcacttgactcgttggttggttgcattattcatcctctacctcaggggttcccaacccctggaccgtggaccagttatcttatttggaaggatgccacaagttagaagctattgtggcagtctaagtaggtagtaagggtcttgactgtggtattgtacatcttctaggctcaaaacagc

SEQ ID NO: 10574 - DNA, 1011 bp, Homo sapiens
taaagtagtaagttaaataaatgagaattttgtttccttttccagaagagttaaacattttagtagatccaaacctagattcaccaagtacttttcttttattgttatattataccttccattttttgaacatctatataggactttatcctgtttcatgtaattacttcaacaatatgactgggtatgattattctgttcagaagaggaaattgatcttcagagatttttggtgacttgtgcaagttcacataggtaataagtggcacagaaggaatttgaattgtctgagcccaaatttcttaaatttaaaaatccagcattatttctaaatggaaaccatggatactcaaggataatactgttgtttccaattgctgtgtatcttgtaacttgaatagtacctgtaatagtgaaaaagtaacttaatgaattgtatatcagtaagcaaagtcagaacagtgatgtaacttgaaaattctcagttgacacttaaaaacagccttattatttttcaagtaatgtttgaggcatcagaaaatgtactttgtattcattgttcattttgaaaatataacataaaaagccccagagatgataatattgatatctggttctagcaaaatcagaagaagtagacagatattaaattcctaatttatgcatcattcaaatttaaacataaatctgtgtatcttttaaagagctgcatatattaaacttctttttacttccctgttatattttattcttcaaatgattaactttatttttgcagtggataaaacttagcagaacaaatttcaataagaaaggataatgggaaaaatgcttctctgtttccagaaataaatgagcaggcaggaacttaaattctccttcctaggaaaataaaattgaagaattactgataccagaatagtagtacacttactttaaatcaaaataagataccccaaattaaagtttaaaagtacagcatttagcttctgttacttgaggataagatgt

SEQ ID NO: 10575 - DNA, 1018 bp, Homo sapiens
ataaaatgtattagaacctatggggactcagctaaaatctgaaagattgtcttttttttttttttttttttttttaaagacagtctcactctgtcgcccaggctggagtgcagtggcgcaatcttggctcactgcagcctctgcctcctgggttcaagcgattttcctgccttactcccaagtagctgggattacaggcaccagccaccatgctgggctaatttttgtatttttaggaaggtcaggatttcaccaggctgatctcgaactcctaacctcaagtaatacacctgcctgggcctcccaaagtgctgggattacaggagtgagccactgccaccggccttaaatatacatattaataaagaattagaataaatgaattacccatgtaactcaaggagagagaaaaagaatatcaaaatatatttttcaaagagaacagaggaggatttgaataaagactggtagtctgaatagtggcctgtcaaatatgtccgcatccgaatccctggaacctgtatgttactctgcatggtgtgtttgttgctgctgcaacaaattaccacagacttggcggctataagagtagaaacttactcttctggttttggagaccagaagtctgaaataaggtgtgggcagggttgtgctcgctccagaggctctaggtgagaattctttccttgccttttcttgtttctggtagctgctgacattcctgtcgttccaatttctgcctctgttttcacatcgctcttttctcctctgtgtccagaccccctctgcctctctctaacgagcatttagagactgcctgcataatccaggattatcttctcatctcaaaattcttcatttattcaagtctgcaaagactcttttttcaaataaggtagcatttataacttatagggattaggacatggaggtatttttgggagccatatcggtttgccacacatggcaaaagggactttgcagatgtgattaagctaatgattttgagatagggaga

SEQ ID NO: 10576 - DNA, 1023 bp, Homo sapiens
atactcagtcagaatctgcattttagtaagatccccatgtgatatctttttacattaaaagtttgcaaacaagaagtattgcactattagattgctgcaggatgaacagatttacaggaaaaattttgcataaaatcagttaccagagaggttgcacttaaagagtactaaaaagtaggttgtgaatgagaacagtgacaacaggttttcccaggtgtatttctgtttaaactcttggaaacgagggtaactatctttctcttctcccttttgctatatcagtttattccctggatataacctttctggaccatgcagaaatttatttcctgtgaattatttttacacttaattagggtgtaattctacttaaaatttgagaaaacttcctgtgtcttgtagtgtagcagggcatagcttttggcaattaaaacatcaaggttgaagttctccggcttttttacttagtagcgttgtgtccttgggaaagttgcttaacctgtctgaacctattgcttaacctgtctgaacttggacactgaagaaaaaacactaagataccagctttcatatacttgctggtaaaactggaccaagttaattatcacttggtctctttgagggttctgtaactcttaggttcacttgtcacgtttcttcttgatgagggaatatgctttagagtagcaaaagagaccagtactgcttaaaatatttgatcaatgctgaaggtaaatgaatgcttcagatgctgctgtttcttcatcctgttgctcagtaaactccaatagtagctatagttgtcaatatttcagaagtaattggtcccacagtgcctatctgcaggattctttgggtcctgcatattcacaatgtccctgagtaaagagggccagtgactcagtgaggtcttggaaggaaagagaagattcgagtgtccacaagtaacatactgtgggtacgtccaggaggagcagaaagaaagaagagggttggagcatagggtcccattgcctactattt

SEQ ID NO: 10577 - DNA, 1053 bp, Homo sapiens
agtggctagcaccataatttagctcataggttatgatagagtgcagaaatctgtcatcatattgcttaactggagtcactgggattgagtttatgatttcattagctgtattgtcttggtacctgataggggtaagatgggaaaaattagtacagtagttataataagaaaagtggttgactattaactttccagtatgtgttaaaatactgatttatcaaaaatttaaaataaaatcttaactggttgatagttggagaatttgttcatcatagtcctgtgaaaaattatttaggaagtttagctttgagtctcgatttatcagctactcttaagaaatacaataatttactggcagaagttctttaagctctttttgtgcatctgtcttaaatgcctaagacaactagggcctccaggagtgggttatctgggaggctagttccttagtggaggcagagatttggggtgaaggggactgtgactgtgaaggagaaagtttggctgtagggaaaatggtggatagagtgggagctcggagctggaagaagttaaaaagagggacgtggcaggcacatactgctgcagatagcaggctgcctttcagatcccagtctaaaggaaacgagaaggaatcagaacaccggggtctgcagccatcagatcgccttacctgatggaggagacaatctttaaatggctcacagattcagaaagttaaactcaaccacctggggttgatcaatgtatcttttactcagttttagttttggtttattttgattaaattctctcctctgatggttgaatttggtttagattttaatatgatagttgtttaatagagaaaaaacaaaccatagcacagcatagaacatatatttgacaaagtgctataaaattgccatataacattagtgaattgaatattccctttaaagaaatcttaacatgaaatgtattacattgctattttagacaaaaataagacttttttgaactgttcattttattgacatgttttatgaagggaaaagataaagaagactgaag

SEQ ID NO: 10578 - DNA, 1029 bp, Homo sapiens
ttttatagctctcttctttagattagtattatatttagttactacagtaatgtttgtgtgaaatgtgtgaaatggtcacctcaaactcatttatataaggttagattacataagacaggaaagtgtgcagtacattttagaaatattcctgttgtaaaacagttaaagttctggtgcttacatgtaaattcacttgtttttttatctaatgcctactttgtactgatcttaaggagtgttattttattgaaacctcccagtaactctagtagtagtactatcatagaagggaactgggcctcagaaattgtggtcacttgatcaggtttactcaactatgtgggggattgattcatactttaaatccaggtctttttgcccttcaagtgcctgtgttttcctcagtactactttgtaaataatgtgaagtgatttctgaacacttaactcgggttgagaaggggatgttttccacatttatattcttaacatttagagtaacagattctttgctattactcctgcacaggacaacctctctctcttctctcccaacagagaattaccatctggtcaagaatgtcagtagcgccaaggttgagaaaccctgctgtaagagttctgagtagtcaaggttttactttgagtgcgtttgtgtttgcagttttagctctttaccgtgatgataggtactagaatgcacgagagacatgaactacttgtgcctccatagtttatattcttaatttgtccacttccctcccagtttggaaacaggttgacagtgagtgtagagcaagatgtttatccatttgtattctgtgttgtttctagagaatcagggattttatgttagagactttctgaatggtgaaggttaggctttttaggttttcatgctgatttttatgataactttcaataggaaaaggttgtgagacatgggcagttaagctggctttcatgtactggcttgctaacccacctactcttatgaagagttgtgttgattgattagagcacagattt

SEQ ID NO: 10579 - DNA, 1051 bp, Homo sapiens
acagctaaggtggaagcccagtttactgtatgatcgttcacattgaggtgggtgacagggtgaagtagtgggggagaaaaacataagtgggacagagaggaaatgttagttggaagaaccttctccagttatgtaactgttttgttttctagggagagactaagaaccagcaagacaggctcaactgtcttctttagagcctttgatgttggtttgaattccagtagttatgttccttctgtgttcatttcctaacctccgtatcattttccagtcaccaaaagcttttctgaagttggcctgcgacactaatggcaatacattcatctctactttctctctctctcggtgctatataaacgatgtttttattgttgcttgttctctcttgacttattcaagtgttttccttcccaagctgacctgagtatattatctgcacactgtatgttgatcgtagacgcatgtaataaatgttaaggactaggcatctgttttcttcataaggctgtggtagcagaagaatgaaacaaaaaggaacttaacatagttgaacttttaaagagtaagactaatattcttgagaatttttcggatttaacccatgattgtgaagtccaatgtccatggaagtagtcaggaggcagcaaggacttgaagttaggttgtggttgcagttctgccccatagtagctgtgtgacagcgtaccttccttggacaagttatttacatttctgagcttgtttgcattttataaaatagggatcagaaggcttgcattgtttttcttacagagctgtgaaggatcagatgatagaaaggatatgaaaatgctctgcagaactgtttttaaatatgtaaagtattgtcattacgtataaacttagttactaacctatgttacctggtaaattggcctagcaaactcttttaaatgttgtaacagaaatttaaaaaacatgcatataaaggctgggcagggtggcttacacctctaatcaaatgctttggcaggcagaggtgggaggatcccttgaggccaggagtttg

SEQ ID NO: 10580 - DNA, 1048 bp, Homo sapiens
gggctccaactctcagtagagccagtaaccagcttcctgatttaaaaaaaaatcacctttggcctaattttgtcacttataaacagtggtattgcagtaccctggtatgattagttatgatatgtttaacaataattttaaaataccaaagcttgtgaattattttactttcaaaaaatatgtaagttagaattgtaattctaaaggcactgtcgtttgcttacacattctaacatatttctaataagaaagtacctgctttcttaagagaaaaagggataagttaccaaaagcagcacgttctcctgggctcataccccggattcatccatgaggccacttccattgtaaagcttttagcatctcttgatttctcttgacactgaggcacaaaggcctgctacttataggcattacttcatttttccttatgaagggtactataccaacacagactttatagtatgtttaaaaatcccaactgcaagatacacaggatgctgtaggcctgatttcctgttgtagaacctccagccctgtgttgaatgaggaggtgcaaatatatagacccttaagatcagaccacagcaggcattcaggtggaggggatgaactccattcattccagctgtgcagtgggacatctgcgccctccgcatctcggctcattcctcatctgagccactcaagagggcggtctggtaagtgtcatctgaattcagcttctgaattccaatgatttctccccttccgtgtctcttcatccgagtcaaaaggctttaatagagaaagagtaagagccaattagccagagattcccttaatccattaccaaggatgtgaaggcatctactgattcttaaactattttctttatatttctatcaaatactgtgattacatgtctataaactagacttcttaggaaatattcatcagtagataaaggggcgatggtggaaactactgaatgtcataattgaggccaaggtcttgcctatcttggtttactgtttcagtggctgggcaggagaactaaaagaaactg

SEQ ID NO: 10581 - DNA, 1035 bp, Homo sapiens
gccaggattggttgttttttagggtgggaagtattatagcatgtttgcattctgatggccgtagtccagtagaagggagaagatagatcatgccacagagagacgaagtccctgagtaaggttaaaaggcttgcatctgttacacatgagggaattggccttaggaggtgggaagccgggctcagttgtacacctgtagtcccagctactcaggagactgaggcaggaggaaatttaagcccaggagttcgaggctgcagtgagctctgattgtaccactgcattccagcctagtgacatagcaagaccccgtctcaaaaagtccttttctaggttattgatgtatacagagatactgatcagtaaaataatagatcttggatttactttaatatattctaattcctccctcccccaccacagtggggagggatagctaaaacaaagtattaatttttgaagctgggtgaaagggtataagggtttgttatactgttctctacttctgtgaatgtttgcaaaataaaaagttaaaaaaaaaatacaaaacatctacccatgaaacggaagtttgtctagttgtattttgtaaccggtttactattgtgaatccctcatcagtgctgcttctccccattcaggtggcaatcactgggcagcttggtgtgaagccccaaacaggcaacagcattccactcacagccactaacttccgcatccagggtaaggatgtattgcgtctgccgccctcttccatcaccacagatgccaagggccagacggttctgcgaatcactccggacatgatggccacattggccaagtcccaggttaccacagtcaaattgacccaggacctcttcgggacaggaggcaacactacaggcaaaggcatctctgccaccttacacgtcacttccaatccagtacatgcagctgatagccctgccaaggccagttcagccagtgccccttcatccactccaacaggtaccactgtggtcaaagtgactcctgacctcaagccaacagaag

SEQ ID NO: 10582 - DNA, 1049 bp, Homo sapiens
ctgccacagccagccctgtgagtaagccagccacgagttctcctgggacctctgctcccagtgcctccacggctgccgtcattcaaaatgtcacaggacagaacatcatcaagcaggtaggtggggctctttccacgtggatctcaatccttcatcctggagcagggaccactggagctggaggttcttggccagactgcatgcccatgggaagaagatttgtcatcttcgactctcagcttatagatacttaggtgtgagttcccaccaaaggcaaaggcagtgcagctttgatagatgctgaagagatttcttctgtttcattccgtttaattcagcattcagtagtcgagtttctggatttagaatagactgttcatgagtttatttagtgaaattcccatggccacattttattggcttctcagtttaccactcgtgaaagtagaatttgcttctactttcttggttgtgaatataaaagaataatcatcgaacttcaaagaatcgtaagcagtatagcaactaatactgataggagtgcctcctgtgtgcctgcaccgcgttaagcattttttgcttgttaaatagtctaatcttcttagctctgtggggtaggcactcttattatttacaggtggagaaatggaaccacataacgataaagtaatgttttttttttgttcaacaaacattaagccagagagtgtcctaagtattggagatttaatggtacattaaacagactaagtccttgccctcgcggaactcgtattctcatagagctaagagacgagtacctcagtatgagatagtaataaatgctatgctaatcagtaggcaggctcaggggtggagagcagtagtgtgttattttagctgcagtgattggagaaggcctctctggggaggtgacatttgaaagagatgaaagaaagcgtgccatgaagtgatgattgggagataaaacattcgaggcccaggaatggcaagtgcagatgttttgtgtcaggaatatgattgaggaacgagaggaaaatcattgtggc

SEQ ID NO: 10583 - DNA, 1079 bp, Homo sapiens
gcagttgatagtctgttctatgccagttctgttaagaaggttttattctgagcatcaggttgcttctgcaatttttttttggtgctattttgaagttttgttaaactcacatgctatgtgctgtctcacccgcttcacttatttaggcataggcatgatgaggatgtcatttcaccatgtgctgaagggtgatgagggggcacagttgcttggggaccacccacgtgacttgactcaacgcttaagtttctgctatatctttacatggatctgaaatctcttcaagggagcttgaaataatttagtggaacatgcttcattttacatatagttattctagaactgttctttatcattggagaattttggaaaagaaaagtacctgtattacgtaattcacactgtcactcatctagagattattcattgcaggattccagaattggaaataacgggagggaggacctggtccagcttcccttcctcaaataaggaaattgacacctggcgtggtaagatttgtggaatgtggtgtttgtggaatgtggaatatggaattctggtgttttgactgttaacatccttttttcttttcattttagtatgctttttagcccactttgtaggaataggagctggaaaggatggatttagtaaatgttggtagagtgattgagtttaagctccctgtggtcctgttagcattgtgcagtcctgtgctatcaacttgacccctaatcccagccatcagtctgaaaatgttgtggtatgtagttttctgaaggtgatcagcagtgttctgttattacacgaaggagaaaagtagcattaatttacatgattatacggatcaaatggaccaactaaaggcagattggccattgactttactggtggttatggtcaggtgtgtggaacctcaggaatttatatggactaataaagtcatatcagtaaggttcgtttttattatttaaatgttgcgaggttatacaagaggtattgtgtgtagcattaagcacatgggtttgcaggcaggtagacctgagtttcagtactgcctctggggttgggcaagt

SEQ ID NO: 10584 - DNA, 1058 bp, Homo sapiens
cttattggaaaactgaaaagaatcactgaatggaatgttcattttatggcagttgttttaagttttaaaatacacagaggaaaatattgtggaaggacctctttgttgctttcccttctaagttgtcttcttcttcttcttcttcttcttcttctttggtccttaagtgaaataaagactctaaaactaatttgtatattatcagccagagatgcggatggcagtcgagccaaatcgcatggctttcagatcaggtattctgcacattcattccaaggtcatagatttttaaaaggacctggatttgaagagatggcaaatgatgagccatcagaaaacttaatttggaaaacatgtatgtagccagtgtggatattgtggcctctctcaagacacattgacactgtagacttcattcagtccagtgtgagtattttggagtaggttggatgtagattttgtttttatcattgatttgtaccgacagaaatagacatttcatcatgtaaaattcctgttattctggaaaaacctattgttttgatcttcttgttttctgacttggaagtatcctttcaaaaaaactcttaagatatctaggtctaaaaagcacttcatgagatgctaaagctgacccactggttgaaaatgttgaccctatcctgttatttaaatgtgaacatttattgtacattcagtgagttatagtgttaatagtcttgtgctatgcagcaggtgtaaaaattaataaatatattttttaataaacatgtttgtatgtgtgaagctacaagagctatttttttttctttgaagaattgcaacttttggtttccagcgtggcatacaggaagcttggaagttgtccctccatcctagcaataagtaagaagctgagcaaatggaaagatcaacatctctccttagatccatcagaaagttgagcccacaggacaaactgctgtccccaaaattggaaagacaaacaggcaaatacagagaatcatagcttattgaacagaaacccgtgagaaaaaaatccacgatcaataacctct

SEQ ID NO: 10585 - DNA, 1032 bp, Homo sapiens
acaactgtctcacaagctttctgcccaggtctggaatcagccattttcccaagaaactctcattccttttagtagaaaatgttatttagagaccatcaacaagatgctagggtgggctttatttttaatttgctctaataacactggtggtgaaataaaattcaagttggattaaattataattgccaagtgtggatacatttgtgtcacaaattcaaatctgaatataaaagataaaaatattgatttaaaaggtaactctttgtgacgtatttcaaggttttaaaaattgttgagtatttgtctttgtggatattgagaagccacatttgaaggggaatgcactgattgtctctgacactgggtatctgcgtaccaggctcttctcaattcgtagcagagatgctttcacggcaccaagaaatcacatcattgtgagactctcatggcaagcaaatcagtgcggactgtggctactggttatgtttttgtttctaagacttgtgttaaaatctgagaccactgaactatgaatatttcctgttttttagcatctgagattcaaatgatgacgcttcctccgggtcagtttgtgattacagacagtggtgtggcaactccagttactactggccaggtgaaggcggttacttcggtaagctacgctactcggtcgggtttttcctgtccaacctgtggtgctgtatagtaactcttatcaccacttatctcgtaatgattggcttactctgttttctcacagtagatgatgaattctttgaaagctaggtcttgggcattatcactttatcctcagtgccctgtccaggaggctaggatatagcaaatgctcaataaatatctgttcaattaataactgtaatggtcctatctccatccctatgagccttttttttttttttttttttctgagacagagtcttgctgtgtcgccaggctggagtgcagtggtgcaatctcagctcacctgcaacctccgtctcctgggttcaagtgattctcctgcctcag

SEQ ID NO: 10586 - DNA, 1025 bp, Homo sapiens
ccccgttttcaaaaatactctccaaatagcgaaaagacaaactacgggaacacatgcagaggatgcataatcctgagagggaggccaagaaagccgaccgcatcagccgctccaagacgttcaagccccgcatcacgtccacagactacgacagcttcacgttcaagtgccgcctgtgcatgatgggcttccggcggcgcggcatgctggtcagtgcccagtggctgcgggttcctctgtcttcccagcatacctcattgctgtcgatgatggtgacgtttgtgttgcattgtgtcctaagttatatcgatcaatggttttgtcaatgtccaggggaagaaacagaggcaaacgattcccaatttggagttctgtcttttctagtctccctttgctctctcttgctgctttttggatcaattcttgtaagaggtctttttctttttctttttttttttttaatcacttttcattactacttttgtttttctttacccatctcaatctctgctctcaccttattttagttccctcttttgtgtccctgaatgtatttttttaatggggtatttgccttctccccagctgttcccttttattttatttatttatttttgagacagaatttcgctcctgttgcccaggctggagtgaaatggcgtgatctcagctcactgcaacctccccctcccaggttcaagcgattctcctgcttcagcctcctgagtagctgggattacaggtgcccaccaccatgcctggctaatttttgtatttttagtagacacggggtttcaccattttggcaaggctggtctcaaactcctgacctcaggtgatccacctgcctcagcctcccagaatgctgggattacaggcgtgagccactgcacccagcccccagctgtttccttttaatgcctctcttttccagatatcaaacagcagtagaaggaagctttccgtcaaagcagggtatgtgcatccaggttagctgaagcatcagacagccagtgctctgctct

SEQ ID NO: 10587 - DNA, 2025 bp, Homo sapiens
accagttcttcattccttttttgtttttttgacggagtttcactctttcgcccaggccagactgcagtggcgctatctcggctcactgcaagctccgcctcctgggttcaggccattctcctgcctcagtctcccgagtagctggaactacaggcacctgccactgcgcccagttaattttttgtgttttttagtagagacgaggtttcaccgtgttagccaggatggtcttgatctcctgacctcgtgatctgcctgcctcggcctcccaaagggctgggattacaggcgtgagccaccacacccggcgtcttcattcctttttatggtcaaataatattccattatatggatataccatattttcttcacttatcagttgatgagtatttggatcgtttccattttttagctattatgaataatgccactgtgagcattcatgtacaagtcttttagggacatatgcttttatttctcttgggtttattacatcttgatgaggaattgctcagtcatttggtgtgtctatgtttagtcttctgtggaattgccgggctgttttccatattggcagcagtgttttacattctcaccagtagtgtatgagggttccagtttctcctcatccttacccacagtggttattatctgttgccatatcagaattttgaatgaaattgaaaagatgaaaaggcactacaaaaataagcataatagaaaccagagtatcattaataaaggcagttttgtgtggtttgttgacatggcaggaaagctgttgcctttattgtttgaagctctccaaacaataaaggatatagatcaatattttgctgaaattgaggccaataaaagtattattctgaagctacaatatgctgtaatttttcttagctggacaaaccttccctattagtggagagtttataatctgtgtgatttgaatttcaggtatattttgactgcacaatagcagacaagaacttgaggtgcttattttcatttggctattcttattccttttaaccctgggaatgaacatgaattgatagggagaattaataagtatatattaataaatacaaaaaccacaacaatgagcactgttgagtgttcctatgggccaggtgtgggttttcatttgcacagtgtacttcatttatttcatagttctaccttagggaattggaactattggtcctgctgtaaccatgttatagatgaagtcttgatgccttgaaaagtaacttccctcacctgggtcatggagctggagctggcagttgaggagtctcaatccaggcccccgaccctagagatctgttgccctccacgcaaagtcatgcagcagacttggtgcagtggctcacgcactttgggagacctaggcaggtggatcgcttgagcccaggagttcgagaccagcctggccaacatggcaaaatcccgtttctactaaaaatacaaaaaaattagccggccatggtgctgcacgcctgtagtcccagctactcgtgtttctgaggttcaattgcttgaacctgggaggcagagtttgaaagtgagccaagactgtgtcactgcactccagcctgggcgacagagtgagaccctgtctcgaaaaaaaacccaaagcaaacgaaattcacacaacagcgttagaggtggggaggagcaagtctggtcagtagcaggctgctagaaggtcatgttaaggccccagctatgacataaggacttgccacagcctgctactcaagggagcactatgtgtgatttccaaccattcttgttgccatcctaagccacaaggacttgccacagcctgctacacaagggagcactatgtgtgatttccaaccattcttgttgccatcctaagcctctgccccctccattaactaatacaggttggaggcacagggcgaggaggagatctacattctggttgcagaaccacacaccccagactctgccacaccaccatgagcctgctgttaatccaccacgagcccaacacct

SEQ ID NO: 10588 - DNA, 1027 bp, Homo sapiens
tagggactagctatcattcctttaactaattattgctctttgtttgactttttaactgtcctctctgagacacttgtttacgtttagtcttcaacacagaatattgacagaaccgtgtccaattttgcaaaggagagaaagtaggtagaggtcagggaattatgcaagtatgggagaggggtcagagcgcatgggagaaaagggtctgtatcctcagccccaggcaggggatgtatattaataaggtttcagtctcttccatcatgtattcatcttctccttcattctttttctcttgaagttgatgaattgaaaattattccggactgtgtaagtactttatcactggataaatataaggacccatgaatggtaatatttggacaccactttatgtgacatgcaagttctctcaagtactttagtactgtggaagtgtgagatgttacattactacaaaacagtaattctggaattaaaatgaaattatgtcatagtaattggactttgatgaactttgtttcatttatacattttaagaaagtttatgttggccaggcgcagtggctcacgcctgtaatcccagcactttgggaggccgaggcaggcggatcacgaggtcaggagatcaagacaatcctggctaacgcggtgaagccctgtctctactaaaaatacaaaaaaaattagccgggcatggtggtgggcacctgtggtcccagctactcgggaggatgaggcaggagaatggcatgaacccaggaggcggagattgcagtgagctgagattgtgccactgtactccagcctgggcgtcagagcgaggctctgtctcaaaaaaaagagaaagaaaaaaagaaattttatgttaactttttaatattttttaatttttttagagacagtgtctcactgtgttgccaaggctggtctctaactcctgggttcaagccatcctcctgtctcagccaaccgagtagctggggttacaggtgcaaaccaccaccaccagtttcgtttctttttt

SEQ ID NO: 10589 - DNA, 1022 bp, Homo sapiens
caactctttacctcactcatgaacttgtttttacccatttgctgccaaacataggtgtgttcccttcaggagaatcagcatatacaggttatgataggctcccaccatttatgcttcttcactgatagggttgcattactttctgcagcagactataatacttcatatagtactgctgtgtctcaactggaaaggtcaggaattttaatgttacgttgtggtctttgaaaactgttaggcctagcaatagataaatctcaaaattaattttaaaatctgtattgacaagaataggtaaaattatgaccaggaatcattgttacccttagttccaagaggtggtttttgaaagagcaagaggaaagaaaaaagaaaagaaggaaagaagaataaagaagagaaacgtgtaagaatggtttgcagattgattggttaaaagtgtttttagcacatccccaaccctgaaaacttcgcattaagagccaagcacaatgttggtagctccaagatattctgactgtgttctcagaatgagggattacccatcactgggtattccttcccaagtagaaactttagattttcactggtaatacacattgccaagttttatgggaaatctgaatatactgtgaaaatgcatatctggttagttgtctgctgcccagatcttatcaataccagtaactaaccagtatttaacataaaatgatacaaataaaggcctttttctatttcagtgagggtacatttttcttgatatatatgtactttaaggatattggatctgtttatggatctgttttaggaaacagatttgcaagggataattgtatatatagtagtatttaggtttatttcaaattcatcttagggatgcctagatgcataatttttaccaggacatattgaaaatattgcaaagagatagccagttatattatcccattcattagaaattaccagtgtaactaaacataaatattccagtttagagtgcttaaacgtagctatctttctta

SEQ ID NO: 10590 - DNA, 1062 bp, Homo sapiens
ctccggatgatgatgatcggtcagtactaacatagcatttcgttacctcttaagggttgtgtttacaactccaaattcaagcatttcatctcaagagttgtagaagtttattacaacctcacttcagtatacttttcaaagtaatgaagtagcatcatcacattataaattagagtacctatacaaggcttttttttttccccagcatttccaaaactacctagtcccattgctttaaatcgtatctgtaccaagtgttggcaaactatgaaccacaggccaattccagcctaccacctttatttgtaaatcaagtattactggaacacaaccaggctcatttgctgacatattgtttgtggatggcagagttgagtggttgaaacagactgtatggtgtgcaaagtcagaatgtgtgctgtacggactgctgtgaaaaacatctgccaaagtctgatctgtatacccataactccctccctgcttgatatttccacataaatgtataaagggcatttcacatttaacaaggccaagacagaactcttgatttctaactccttgtctgaatcctgcttctccagcctttctcccatttcagtaagcatcatcattatcccctaatttctcaagcaaaatctctgaggattgttcttaatcttttttccttaccactcttcatctccctcgtagttaatccttaagtcctgtcaactctgcctataaaatatatccctgtctacttttctaatctgtactgtagccaccctactctaagtcaccaccatcttttgccttgactactgcaataaccttcaaagtagcctctgattgcattcttcccctaatccattttccatgtagcagccaaaatcatcttttcttttttaattaagtcagattatgtcactgttttaagctatagattcttaacattctttattcatacctaaaatctataggccttgctatgccttctaaagccctacacgatatgacttctgcctaactccgtctcaaaaaataaaaaaaaaaaacaaaaggcattctggacattaacat

SEQ ID NO: 10591 - DNA, 1027 bp, Homo sapiens
tttgatagcaatgttagtagcagcagcaactaatgtttctatagcattgattatgttactagttactattctaaacacttaacatatattaggtcatttaatcctcagaactctatgaggtgtgttgtgttatatttcttataccactgaatatagtaagatacagagggtttgtttaatgacttgcctaaggtgacacaggtaaaaatagcagaaccagcatgcagagtgagcattctggctccagagtctgtgctttcaaccactccactgtgatgcctttatatactgttgggagatagtaggcatacgtcttggccttgattgttgtttaaatcagacttatgtgcccttcagagttttttcagttgtaacatattttccatagatttgaggtaaaggatcagcatgccttgaagcccctttccctgcaggggagtaagcagggaagtagaatggggtttgcaactcacaacaaactgattactctcagcaaaaatccttttcatatctactctttgaacacggaagatgactgaaggtggatgtaactcaaggttgaaaatagttttccactaccccttgtataaggtgcccttgtgcctcacttgagaacgtagtacattatctgttgtttggggcctattcaagatggaaatggtttcattttaatactccgatgcacatgtcttccaaatatgctgtttaatttcttgccttcacacctttgttcatgcagatggtccctggattataactaattcacttgctctgaaagcatgtttcttccctcagccacatgatcccaaagtaagcactctcgaaggccatgctttaaaagcagaagctagtctcctgggatgcaataaatgaacaaaacgctttatatatagccctcccattttctttctttcatctcatttttgtgagacctaaatcagcaaatatgttacatgatggtttgcgtagaccagtccctggctgtctagtgtctcattgtggtcagttgacttcaggaagggtatgt

SEQ ID NO: 10592 - DNA, 1110 bp, Homo sapiens
gggtaggagcaaagctgtgttgggctaaggaaatgactacagatgggaaagcagtaatcatgaccacatattgtgtttgtaatcatgagcagatatgatatctgtaacaatgctactataaatgggggagggaattgacatatatagtagtcatgtttttgtctgtcacaagaattaagctagtatagatctgaagctggttctggtatatattctaaaaccttgagcaactactaaaaacaactcaaaaaatataattaaaaatcattttaaacctgcagatgctacattagaaaataatacaaaagtaagcactaaaggaatagtagaggaacaaaacagacatgggacatagaattgcacgtttgaatctaactatacaaataacattaaatgtgaacggattgaaatcaaaagacagagattgtcagactaagtttataaacagcattatccagctgtatgctagctaaaggagacataattgtcattcaaagaaaaatagattgaaagtaaaaggatggaaataaatatatcatgtaaacagcaaccaccagaaagcgagagtggttttactcgtatccagcaaatagactttataacaaaaagtgttactagagacgttttataaggataaaagggtcatttcatcaggaagctgtaacagttatgttgcatatatgtaataacagaataccaaaatacatgaagcaaaaacagaaatgaagaaacagacaattcaacattagtagttggagacttcagtataccgcttttaataatgtatagaacaggccgggcacagtggctaacacctgtaatcccagcactctgggaggccgaggcggacagatcacttaggagtttgagaccagcctggccatcatggtaaaaccctatctctactaaaaatacaaaaattagccaggcatggtggtgcactcctataatcccagctactcgagaggctgaagcaagagaatcacttgaacccaggaggtggaggttgcagtgagtcaagatcatgccactgcactccagcctgggcaacacagcaagactctgtctcaaaaaaaaaagaaaaaaaaaagaaacgtatagaaaattaaa

SEQ ID NO: 10593 - DNA, 1897 bp, Homo sapiens
ccttaactgctgcttattaagtaacttagatgatgtaggctttagtttataatagggtgttatgtttcattttaagaaattgggtctcactccatcacccaggctggagtgtggtggcatgatcatagcccactgtaaccttgaattcctgggctcatgcaaatagggtattggagaacttttacaaaataaaatgacatgggcacatcatcaaaacaataggccgggcgcggtggctcacgcctataatcccagcactttgggaggccaaggcgggcggatcacgaggccaggagatcgagaccatcctggctaacacggcgaaaccccggcgaaaccccgtctctactaaaaatacaaaaaattagctgggtgtggtggcgggagcctgtagtcccagctacttgggtggctgaggcaggagaatgacgtgaacccgggaggtggagcttgcagtgagccgatatcacaccactgcactctagccggggtgacagagtgagacgagactccatcccccccccaaaaaacaacaacaacaataaaactactttttaaaatatttatttatttatttatttatttatttatttatttatttatttattttgagacagggtctctgttgcccaggctagagtgcagtagcacaatcacagctcactgctgtttcgaactcctgggctcaagccatcctcccaccttagctttctaagtacctggagccacaggcttatgttaccacacctaactaatttttgtattttttgtggagacagggtctcactgtgttgcctaggctggtcttgaactcttgggctcaagtgatcctcccacctcggcctcccaaagtgctgggattacaggcgtgagccaccgcgcccggcctgttttctggcttcttaaggcagacactttggatgattaatttgagaccttactcattttctaattataatcatttaagggaatgaatttccctataagcactactttagctgcattccataaatgtagatgtgtttcatttttgttcattttaacgttttatagcttcccttgtgtcttgccttttgatttatggattgttagaagtgtgttgtgttaatgagagaacttccccaacctggcaaagggcaattacaaaaaacctagagatagtaagactggatgctaaaaaggcgagattgtcctttccctcaagttctattcccaccaatcctattaaacattatattaaaagtcctcactggtgcaaaaaggcaagaaaaataataggcatagagatatgaaaggaaaaaacaaaacttcttattgagagacctgattatttacacccaagtaattttttaaaaatacaaaaagcgtgctagaactaatcaatgacaggaacaagtcaacgtaaagaagtttggtgattttttaattacctttctgttaccaatttttgtgttgtaattccattagggtcagagaacatacattagaaagactgactattcttctgttactgcatagaatgttctataaatggcagttagatccagttggttgatggtgttatgtctttgctaattttctgcctactagttttgtgatggctgagacaggagtgttaaagtctctaagattagggccttgtatattttttctttcatttctgtcgtttttacttcatgtattttgatgctgtcttttaaggtatatacacagaattgtttcacttgatgagttaatccagttcagctttcttttgattagtgtttaaatggtatgtattcttttccaacctttcccctttaacgtacctaagatatgtttgaagttagttacttataaacagactacattgagatcatggtttttctcttttttctcctcgtgctgtctctgtgtt

SEQ ID NO: 10594 - DNA, 1029 bp, Homo sapiens
ctaaatcaaatagactttggtttctatcttatttgaccagtcagcagcatttgacactgtcaatcaccactccttgaaataccttgtacccttggtttctgaagtaactcctactatgctggttattctgtgtatctatctctttcacaggtttcccttctgataccccgccttcacttttttcctcttttttttcttaattggtctagctaaaggtttatcaattttgcttatttttttcagagaaccaagttttggctttaatttttcctatggcttctctgtttaatttatgtctgtgctttgttttgtctatttattttgggttttctttgctctttttctagctaaggtagacacatagaccattgatttgtgtgtgtgtgtgtgtggtgaaatacacgtaacataaaatttgccatcataaccatttttaagggtacagttcagtggcattaagtacattcacattattatacaaccatcaccaccacccatctttcagaactctcttcatctttcagaagtgtaactgtgctcgttaaacagtaactccccatctctgtctccccacatccccaggcaaccacccttctacttttctgtctctgaatttgagtgtcctctaagtacatcgtgtaatcggaatcatatggtatttgttccttaattattggtttatttcactcgcataatgtcttcaaggtttgtttgtgttgcagcatgtatctgaatttccttcctttttaaggctgaataatattccattgtgtatttatgccacatctcattaattcattcatctcttgtggacatttgggttgcttctaccttttggctgttgtgaataatgctgctttgaatattaatgtacaaatactggtgtgtccttgctttcacttcttttgggtatctacccagaaatggaattgctggatcatatggtaatttctattttttattttttgaggagcccctctatactgttttctatagtggctatgccattttacattcccaccaaccatg

SEQ ID NO: 10595 - DNA, 1051 bp, Homo sapiens
ttgcatcccacacatgtacatgagacacttaatcaccatgcaagagaacaaggaggatatccttgtcctaatgccatgtgaggtcctgtccccatcagataaattaatgttcattcaaaagaatgtaactcttgctttgtaagacatgccagaagatggctgaggtacctaggcttgctggcatgttacaacatgttcagtctaggaaggatcatgtggctaaagattttagtttgcaagactttgcccctctccctcaagacagttagatgagaccctaagacacatcattctcctcagcaaaaattgcagaagtatacatggcttgaggtgaagaaaggagaccttgggtcacttaatcccctgcagagaagccgatcaggtcattgcagccacctccctctagtgaccctcttacataaacaggaacaggaattcttgctactggattcctttcatcaggcatcttaggctcactgaatgaaaagccctataaaaaggagatgcggccctaataataacaaatacgatcgtgttggctattttggacaagaacagctttgtgccactcttgatctccatcgatggctgccattcttgccctgctattaccttacacacttcctattcttagaatcagttgtgagccttgggcttgggggattgcagccctcatggctggaatgcccagcttgagtggaatgcagactgtctggcagagtggaggttaaataaagtttgccttggcagccccctctgctcttggatgagtgacaagtgactcgagtataggagcgaggagtgatggcatgagctgccatgtggtgcaggatcaaacgagtcttccgtgcatgaatagaagtggttgattgtccatccatgacccacacagctatgtcagtcttaaatgaggtgggtgaaggggaggcctcaacagccttgaacctcacttctgaccatatcactttgaaaaaaattcaggaacagatcaagaataacgttgaaccactttctaggtttccagctgaactccagatttggtatatcttcc

SEQ ID NO: 10596 - DNA, 1057 bp, Homo sapiens
atgcacataggcacaggcgcatacacacatatgcatgcacgcagatctgatatatacatatatatgtacatacatacgaaacaagtgtctccaaacatgagatgcctttttatgttatcacaaacaacaaaacagatgatatgacctctaatgatgtccagcccacaggtcgaaaaacattgcgctacaaccatgaggtttaaaatgactgtgaaagtagcctgatacaattatatccaaaagtccctgggtctaaggcagtaattctcaactggagcaattttgtcctcaggggacatgccgcaatgtttggagacatgtttggttggcaaaactagcatctagtttgaggggaggaggggcaaggatgttgtggaatgttttataatgcacaggaaagcccctatgacaaagatttcgcagtccaaaatatcagtagtaccaacgttgaaaaccctgctctcagggtaataaaataagtcaatacttctaatttactgaaggtgtacttaggatgatagaagctttaacttgatcttccttttctttctcttttcctttgaactgtatttggtatcttaaggttggagcataattgcccttggattgtctatagaggtacagccaatagataaataggctggaaggaatggacctgttattttccttatatttagactgcaccaggcatttttgtttagaatattgttgtggatcttatgaatattttctgttttatgattttagtatcttcttccctttctcctcttcattaagccatactgattcaagaccctttctcactcagccatagctgctgtcttagaaaagaaatgaaggggatttggctaattggattagacatggtctctaaagccttctccttactcatgagatttgattctgctgttttgatgggaaatgaccttctactaaccttgaagtgccatcttaagccctagtattaaactgtctcctttttagtcattgcttcattcccctatctgcggctatttcagaccaggttcccttgaacatggagtggatgtgcagtccc

SEQ ID NO: 10597 - DNA, 1050 bp, Homo sapiens
tcttgctgtagttcttcttttctggatatgactgtcagtttcgtcatgagatttcttgctctcatttcgaactctttctttcttccactttctttgggggcgacccccgatccatgccaggtcttcctgtgaagaccgttccaacctcgtttccatttcttgaatgttgagtattacaacatcactgcgctagggtgcttcatggtgctgttctcgaagaggccagttgggctgaatctccttcctcccactggctcctgatatcttgctgtattttgtcttctttctgatttttccctaggggtttggggtgggtgacttaggggcggcttttgtgttctccctctctctctctttcttttctgtatgtatgtatggactggttaaagtgagtttgggcagctgactttatggtatgggttggctgacttttgttcaacattaaagacaaaccaacaaattgtacagctgcacacagaacacctttgagtgtgaacttgaatggcaactagaggcttactttttgaacttcaggtatgtaactcaaaagtaaataaaaccactattttttcagtaagcttttttttcttctaaaagatgacttagaaatcaaactataagaacatgaaatcggtgctgtaccaaagccttatatgaacatattctacactctgtataacctgtctgtgaggagctccctgctctatcaccctcttctcaaaagcctgggaatgccagcgcgtgccaagcctggggctgggtcttggggacctgtgggccaagggcaccctgggaagtaaaagatgacggtgaggatgggacacccttctgctgcctgagcagactgcaaggaaaccagatgtgtgtgtgtgcgcgcacctgcatatatatgtgtgcatacctgtgcgtgtgtgtgcgtgtgcgtgtgtgcacgcaagagagtgagagcgggagagagctcacaggtgcacagtgtcatggtgaatgtactaagtacgagcttgaagggaggcccaggttggctctgggagtggggcggtgtgggaatga

SEQ ID NO: 10598 - DNA, 1049 bp, Homo sapiens
ggagggtcaaattagtaatgcaccatctttaatgtattttttatggagactgtacataaaattatataaatctacagaattggttctattttaaggagagaggggaatgtatgtgggaggcaaggatcagatgcaatcgtggagactgggagcttcgggcgagtggcactcgggtgtggggagcgggagggcaagagatgagtgccgggcaagatgggcaggggcccgtgccctctgcacacatatataaatataaagaacacctagataaagtctatatatctctatatctatatgaagtcatagtttgctttatttttgtacctgtgcttagagatgttttgagcagtgctaccttcccaggcagtctgggatactagctcatgccttgacgccacctccttccctgctcttcctttggtattctctctgttcagagttgcttgggtctttctgatggaaatgtgtatatatgaaaagtttgtaaaataacaaaacaaataacccacctgcaggaaggacaagtgagctgaaggttgtgtggagctgcaggatctgatagccctaaagaaccaggaccaatgtgtctcttgccacttgggagggatgttgacttgaacttctttgcagaggggcttaacagggcaaggctgaggagatgaaaactgtgactccatccccacgtggctgtggaaaggtaaccagttcctcagagaaaacctggcttcacagcattagaaagggggtggttgagactacctagggacctacggtgacacctgtcttggtttgtagcactgtagctcagacagctcagaccgctcatagagggcatggcaatgggagagtttgtgaggctggctgcctgggcttggtcttggagaacacatggcctgtttagtgttgctgcagattcttagagccagtgtgaatgtggtatgtagtataaatatgtcatctatgtttttttcagttatttttaattggaaataaagtgccattgcaaataggatgctccaatcctgggacactgagtggaggatgaggag

SEQ ID NO: 10599 - DNA, 2002 bp, Homo sapiens
atctagtaggcagtgtgtagagccccatgtggctgtgtgtgttgctttagggagagggccaaagaggtgccttattggccagctctagattgactagggtaatggatggggcactggtgtttcaggagggggagttggagaactggagggtggaggggaggcctgtgtgctttgccaggtgttggtgaggctggaaggggcacagagggtgaggtcaggcatgggttaggatggtgagaccaccccaggggacaccaagcctcagcatctctttgagtcatgtgataacttagttacttgtaagggtgcagggtacacactgggggatcatcccaagatgacgaagaatgattgcctggtgggcatctggctggggagtggtagccatgcagggcatgtgggagggggatctgggcatcagggacggattgtggggtggggtcctgcatgtgaacgcagactggatcttgggagaggtcttgcttcttagctagatcttccttgcttcttctagaattagcctctaacactaagtgcccaaaccaaacatggacatcttctttatattgtatttcaacttcatttgttttgggggctcctcaggcccaaagctgagaaacttgtcttgagatgcccatcctatcaccagctcttcatcagtggagaaggaagtgccattctcattttcctaagctgcagcggtgggttgcctctccgtccacaatctgaaaatgttcatgggccttggtgatggtgatggtgatagagagggggagctggagcctgacgtgccttcatccccctttcctcttgaggtagagaggcttccttccggccatgaagttgcacagtggcttcgtgaggccttctctttactttctcttcttttgataggctaaagtcactagtctgtggtggaggtgggagggcaaaagagtttcacctgaaactcttggcttgaccagccattcttctctctttaatgtctccagctctgcttctttttagattaagaggcagaatgaaaaatctcttctttagaagaagtcagtaaaccaaggatcaaagcccagattggactttcgcactcttaccagcttgctgtttggctaggggtaccaatcaccacccttccctctgactgcgagtgaatccacactggttcagagccttatttctgggttcctgtctgtactctcaaaaccttctttcaggagcaagtataataaccccaccagatgttctgtgtgttgggttgccgagaaggtggaagtttttttcaacctcattttaagctgttagaaaaacactcagtagattgaatttggtccaaagacaccaccatcccctgagggatcccatgtaggataaggataaatgaagcatccatacaggggtcattaatggctgctcacatcttagagaaggaagagtctgggtatcttggttgccatatactctggtggaacagtggccagtcattaaaatcacatgggtgttgtcttctgcggtgtagaagacagtagtagtagttagggtttcggacgagagctggtgaaaagctaccggctttggagccctggctgggagagctagattggacagttttaaccccgtggctcaaatgctcagctcctgtcactggtccttggttgtcaccattcccatcacactagatggggacgtgaatggctgcctgggcctgcctttctttcgggtcttgaagaagtgtgctccaccaatcctacctctctgtggcactggatttcctggatttattttgcgaactagggcaggttctccctcgccaccccgtatacacaccagttagcttcccttcccttttcctttccccacttctgtatggctccagggatcgtgaacatgtgcgtggtttacgatggggaggtggtgggaggggcagggaatctcggagggcagggggttgggctggggaggtgacttgcattttcggccttagaaatgctgcgggcatgcacgt

SEQ ID NO: 10600 - DNA, 1054 bp, Homo sapiens
gattcctttgtttcaacattagaaacccggaacaaatgcaggtggaaaaggtgagcaggctgcgtgcttccttttcatccgcttgcttctcttttgcgtccctcttcctttcttcctagacgattctgcctcccagactcagcagcttcccaactctcaggttctgtggcccgatgaagctgtctgcctccgaaagaagaagagacattctcgtcctgacccctttgcccggctctcagacttgtgccaccgccagcttccggaagaccagacagcgattctcaacagtgtggaccacgatgacccaggacatgccactttgctgtgactccaccccactctaggtgtccccggggcgaggttgctgggctcaggcagggagggccactgtgtgggggtgtgtcctcctccgtctgccaagggcggcccagacctttgtcctgcatgccccctcttttgccagagcgggtgtctccctccagatcctggccgcctgtcttcaggacggagggtgggcacaccttccacctgtgggtcgaggtcaggaagtggattggagactgggcaacacctgtctcctcccctccgccccctgcttcactaggttgatttttctcatctcttccaatgtctttggaagtgaagaggaaagcaatggcttttactgctctctgcttctgtttcagtttttcaagtcctggaagaaggctggacttaatgtccatcttccacaccccacatatatatagatatagatacagatgcatatgtctgtagtgtgtgggtttctctatgtgtgtatatatatatatatatatgtacattgaggcaaagtgctgttgctctctgtggtcagtggaggcaggaggaggagggcagtggccagctggggtttgcgagcagggctggctgcacgttggccaggtgcctgacatctgtcttgggggattctttctcccaaaacaagatccgtgtctctcagctgaattctccgtgtgtctcctaccttctcccacccagagcagaaatggggccttgctgtgattaccggctg

SEQ ID NO: 10601 - DNA, 1155 bp, Homo sapiens
gacttgggcaggaaaggaggacgttcagctccttatggtgaaacgagagatttggctccatctctgctgtccctgccagctctagggtacttccgtacctgagatgaccaggatgcgaatcttcaggacgttgcatgcctgtactagaaggggagaggatctgaattttgtagtaataatccctcttcctgcagtcgtattttatcctcaagttgccttcacacctgggctctccttttgtagagacactggtgtgaggcaggaaatcccagactgggagcaggcagctgcgttctggtttgggcactgatggcaatatccacgtaagcgggtctctctaacccagtggatcagagctctttcatttagagaatgagaacagtatgtgtgctctgtgtagctcatggggttaacatgagaagagctgataacgtgcatgaaggtgctttgcagaaggcaaaaccctagataagtatagattactcttgaagtcattatccccatggggacaggcatagatgttttcttctttacaccctttggagagattgacttctgtagactctcctctcttcttcctcttcgtgacgccatccaaacctcttcagtgctagagttcagcttggagcccgagccttgacactgtctgttctacaaaggcagggtgaaacacttggggactgaaggtcggagcaggtgaggtcccggggaaggatgggctcatgagtgctccccaccctccctgcagacatcttcccgcagccggacctgaccgaggatgggctggcgcggcctgtgctggcgggaatcgtagctaccatctgcttcttggcagctgccatcctgttcagcaccctggctgcctgctttgtcaacaagcagcgcaagcgtaagctcaagcgcaaaaaaggtgggtgtctgtccccttcccttgctctccctggcccggtttcaaatgccccccatcaagagaggtggaccatttttagcatggccccccttggaaatagggacattgagatcttgtgggtagagctgccagtgagacttgatttgaaagtgggggtaagaagcaggggtggtggggagaggctgctggggcccaagctagcatgaaggcaggggccaaagatgcccactgtgagcagctccttc

SEQ ID NO: 10602 - DNA, 1047 bp, Homo sapiens
acaactgccaacgtgtcctgggaaccaggctatgatggaggctacgagcagacattctcagtttggtacggacctctgtgagtcaccccggcatgctttgctctctgcttctcccctccccggtcttcctgcaggctaccccgggtggggggaggtaggaggaggctgcagttcctggcctgccagccctgcacagactgaggtgggttgagacagtgatgaggtccttgtgggtgacgggaggggtctgaagggactctgggcatggctgtgtccctgtggcctgaggggtctgggcctctctgtgccctctccctgctcacgtgctgcctcgttttgcgtcctgcttcatcctctggattcctctggagcctggaagagactcctgcccttcaagggctttgtgaaattgcccagccttaagtgtagagtctagtttttagactaattttttttgtatttttgtatttgtaatttttgtgggtacatggtacatacgtttgtaggtatggggtacgtgagatattttgatataggcatgcagtgtgtaataatcgcatcagggtaaaggggtatccacccctcaaacatttgtcctttgtgttccaacaatccaattatactcatagtggtttaagaatgtatgatacattattgttgcttgtaatcctgttgtgctggcaaacaccaggtcttactggttctttctcactatgatttgtacgtgttcaccctccccacctcctgtagtctagtttttattctgtcttttccccagaggccacagaaactggtgtggagaggtgatgctcacttcccagccttggggtcagcccctgcattttctctctaggaccatgtgtttctcgattgttttcattcctctgttgtcagtttagccagatgcagtcatatgaggtctttgcgcaaaccttagggtagatacagatctcaaaaatgtgccaagcggggtgagggcaggaggcacaggaagggaggagaaggaagcctagctgactcctcccacccccaagggctgcccctccc

SEQ ID NO: 10603 - DNA, 1665 bp, Homo sapiens
atacagtttggagcaagagtcgaatggcgagattgagcacgtgaccaagcgggccatcagcacccccgagagtgagtaactgatcggaacacgtgggcttctcctcagtctctcctgcattcgtgatgtgtttgctagagtcgcagtaaaactccttccggtgcaggatagttctgatggtcagaaccatgagtgcattgctgaggtggagtatttcacagtgaccacggtcgcttgatccatgagcactgaccgagtatgttgttccagtgtcgttacattcagtcagtcaaacaccacagtggcccgcggagcagacaatgccgttgaggcacaggtaggttgggtgactgacccagtggtgccttctggaggcggccctccgtgtctctgggctgtccgggtgcactgggcgctgctgggtgggcctgctcccagggcgggcagacgtcagcaccagcaggtaccatgcacgctctgcaactgccaagaccagagacccggggacccctgctcggagcctgtgtctcattcccctccatgttttttcctactgtttgtgcttttcctttgatttcaaaacagaggtgagttaggagagttgagtattcttttcctattatcttgtgtgatagcttcatattgtgtcaaacctcataaaaaccattattttgagaaaactcttacaggaagaagaaatgcttcctgtcctaaatctgtggagtagtggctaggccctgccgccgtgtccctgtgtgcccctcgctctgcgcccggctgtgcacagtgccctcagcaagctgcatccagccccgctcgtccctggccattccactcctcactgtttccacagaccacagtgcctggaacctgggaggtgtcagagatctcctcccggagacttctgggagggcagagctgggcgctgagcccaggccttctggtcccaactcttgtgccccttctccagcctgtctcctagtcctgactgcaggggaagatgagagcgtgctaaggtgctcttcctggtaacagagcagcaaggtgtcctgccgttcgtttagtcactgcttcagtcagctcatgtgtgtggagcacctgctgtattctagctacttgcttgtttggttctgtcacactgatgctgtgatctcttagaatagttaacaggttagaggtaattttcatccaggtccccctttgaagggagtttatcccacccccaccctcagacgacaaccgaatcatgacggcatttgtcattaaaggcagtgggtaatttgggatcctgcgtcgtggacaggtgcgatgttctgtgtgttagagcttgctgtgtgttcgatgttcctggctcaggagtgccaagagcttctattttggcagtgaggtgccatatgctgaagaaacggggagaacgcatctcattttcgttgtgctcatcctgagtccctgatgtcagtgttgggttgtttcctagcagctcgtgtttctccacagggcagcctggcgtggagggttcatgccgccctcatctgcctgtgtggagccacgctttgtgctggaaatcaggcgcccggtgtcattgagttggtagagtacttgttcttgctccaggctcttggacataatattcctgctgatgcagtctctgtccgtctctcttta

SEQ ID NO: 10604 - DNA, 1032 bp, Homo sapiens
agtatcacactgttgcccaggctggagtgcagtggtacgatctctgctcagtgcaagctctgcccccctgggttcatgccattctcctgcctcagcctccctagtagctgggactacaggcaccagccaccacggccggctagtttttttgtatttttagtagagatggggtttcacagtgtttgccaggatggtctcaatctcctgatctcgtgatctgcccgcctcggccttccaaagtgctgggattacaggcatgagccaccacacccagcccagcagtctttcttaagtacaaatttgatcattttattatatctgaaacagactaaaggcaggttgactgtgaggggtggcaggaagcttttgggtgatagatggtgagtggtctgtagtgctggttattccatatagacttttgtcaaagctcatggaagtgtttgtttaaaatgggtaaatttattacatatgttatacttcactagtgaaatctttaaaaactatgctggtggcttcctgtcatcttctgaataaaccctgattcttctttttcaaggtaaacaagaacttctggtgtgccttccacctttcccatacctccctccatcctcacctctaacctctccacttcaaattgccatctgcacctcagttgcgagctgccccctactcgtgtgctcttgcctctgggtctaaagtctgcagcgccctcacccacccatcctcccttctccacacatcctcaggatcatccatcagatggccatgcactccttaggcatcccatctccatacctaaattccctaacaccctgccacttaacacctcttcccttgagacacacactttctagaagtggctggagggcagggatgcttagcttcattttgcatcctcagagggttagctctttgcctggacagagaaggtgcttgataatacttgtcaagtgaatgcatggaagccacttcttaagactattcctgaacataacatctgctcacatctgggtttattaaattgcttatttc

SEQ ID NO: 10605 - DNA, 1045 bp, Homo sapiens
gggtgtggctgggaacagtgaggcttgcccatgatgacgcactctgaaacatgccggcttctctctgcacaggaggaatttgtgaaatggaagggctccctgttcttccgatttgtcagcactctgatcgattcacacccagacattgccaggtaaatcttttcctcacgtcagacgactcaacagtttacctcatttctgatgtatgctggatttctttttttttcagattggtttagagttaagtaggatttagtgagctttcggtaggtgccaggaaaattagcagatttttaagatgctaagcaatataacaaacctttgttttgcacacaagtttaaaagaaaatggttagattcatcattgaataatctcagcattgactgcacttgctgacagtgtttgctgttcctgaaggagcttgaagaatattatatgcttgctgtattacactgtatagagtagcagccactagaaactcactgttaatttctaggcaaaaaaaaaaaaaagttaattttgataaagagctgagactttaattgcagaaattttaaggaggaaactaggaattaagatgaaattgcacaatgtggaatcaagtgtacagatgacaagactccttggaaatgggcatttcttcagacttctgtggcgtgggggagtgactttggcaattattaatttctatccttgcatctttttttttaaagatttttttcaaggggttgagaaatggtctgatagaatttgctaccctagagtttgttgtaacagtaattctttttcaagcaagtctgcagttggaaagtagaatgctgaatgccatagcaaaagccccacagtggggaagaggtctttacagagctcattaactataaatggctgctaacagtgggtccctctggatctaaatatagccaccaataatttaccctgagttccgtggaagtttctgctcagttttctttaggtgtgattttccaaggaggggaacatttcacataacaaaccagtaaaactaacattctacttactgctttc

SEQ ID NO: 10606 - DNA, 1050 bp, Homo sapiens
ctattttcacaaaataattattaatagcacccccttttacttgcagatgtgtctagatttagatgataaaattatatgcttgccctaattttggatgagtttcattacatagtgactaagtttttacaatagccatgtatttttatgaaacgaaaactagtaacattgttttaaatttgggggataaaggaaatactccattgacatgtccttaatctagctagagttcacttttcttttgccttatttttactgtaaaaccaattatctttgtaggtgaagtacatttttaccttaggggatatagcccagctgtgtccagccagggtggagaagcgcatcttccttctgattcagtccgtcctggcttcgtctgctgatgctgaccactgtaaggcatttgaaatcatactctgtagcacgcatgccgtttcaaggttctgtcggtaactttctctcccttctttgcagcaccatcatctcaaggcagcagtgaggccccagcgtctcagccacccccccaggtcagaggttctgtcatgccctctgtgattagagcacatgccatcattaccttaggtaagaaaaacatgggagaatggggcttgacatcgttctgtgtgtagctgttgtcttaagtaagcccagccatgggactgtgtcaggggctgcggagcctgtctgtgtctgctctcagccatgtggttcctagaggtggctctgatctgagtgctgagctctgcataactgcgtgctggtcatgagagccctcaggctgataagtcctcaagactaaggtactctctagagggtctagagggagcttttgtttttcagtagggttatgttaatttattacaattatacctgtttctgtaattttttttcaataccttcacttgacttgaatattcctgtaatattttaatattcataatgcagccccacgaagtctgttctgtgccgggcactgcactgagttctggaaatgaagaaataaattttccataaaaggaaatggtttatttagtactttccagaattggctag

SEQ ID NO: 10607 - DNA, 1123 bp, Homo sapiens
tgccgtaggaattgctgacgcaggtgtgtggggatgtactctccacctgcgagcaccgcctctccaacatcgttctcaaggagaatggaacagggaatatggacgaagacctgttggtaagcgactgcttttcctaaccattcttttcgcttccattttatccgtgaggttctattaaagatgactttgtcatgtacgctttaaatgcttttaacaaaagagctgtcttagcctagagcttactttctctttttagaagatatttttaaattgataacctattcatttttttcttatatactttttatcggtggggaaactcaatggtatacgcttcatctagttcagtcttatgagaagcctgatttcagtagggaaaacacagtatgtgttgtaaggttggtatagtcaagcttagaaatgtaaggtaagaaataataatgtgagtatagtgtttttggtttgtgtgtttgcttttttaaaaatttaacatgtcttctgagctatttgaacatcagacagtagaactggggaacagtgctgagcaattgccaagtaatgactgaaataaaatgagagatttgacaattcagaacacagatgaccttggagccccaagattgttttctgtggcacccctgctttagaaactgtaaacggtgcaagaaattcccgtgagccaggacgggacagtgggctgatttcagtggctgactggggataagatgtatggcagtaattctggttccaacatctgactttgtccagtaaaggaaataatgagctgctttttgatgccattcagcacagatcattatttaaccaaaacgggccatttttctcatatgtttaaattagtggagcacgtcttttctgtgttcagtttctgcttgttggcctagctctcctaacgcccagtgatcaccgaccaagcttagatttgttcaaagagaagaccattgagcctgaggcactactgtgcacgtgatcaggaatacagagcctcactatgggaacctgggtgctttaggtaagagcaccagggagtgtagcacaggcttggcccagggcttctagagggtcttgctcttctcatttctgcccacattaagaaagatgctta

SEQ ID NO: 10608 - DNA, 1034 bp, Homo sapiens
tgtcacacctcagttgggagctcttggtaatgcatgaggtcacccagagttaggttggagataagaggactaagaatagagcttttcaaatcagcaattagttattagaagacaggaattagttacaggagatgaaaagagatccaactggtggaccagagtctcagcgcaagagtagtcagtaacctctggtggaggccatggagacgggcctgaagcatggccgttggttttggtactaagatagaagttagtgtgttgggtcacagtctgcccaggtggggaatggctgtggccctcagctgggctgggaggctggctgggagtggagggctgggagttgtcaaagaggagccaagtttgagatttctgcaagttcagaggattttttcccaattctgttggctacatataataaacattacttaatattttatatcgttatttttaaataaatttaaaaatacttgttcattgcttatatcttgtggtatttggacataaatcagacataaatcatgttgtaagctaactgtagtaagacttgacatctgtggatggatttttaatcaatagctgatatattagcaaaacttcatttatatgcatatgcttattatggtatatagatgtgtttattttgttacagttaccttattctgtatgttttgagaatttcccttctaaaaacagtttaatgaggaattcctgatgttcgcgtgtgggtatgtatgtgtatgtgttttcccagaagtctaagaaaaattaatcaagggaagaagtgtatttttctcttcatttaaatatataatatggcattgtctcatgaatcatatgatcccattcagtgacttgggaagaagtaaaataagagatagttctaaaacaacagtgacagccaggcacagtggctcacaactataatctcagtactttggaaggccaagacaggaggatggcttgagcccagaagttcaagaccagtctagacaacatagtgagaccctgtctcaagaaagacagacaaagagaga

SEQ ID NO: 10609 - DNA, 1715 bp, Homo sapiens
ctgtaattttttttttaaagctttttcctaccaaaggcagacatctaaccgttccgaaccctcaggggagatcaacatagacagcagtggtgaaacagttggatctggaggtatgtcagattttatcactgtcagataggtaatactgctggatttcagacaaccgtaagtagagtctaaaaccttggatttttttttttttttctgatttattcacccctaagagttgaaacagctggctgggcgtggtgactcatgcctgtaatcccataatcccagcactttgggaggctgaggcctgcagatcacttgagcccaggagttcaagaccagcctgggcaacacatcaagaccccatctcttaaaaaatatatataaaaatcagctgggcgtggtggtgtgcccctgtggtcccagctactcaggaggctgaggtgggaggatggcttgagcccaggagttccaggctacagtgagctctgatcataccactgtactccagcctgggcgacagtctgtttaaaaaattaaaaaatgaaaataacactgcagggcagtctgcttttttgtaccagcttagttactaaatagctgcatgatctaggggtatacctgtcgttttccggttgtaacaccctcccatctttcccagacgactgttgggaaagtctgtagaaacaacatttaagaaagtgatttaaagagagagagacacagataagagagagaaagagcatgtacgtagaggattaattacataattgggtttattaatttattcaataaaccttgatctggtccttcccgatgcgttccaggcattggagatgcacaagtctgtgagacagagctccatctcttaaggatcagtggagagacaggtgcttgtgcacacaagtgttctcatatatacaattgtgcacacatgtatgcggaacactgagataggtgccgagatgcacagaaagcgccctgaggatgattacattactgcttttattattcagcctagaaggtcagcgtgaaattgggttcaggaggctagatattagcatgtattactccaattcagagcgataactacatttataataaacaggttttctaaatgtggtaggaaaatgtactctggaaaaatgctgaatgtttgtgttggctccagacttcgtctaaacaggttacggatttacggtggcacagactttttcaagcaatatcaagttgaggtgatttaatgatgcttaaaaattatgaaagttcggggacgcaaagagcccatgtttccagtgcattgttcataagctgaaaggacatatattgttggcattaattgtacattaaaaattttgtatagtcacttagatgcactttgctctctttgctttttcttattaaggcagagttcacacaccataaagttcaccatggaaagtgtataatgtagttgttttagtatagtcacaagattgtacagactaattccagaacattccatcagctgaaaaataaaccccatagccattagcagtcactccccatgcccctttcctcctaacactggcaaccagtaattttctttccttataaaattgcctattctgggccaggcgtggtggctcacaccggtaatcctggcacattgggaggccgagacgggaggaggatcacgaggtcaggagatcgagaccatcctggccaacatggtgaaaccccgt

SEQ ID NO: 10610 - DNA, 1054 bp, Homo sapiens
tcttacctgatgacttagctactctgcagcagctctcaaaactgcacgggaactacttcacagttttctacgatgacattttatgtcttcactcttcattctactgaaaccactcttatagcgtgaggtagagtgttttaataactaggatttctaaatataggagtagtggtttttggggacagtcgctgactgtattgtgaacagtagatgtgtttttcttttacaaagcgcccttgtggatgaattaaaggagagtatattcccagtcgtccgtatcttactgcagcacatctgtgccaaggtactgtttgccttagtaatattaataacatggaagtatatcgtgtgtgaagataaatgtgtgtgtgtgtgtgtgagtgtgggtatttgttcttgggaatgagtgtgcattgttacttaaagtggttttatttaatgttcactagatggtcccctagacaaaagtgttctataaaaaacaaaaaaacaaaaaaactttgttttggaaaaatgttgaacatacacacagaaacagggaaaataggctggtgaaccaccacatacccatcaccgagttccacagttttgtgtcacttaaacccctaccccacatcccccaacatgtgtatactggattgtgttttgaagcaaattccatcatatcctttcacggtaattccttaatattatcaaacatccagtgttcaaatttccatgatgatctctacatttttataaccatttagacaaatgattcttaatttgaaccttatgaaacctggggatctaaaaactctctgaaattgtatactaaatttgtatgtgcatttttctggagagatggtttatagatttcctttagattagttttgaagtgttctaaaacctaaaatttattagtcatttacgtaacatttaaaggtcattgaactagttgtactcactgactttcaacttatattacagaatatgtttcagccatcctgcgggtggatattggttggtcaacttctctttttgcttttcaggtggtagataaatcagagtatcg

SEQ ID NO: 10611 - DNA, 1027 bp, Homo sapiens
tgtaaagtatcgttctttccccttttgaataagggaacattagtagcattctttgccctatgtaaatgacagttaattccctatttgtcctaaattctgggttatgatatgcaaagggtggggagagaaactaggtattgtttttatcagacatatcatctgtcagccattctttcacactgtttacattgtgcatttattgtatcctgctcattgtttaagaaatatatccctagtgttcagccagcaattatgccagcctgacctaccttcagatggcttgaaatggtttactacagtctgcatcactatgtctgagacccttgtgttctccatccgatcttaaattgaattttcttttctcttctaggtcatcagttgtgttttccatcaaatgctcagtgtaatattaatgttagaagttggtgaaggatcccatcgtgccccccttgctgttacctcccaagtcatcaactgtagaaaccaggcggtccagtttatcaggtgaagcacacaaatcgtgaattttcaccctgtcagtctccctcagtactctgggccctgcactaagatttctgatacatgtagacttaaaatttctggcctgatggtggttttgggggtgaaaaccaagcacttcgtagctaatgtgctttatgtgtctgggtctctgttggtaggctcccagctggggcactgttaaagagataggaatctgcagaacacgggccagcgccagcctccagcttgtttgcgctcaatatgtgggtcagcctcagagagaggatggtggcctctcctcctttcccttgtctgcttcattgcagccagttcacctctttcccttttctgttgctctctactttgcagctctttgcttttgttctttgccactttcttcttgtttctttgcacttttctattcctttccctctgtagaaatgacttgaaggaaaggattgagttgctttttacctccgtagcaataagtgttagactacttttcctctcatgggtcactcagctt

SEQ ID NO: 10612 - DNA, 1047 bp, Homo sapiens
accatgggacaaagtgtttggcatttattacagtcacctgtacatttcttcataatctagatggatgaaattatagaagaacaagaagatgagaatatttgtttttctgcccgggacctttctcaaattcgaaatgccatctttcaccttttaaagaattttttaaggcttctgccaaagttttccttgaaagaaaagccacaatgtgtacagaattgtatagaggtaagtgaaaattccaggaaccttagggcaacttcaaaggattagactatggctaatacctgatcagtagaaaaaatcaggccttttcttcatatctgttttctaggtctttgtttcattaactaattttgagccagttcttcatgaatgtcatgttacacaagccaggtgagccattaaatcttccagtgctacaatttaagtatagtgtaccaatttttgctccagcagaaatggaaataccattttatcccaattggcacacaggtagaatttattcatttaaacatggcttgtaggactaagaaatattccaagtaaaatcatatccattaactaatatttcgtcttttttttttagagctcttaaccaagcaaaatacataccagaactggcttattatggattgtatttgctgtgctctcccattcatggagaaggagataaggtaaaggagatgagaacctaatttggttactagttgaatcgaaggcacatgaaccatatgatggaaatatgttaaaagcatttgatataatgccatttcaatttactagctcattttcatgaccttatattatttgcataataaaaagtatcactatttctatttgctctctgttctttattgccaactttatatctgaatacttggtggctgcagcaaattattgttaggctccagttagaaaaaatggttctgctgtgaatgaaataggaggaacagataaactgctgaacagttacttctataggaacagatgagctgctgaacacttacttctataggaatatttcccaaatcattctaaaaagtagaa

SEQ ID NO: 10613 - DNA, 1032 bp, Homo sapiens
gtgtatacctatgtaacaaacctgcatgttgtgcacatgtacccaaaaactttaagttaaaaaaaaaagtttatccaaaaaaaaaagaaaaagaaaagaatgggaagatttagagttaagagagattggtggaatccagccagcgtgctgtcttaatacccctcctctcaatgtacattctttcaatcagtgtgttttaaagtcaccaagtattcctgggagtctgaatctgggttgcctcttctattttaaacttcctggagaaattatatatgttttttaaatgctacatgattgtccaagggcccaataaagtgctctatattttatttccacttattaacttggttatgatattttcacaaaggaacctcgtgggcaatctgattaacctctgtttcttctctagattgaacatgtgggaaagcctgatcactgaatgttttgaagtgtcctttcccaaaactcttgtatctgaaaagtatttcctcctttatatttttagaagatgattagcttaatagtcagtgtcagttgtgatttaagattctcttaaccttttctggttttcttttattatgctacacctatgttattaaaacaagttaaatgtgaatcgtgactagtaaacttttctcctcttgaacacacctggaatctaaaggtgactagtttttttacttgttacagagtacttacacatttcattgcattttcccctagaatgggttgacacagtgtgggaactggatttcacagagactgagcctttggatcccagcatagaagcagagatcatagagactggattggctgcattcacaaaactctatgaaagccttttaccctttgctactggagaacatggatctatggaggtaaaaatataaaaacaaactagccaaagtttggtgttagaagtagaagatgaaagtcattattataatctgaagcttagctttcttggtgtacagttcacagggagtacaatatgagtaacataaagaatgtggttaatttattggaatatcc

SEQ ID NO: 10614 - DNA, 1050 bp, Homo sapiens
agggtggagagagagttagaatgaaggcgaagtttcctacgcacataaagctcagtgagaaagcaattccaagagtaatggaaggaaaacgactctcgggaattcagtttgaacactggcgactgagcccataaacatctttctggaatgaggtttgcagaagaaagcagcggtctaacctgtggtagcctgtgactctgacattaacaccagagcggtgggtctcaaagtgtggttctcagacaagctgtggcagcctcacttgaagacttgttgcagatacaaattcccaggcccacactagaccctctggagcagaagctctggggttgaggcccgcaatctgcgctcccatgccctccaggcgattccagcacaggctgaggtttgagaagggtgctgtgaaaggggcagggaagccccattatataatgtttccagcaaggcagcctcacgttgcttcaccgaagtcactcaaagaagcctctgcccctcctgcttttccaagagtcgtgtcatttcaagacttccgcactggctgtagagagtggagacagccaggctccgagcccgaccccaacggcttccatgtttcctcgatagaatgtctgtgactaccaagaagatacccatatagtgatggtttattttattgaaaaatacactagtaatattgagacaggtatcttttaggccatctggctgataatcaatatagagctactgatgaccatactggctcacatttgccttgtccatcactgttcttggatccctgagaaccacgtactcgataaccttagagaaaagccccggctgtggttttcaacatgctttctcatccattatctcagttcacccttctcgcagatctccagaggaaaagggcagcagcagagcgatctgaggccccccgaaagggacgaagctgcggctctggactccaggcccctgccagaacagctctgcggaacgggagggaggaggaagcctcgagacagacagggcttgactgcaccctgaggcccaggaggcatggggacagagagt

SEQ ID NO: 10615 - DNA, 1061 bp, Homo sapiens
gtggatatgcaggttgccctggtggggtctggaaatgggggctgcaggcttggagggaggcctcagtgtggcttggaacgtggtgtatggtggtctgccgcgaaggccggcctgcacaggggtgggaggggggagcttctgcatgggaagcacagacagcgctgcctctcccttgcactcagctctcggggcatgagaggctgactttccgtgagcctgtgggccaggcctctttgaatggggctgagggagctttgccctggttcctttgtgtccccacggtgccacgggaggctccctggcagggtgtggggcaaggcagtgagtgaagagttgggatgagtgagttagggcccacggattactcaagacaggacttcacgttgattcaggagcgttagggagctgtgattggattttgagcagggcagggatgggacagaagagtttggggaaggttcctcaggcatccgtcacggaagggataagaagggagagagagtggatgccggggacacccagaagctgttattgtagtcaggatgcgacaggggtgaggctacagacaggggacttgcaagcagggagggcagggtgagacattcagaggaaacgacgacaggaaatggtgacagatagggaacgaggatgaagggaagggagagccagtgacgactggcagtggagtggggagcaccgccacctctcctcctccacttgccccctcctgtggcactggacaagcgagtgggcttttcgttgtccgtgggcttttttgttggggatgtgaccagctttgaacccttccccttaaacatgctcctcctgcacggaagagacaggggcaggggagagactctctccccaccaccccatctcaggccccagcacagcccggcctctggcctcactggcgtctgtgcccagtgacgcaggcaggtgagctcctggcaaattagcattccaggccgtgctctctcctcctgctctgctgcagccgggagtgtgcagagactggaggggatgacagtcacctcccaggctgtcttcagctgtgccct

SEQ ID NO: 10616 - DNA, 1049 bp, Homo sapiens
caatttggagacgtattttggaaggaggtgagtttggaggaggagagtagtcttttaaaggagagaattagaagaaagatggcgtatttgaagggttggctgtagaagaaaacaaatgggatgagagaagcagaaacagatttttaaatctagattgaatagactggccagcagaagaaaaggatgtttaacagtctttcaaattcatattgagagttgtatatatatacatatacacttagtatgagccaggcactgtttatgttactagggatacagcagtgaacataatagataaaaacccgctgcctttagtgagtttgcatattccagtgtggagagacagacattaaatattagatggttataagtgttcaacttttttttttttttttttttaagagagggtctcactctgtcaccccagctggactgcaatggcgtgatcatggctcactgcagccttgatcccccggtgcaggcgatcctcctacctcggcctcctgtttaactaggactacagacatgtgccaccacatctggctaattttttgtagagacagggttttgccatgttgcccaggctggtctcaaactcctggactcaagcagtctatccgccttggcctcccaaagtgctgagattacaggcgtgagccacttcaactagccaaggttgtaagtgttaatggagaaaagtaaaacagagaagagggatgaggttggtagagtggtcagggaagacttcatcaagaaagtgacattttagccctgaaggaggagagggagtaagccacatagataaatggggaaagaacatcatagcaaagagaactgtaggtacggggactctgaagtagaagtgtgcctggcacgtttgaagaacagccaagaggccggtgtttttaccgcagtgaacaaggataagagtagtaggtgaggtcacagaagtaatgaggttggccagatcatacaggaccttgtcggcaattttaaagaccttgaccctctgagtaagatgaaaagtcattggaggcttttgggcagag

SEQ ID NO: 10617 - DNA, 1064 bp, Homo sapiens
ttttttttgagacagggtcttgctcagtcacccaggctggagtgcagcggcatgatcacagctcactgcagcctcaacctcccaggctcagatgatccccccaacctcagcctcccagttagttgggaccatgggtgcgcaccactgtgcttggctaatttttgtatcttttgaagagatggggtttccccgttttgcccaggctggtctcacactcctgggctcaagcgatttgcccaccttggcttcccgaagtgttaggattacaggcgtgagccactgtgcccagccttattttctgtttatttgatagtaaccgtcttaatgggtgtgagggagtctcattgtggttttgatttgcatttttaaatgttgagcatctttcttgtgccatttatatatcttctttggagaaatgtctattcaaatattttgcccattttaataattgggttgtttttgttgttgagttgaagttcttttttgttgttgagacagggtcttgctctgtcgcccaggcagtggcgtgatcacggctcactgcaacctttgtctgctgggctcaagctgtcctcccatgtcagcctcctgagtagctgggactacaggcatgtgccactacacctggctaatttttgtatttttggtagagtcagagtttcgcgatgttgcccaggctggtctcaaactcctgagctcaagtgatcctcacctcaccctcccaaagtgctgggattatagatgtgagccaccgtgcctggctatagaagttcattatatattctggatattaaacctttgttagatatacagatgcatgcaaatattttctcctgttccatagattgcctttttattttctcctcttttttttttttttaggggcagggtatcactctgtcggccagggtgatcctcctgccttagcctctggagtagctgggattataggcatgcaccactatgcctggctaatttattttctttttttcatttttttgtagaaacagggcagatctcactatattccttaggctggtcttgaacttctgacctcaagtgat

SEQ ID NO: 10618 - DNA, 1025 bp, Homo sapiens
ccaaggtttcaccatgttggccaggctggtctcgaactcctgacctcaggtgatccgcctgcctcagcccaaagtgccgggattacaggcatgaaacaccacacccggcccgaaatccctttttagcgtttgcttccttggcccagtccagacctaagctatcttaggttgagttctctgggaaacagactgtacagtggagatttgcttgcaggaattttattgggaagtgagggaacttaaactgggattcagttgcagcaggcctcgtccaacacgatagggatctctgaagctgggatggctcttcagagatatcctgaactgagcaaggggattggatttttgtgtttcctcattgaccaggcactggatatgggctgtccctgaggaatgagaggcagaaacttgggtgaggcagttcccttgtctggggattcaactacaagctatcagcaggcagcattcctggcagttggcagaatgagcccatcagccccgaagagcaagatctgagcagtaaccctcagcagccactaccattcccttttagaattagctaagaagtggccgggcgcagtggctcccgcctgtaatcccagcactttgggaggccgaggcaggcagatcacgaggtcaggagatcaggaccttcctggctaacacagtgaaaccctgtctctactaaaaatacaaaaattagccgggcatagtggcgggcgcctgtagtcccaggtgctcgggaggctgaggcaggagaatggcgtgaacccggcaggcggaggttgcagtgagccaagaccgcaccattgcactccagcctggacaacagagcgagactctgtctcaaaaaaaaaaaaaaaaaaaaaaaaaagaattagctaagaagtgccctggccccttttctctgaatggaaatacctgatgttttacgaagtagagctgaagtctagatacaaactattcaattttaatttgaggttactgttttaatttggggttacaattgttttaaaaaaaaaata

SEQ ID NO: 10619 - DNA, 1025 bp, Homo sapiens
agttcccttatagagattcctatttgaaaagttaagcactatgattatgatgtttccctttgtcttccgaatcccttcattagtgagaaccccttcattacccttacaggtaaatgaatctgaactcctctgcgtgggaaatactgatatttcaatagcacacagaaaagctgagtaaaatcttcttgatggattttgttttctattttagatcctaaaataagcaaaagaagaccatcgagagagagaaaagaaagttctgagcattaccaaagagacatacagacactcatcctacaggtaaagaatgtattttggcagaccaagatggcttttatccacaggtgcagctctatgtcacataccctcagtgtcatgtgataagtatctccttgcacacaggttacatctaagcatcatgtggttaagaaaattgagattgttcctaatttctaagagcttatattttgaaaccatccttttctatttgaacattcttaaggtgctactctgaaccttcaattcaatatactaagccccatccaccaaaaccattacaaggtaagaattcactggcctagggatatgcagagattgcagagggaagcttgtctatgctgatagatcaacatttgatggtatattcatttatttagtgcttaggttccaaagtctaggaaagtaatgaactgttctcttacctcctggttatgtgtcatttggaaccatgatttttcatctagttgcactaaagtttctgtccttactgtgttaaatctctgttgatttaaatgacagtttctacctttggccagtatctccatgtggagtcatgacaaccagacacagagaaggaaattacattatattcattttgctctgctttttgaaaccaaaaactaagaaaagagtcattttgcttctgtgcaggaagggtgtcttaaagggagacagtcaagggagatagtgaaaaggcaaaaatcacagggtgagaaaactggattttgtagctttgtttgtgtgtt

SEQ ID NO: 10620 - DNA, 1085 bp, Homo sapiens
ttggcgggagaggcgcagggacttgggggcacttccccaggccctggtgaccgtggtcatctttgtcacagcctcctcctctgcccttgcaggccaaggactggaccagtccctctcagccttgcctctatctctccctgcctgctcggcagccaacacagaaacactgctgtgtgcttagcccaggggtgggagggatttctgcccagggattggccatggaattggctgcttattttggcagctcccaccacaaagaccatcagacgctgagggaaggcgaggtgggagttagtgagtcatggccatgcctcagggagggagggagctttcaccagaggtgcccctggaggaagcagacttcccctccaaagaagaggggtgggactctggatgcttcctcccagggtcactggcttaggtcaactaaggggatgagcatccccgtggcgttctgtgtaatgggaataatggccctgacctcacagtgccgtggcagcaagttgaaaagctagcacatcaagctctcagtgaagggttgctttcctttccttggtgtgccttaggatatgacggggtaggcaccatgggtgcagacatggaggaaaaccagaagcaaatcaggagtccagctgcccacatccagtcactcttgattctcgtggtttctccagtgcccagctgaggctggccatggtgggaaagtgggactttgctctgtgctgccttctcctaaccctgtgttgtcctgaggccaggcagacaggccccagtcattacctcaccgcagggcccctgtctgccagagtgcatggtggagctgcctgggtggagagcggagctaattttagacctggagactctttgccaacagctgtggctgggcccaggcagctgggctggatggctggggggagtctcagccgccctgcagggagccctggacacagcgctccaggtctgctcttgggggcatattcctgcctcagcctcagctgtggggaagcctggatgagggtccctctgcacagagggtgcttccttcctccctcttgcatcaagatatttctgtcctccatctcctc

SEQ ID NO: 10621 - DNA, 1045 bp, Homo sapiens
ccatgctaacactaataaaaagaaagcggaagaatagatgaatccactgttagagttgaagacttcaacatctctctagaaattgacagatgcagcagccggaaaattggtaaagacataattgaacttaacagcaccatccgtcaactggatataattgacatctatgaactgcttcatccagcaatagcagattactaattcttctcaagctcacatggaacatttaccaagattgaccatattcggggtggtaaaacacaccttaacaaatacaaaagaatagagttatacaatgtctgatctcagaccacgatggaattaaactaaaaatcaataacagaaagataactggaaagtcctcaaatatatggatatttaaaaatgtgctttcgaataacacttatgtcaaagaagaaatctcaagagaaatgtaaaaatcttgaactaaatgaaaatataacctaaaatttgtgggatgcagtgatagcagtgcttagagggaaatttataacactgaatgcttatattagaagagaagaaagatctaacatcaatgacctaagcttctaccttagaaaactaggaaaaaagagcaaattaaatttcaaaaacagaagaaataatgaaaattggaacagaaatcaatgaaattgaaaataggaaatcagtacagaaagttaataagaccaaaagctgtttctttaaaaagatcagtaagattgataagcctctaagccatgctaactaagaaaaaaaaacaaattactaatgtcacaagtgaaagaggagacatcactacagatctcatggacattaaaagtataataaaagaatattatgggctgggtatggtgactcacatatgtaatcctagcactttgggaggcagaagtgggcagatcactttaagctcagtagttcaagaccagcctgggcaaaaccccatctctgcaaaaaatacaaaaattatctgggcatagtggcttgtgcctatagtcccagctactcaggaggctgaggctggaggatcatttgagctggg

SEQ ID NO: 10622 - DNA, 1028 bp, Homo sapiens
tctttgaaagacacaatctgccaaaactcacacaagaagaaataaaccatctgaatagtcatatctactaaggaatttgaagaagtaattaataacctttcaaaacagaaagccccaggcccagatgggtctgcagatgatttctactaaacatgtaaggaggaaattatgccatttctctacaatctcttctagaagatagaagcagagggaatactacctaactaattctatgaggccagcattaccttaataccagacccagacaaagaccttacaagaaagaaaattacagattaatatctcttatgaacatagatgcaaaaatcctcaacaaaatattagcaaattgaatccaacatgtgtaaaaagattatacatcatggccattttttctaggtatgcaagggtggttcaacacttaaaaatcaattaatgtaattaatcacataggcaaaaaaagaaaaattacatgatcatatcaatagatacagaaaagatatttgacaaaacctgacacctattcatgatacaaattctttttttttttttttaagacagtcttgctttgttgcccaggctggagtgcagtggtgcaatcttggctcactgcagcctcaaccttctgggctcaaacaatccttgctctttagccttctgagtagctgagattacaggcgtgcaccatcatgcccagctaatttttgtatttttgtagagacggggttttgccatgttgcccaggctagtcttgaactcctgagctcaagcaatctgcctgcctcggcctcccaaagtgctgggattataggcatgaaccaccacacccagcctgatttgtgatacaaattcttaataaactaggaatagaggggaacttcctcaacttgataagcagtatctacaacctacaactaacattatacttaatagtaagaaactcaaagctttcccattgaaatcaggaacaaggcaataggccgggtgcggtggcttacgcctgtaatcccagcactttgggaggccga

SEQ ID NO: 10623 - DNA, 1057 bp, Homo sapiens
tttattttttattttatttattttttttgagacagagtctcactctgtcacccaggctggagtgcagtggcgcggtctcggctcactgcaagctccgcctcccgggttcacgccattctcctgcctcagcctcccgagtagctgggactacagacacataccaccacgcccggctaattttttgtatctttagtagagacggggtttcaccgtgttagccaggatggtctcgatctcctgacctcgtgatccgcccgcctcggcctcccgaagtgctgggattacaggcgtgagccaccgtgcccggccaagtgcatttttaaatgaatttttaattttagaatagtttttcatttacccaacattgcaaaggtagtctggagagctctcactttgctcacacccagtttcctctattattggcatcttgcattaagccccggtacatttgtcatgattaatgaaccaatatcggatgttattattaactcaagttcatactgtatcctgaattcctttcagatatcccttttctgttcctagacctctgtagtcattgggtctccctaagttcctactggccatgacagatttaagcgtttttttgatagtgtcacttttgtgatatatatggcaaccttttttcacataactatatgttttgaacacctttctgggttagtgtgtgtggccttccacacccttttaactcaccacagtgttctgttgagtggctttaccccatcattttacactgcccttggcacagagcccccgtctggaagtgtcactgggcctgggtgctgtctggtggattagacagacgcttccactgtcttggaatttggacactgtgggaacagagaacatggatgtaaatgacctgacagagctcagagaaaaggagccacgtggcctggggcactgctgttgtggcgacccttcaccccacgccctccaccctacatccctcaccccacaccctacgccctgcgagtggctctgtgtttacatacaagagtttacatctgtggtggaagcactttctcacaaaagg

SEQ ID NO: 10624 - DNA, 1026 bp, Homo sapiens
gtgaggtctttgaaaccaaacagaattagtttgaatcccagtttagctacttttaagatctggggcaaatcatgtaaactctttaaacctcagttttatcgttaggaaaatggggagaatagtaccttacagggctgttgtgcattggaaattaattcattcatttacctaattcatctttccagctgaattatgagggtagaggggtgaaacaactgggctttaagatattaaggaacttgccaaaggtcacaagctaaaaagtggcagggtgggaattcagttccagatctttctgctctgaaagtggttcttacccatcttcaatcatccactcagagccaaacaaggcagctatgcgcagttgtctcttggtatccacgacggattgattccagaattccccatggataccaaaatccgaggatactcaggtcccttatataaaatatggtgcagtatttgcatataacctacatacatccttccatatgatttttttaagactctgggtctcactctgttccccaggctggagtgcagtggtgatcatagctcactgcagactccaactcagggactcaagcagtcctccctcctcagcctctaggaccacaggcgtgtgccaccatgcccggctaattgttgttgttgtaaagatggggtctgttgtgttgctcagcctggtctccaactcctgggctctaagctatcctcccacctcagcctctcagagtactagaattacaggcatgaggcactgtgcccagcccctcccatatactttaaatcatctgtagattacttctaatacttaatacaatgcaatagcatttgcagttacatagcattgtaaatagttgtcatgctgtgtatttttaacttgtattttctattatcgtattttttatttttatttttctgaatattttcaatcgctattggttgaatccacggatatgaaacctgcgggacctgtgtataccaaggactgacgatatacataatagatgctcagaaaatcta

SEQ ID NO: 10625 - DNA, 1044 bp, Homo sapiens
catgggatagagggttttggagtaaacttttatcctctaaagctatccatgcgtcttagcaacatctctgttgacccagctatacatgggttagatagagttgtatagagcagttccctctggtcctttgacccgtgattttagcaaatgtgtgaggctgaggactatagagatctttgaaactgataacagtgtcaaacaatgtaactggcctggttttccaggagagatgaactatttcagacattctattgccatagccagaccacatatcctgattttgagttcagaaaatatggttattaacacatcaaataaccagttgatttagtaaggtcctcacttttctattatcatacttttccctgtagacatagagctgtatgggatgtaaaaatcctgctcagtagtttaattggccatcataacggccgatgtctcattgcattgctgaaaggtaagagtagatcagtagaaattatcttatgggattgtgactaatagtatctgaactaaagtaggtattttgacaattttcctgaggcaggagaatctcttgaacctgggaggcggaggttgcactgagccgagatcgtgccactgcgctccagcctgggtgacagagcgagactccgtctcaaatagatatatacatatatgaattggagtgttgctttcaaaggctctgactgttttatctcaactttccaagaaatacttgcacattgtctgcctgcatgggaactcacttttccctgggaactcacttttccaggggatattctgaatagtcagctcttccatcctgtaaagtttcttaagtattgtaaaactaactccatatgtttgtatctttgataccttcagctgcattttaggtgcctttgcattaaaaacgtaatgactctcggagaagtcacacccccggttcaggaagaacagtcagttattcagagttaagctgttttcacagggaagattcagaacatcgccctctccccacccctgagtctaatggcgttagaaggatgtgcggtccttctg

SEQ ID NO: 10626 - DNA, 1091 bp, Homo sapiens
agaccccggggcttcttagccaatcatgtacgttcaccctggatcctcaggtcctttgcatgtggtggtgtacatggaaccagccctcccaggcctctccttctccctcgctttcctagggccctggtagggcccgtccttcccctcttgcatacccttgcccagggacaagccctttctaatggagccctgccccaaaagagcttcagaaagacctttccgcatctccccctgtaggtgtcacccccacacccactgcttccacttctttctcgggcttactctcagccccacctctcctgttggcattcatgagttgcctccaggctccctactgatggagggagcttgcttttggttggggtcggggttaaccctttagctccctgtctacccccttgtgatggacttgcgccatccgctgggttgagcagtctccacccagttacatctgtaggcgggcaacgttcgtttccacacgagcaagcagtaagatgtggagtgatgggtgaggtgaatctaactcatttggggccgacgatactactcccagcgtagatcagcagatgattggaacagattctggagatatatatcgggctcccttgccatttaccatgaagtgatgtgtgtgcacgtggcacattatctgcaattttactcagtgaaataaaactcttagcatagtgccttgtatatgataagcactcggtaaaggtgagctgctatgaatattgccattattacaactacttaggagcaaaagcaatacatcctgccgtgtaccttcggtaaaggtgagctgctatgaatattgccattattacaactacttaggagcaaaagcaatacatcctgccgtgtaccttcggtaaaggtgagctgctatgaatattgccattattacaactacttaggagcaaaagcaatacatcctgccgtgtaccttcggtaaaggtgagctgctatgaatattgccattattacaactacttaggagcaaaagcaatacatcctgccgtgtaccttcggtaaaggtgagctgctatgaatattgccattattacaactacttaggagcaaaaacaata

SEQ ID NO: 10627 - DNA, 1024 bp, Homo sapiens
cctggacagacggggagtttggggcggcatgaagctggagcgcggccagtgcagggaaggtgggagtagatccagagtttgatctggacgcccttgggcatctgggcaacaagaggacgtgggtttgatgattggcatgggatgaggcaggggggtgggggacaccagagacccagcggtttgccccattcctgggcctgcctggcagacgtgggtttggtgattggcatgggatgaggcaggggggtgggggacaccacagacccagcggtttgccccattcctgggcctgcccggcacagtcattaccctccctcttccgcgccctcctctctcgttccagctcagacttccctgtcacctaggcctcttgccaagtcccagctcctaaggctggtgcgattccatcccttgaagtcaaggattgcttcattgttctgccagacagccctttatcccttaatccttgttggcctatatttttgtttatttacaggacttaggttggataggaaaggaatgccttttttaacagaaaagtaaacatgtttttcattgtttatcgactttatggtcagtggggaccataagctccaacagatcattctgctctttcttggaaacaagattacagggctgttctcccagagggccatggaggttgggtaaaccccagagtggtaagtaactgccctaccaaaaagccatggagcccgcagatcagtgtgtttaggccctggggcctgtggcaggcagtgtgtgtcccaagggaagtataggcatggtgaggggagttgtagcagcccagagggcatcaccaaaggcaccttgaccacattccagccctgctttaatgagtgagcaatccgggccgggagcactggacgccttttcttatcatctgcgaggtcgaagggactggaacacaggcttccttgggtccttcctagcacggagtaatctagggatgggaaagccggctctgagcggagaatcccgggggctgaggacatcgctgagaggc

SEQ ID NO: 10628 - DNA, 1112 bp, Homo sapiens
gtccatattcatatcttaatgatactgagaaattggttaaattggtttttggtgtctgtctcttgcttatgaaagataaactgtagttcagctatttattagcattgagtttttctagaatagttaaatttttttgtttgtttttgagacagggtcttattctgccccctgggttcaagcgattctcctgacccagcctcctgagtagctgggattacaggggtatgccaccacgtccagctaatttttgtatttttagtagagacacggtttcaccatattggcccggttgatctcgaactcctgacctcaggtgatctgcccgcctcggcctcccaaagtgttgggattacaggcatgagcctctgcacccagccttaactgctttattttaataaagttgtaatatatttgagatggcaagaccattctcttcagactgttaatggtaattttttaaaattattttttatttttagactgggttgcacactgtcacctaggctggtcttgaacttctagcttcaagcaatcctcctgtttcagcctcccaaagtattgggattacaggcttgagaaaccctcttaatttaaggactgcagaagcttactttttttttttgcataagggcctttgatagtcattgtttatggctacaaactaatttgattttgactaaattatctgagttataaacttcatttatttccaccttagttattgtaaccatccttaattcatacacaaaaaagatgctttaaaaaattagtaaaacactctcgttataaaaattaggaaattagaggaggaaaaaggaaataaaaaatcacctgcagtcagtatctttatccagagataagcattgttactgtgtatgacacactggtttctgtgtgtttgaactctgtttttatagttatcgttatattgtatggttgtacagtttgcctgttttaccacatagcaaaagcattttcccatttaagatcttgaggtttttagattaaaaagcagcaaaatatttgtacacagtaatcataattggggtgtgtgtgtgtgtgtgtgtatgtatgtgtgtgtgtgtatgtataggggtgtgtgtatgtgtatg

SEQ ID NO: 10629 - DNA, 1075 bp, Homo sapiens
tgttaatatatgtaaagcaccagaacagggtctggaagtcaataaatgttagctattattaggtgtcagttattaacaaaagcttgaaactacattattagcgtagttcttgtgggttcctgtgtttaatgcttgcctggttcttaacctatattagctttctgtgtgtttaaaaaaaatctttatcttttgtgtaagtcggttttccttattcttacacactttaatgtatgtaggctgctctgttgtaaagaccatctgtcttctgctgggctgaggacctctgtgcatttccactctttgaccatctcaggacaggcacaacaaaaaaatgttaaaaacttagatgttgtcatggatatgtggatgctttacattgtgtgtgtgtgcgtgtgtgtgtaattttagtgtgaaaaatggtatcaggtttctccaaggcaacaaaaccattaggagattttgtatataacagatagatattatatgtaatttcaaggaattagtttacttggttgttggggctggcaagtctgaaatctgtcttctggttgagctggccattgggttgggaactctagcacaggagctgatgctgcacctttagccaggatttctcaggaaatcccagtttactgccttgtaagtgattagatgagacccaaccacataattgagggtagtctcctttacataaagtcagctgattgtaggtttaaccatatctacaaaaatacctttatagcaacacctagttagtatttgatagaataattgaatactgtggcaaaattgtaacataaaactaaccatcacagatgagtatattatttcacaatagattgtccttcatatcagcttcttgaaattaaaaaaaaagctactgtgtgtaatactatatggaaattaaacattgtccatatttttagtaaaataataattcatagttatactctgctaacatgagatcaacttatgcactaatggaccatatttctaaaagtttgtgagttgtttgttgacttaagtgagaaaggcctgtaatgccagtaccggaaatgattgttcccagaataac

SEQ ID NO: 10630 - DNA, 1677 bp, Homo sapiens
acctaaagcttcctgtatatgccaagtcccaggtattttggaatcccatgtggcttttgtgccctccaaagagaggtggagagaacctcttagactccaacttttacatactcttggcccagatttggggattaagtgaagggtgcctaatgaatagaacctatgcattcgtatacatctggcttgagaaaactgtatctctctctttttttttttttttttttgagaaggagttccactcttgttgcctaggctggaatgcaatggcgagatctcgactcactgcaatctccgcttcccaggttcaagcgattctctggcctcagcctcccaagtacctcggattacaggcgcctgccaccacgcccggctaatttttgtatttttagtagaaatggggtttcaccatcttggccagtctggtcttgaactcctgacctcaggtgatctgcccaccttggcctcccaaagtgctgggattacaggcgtgagccaccgcacctggcctcctatctctcttataagtagacttttcttcttgcttctttgaaacagaaactttttgtaaataaataaagtgtataaaggtgagccatattgggaagaaggggctgatagaggagttagaacaaccaggtaaccagatttttttttcctattcttttgaggaaaaaaaaaaaaaaaaaattttttttttttttggtctttctgaaactggtgctatttcagaatgataggtaaaagtctccatggagaagcaggggatgtgatgccatgtttacctgcccctcccccccataattatgatatcttttcacccattgaggaaagttgggctcacatagactctcttctttatgcgatagaccccaaatttcatctcgtaagagtaccagactggaaggtcataaagaaatctgcagtaggaatttaatctgtagatttggccacataaaatgcaggtgtaatttttatattatacttcaaaacaccttgaaagccatgttagtctttttgctatctttaacagttaagaatttttgcatgagaattattattttgtttctagttgtagtttttccaacctttcccaggccttcaatctctaattctgaagtttttaagaagagttagttacctacagttaatacttctgtcatctttgaattgctgttataccatataggcctatgagagagttgccagacttaaataattatttatatgcttaatttcttttaacacatagaataattctttaaaaaattgttttctctgtaaactgtaactgaaacccatgctgccctggaaagcaatgttacaaactgctgtaccctctgcctgaagacaagtttttatttctttatcctaatacccaacaacaattagtatcactttaaaagataaaatagaggccgggcacggtggctcacgtctgtaatcccagcactttgggtggctgagatgggcagatcacaaggtcaggagtcccagaccagcctgaccaacatggcgaaaccctgtctctactaaaaatacaaaaattagccaggtgtggtggcacacgcctgtaatcccagctattcaggaggctgaggcagaattgcctgaacccgggaggtggaggttgcagtgagcagagattgtgtcactgcactccagcctgtgcgacagagc

SEQ ID NO: 10631 - DNA, 1049 bp, Homo sapiens
tatatagaaaaggcaaaagaaacatacagtgagcacacactcagcaccaagattctgttgttactaactttttgcatcacttgccttaccatattattaatatgtccatttattcatcctccatccatcttattcattccataataaaataaattgtaaaataaaataattcaatatgcttcacccgtaaacccttcagtatgcatttcgttagagttccagtatttgtgtactttatttttcttttacctccaaacagcatcaggatagaataaattattattgtacgattgaatgagttttgacaaggcattcattcgtgtaaccaaaactctcaagatagagaacatttccatcatatcggaaaatgcccttatgccgctttccaggcagccttttccttaccctccatccagcatgactgttttgatatattttttaaaccataaaacccacttttgctattagttttcttcaattagcccacccaaatgaagtaaaattttattttagttctgctatttgatttttagttagatctggatctctgcatgtttttcattttaagtagttgccctgaagattacatttacgttgttacttttcacaatttatttaggactaatactgtacaatttcatgtaaaatacaagacctttgcacaaataaggttttcatataacccctctaccgcttgttctgtatgctgtaattttcatatcttatacaagtacaagattacataagtaatttcatatcttatacaagtacatagataagtcattattaaatgggagtaattatagtacctattcaacaaaattggaatactaaatgcaggaaacagtgacagccaaatgttaacagtatagaaaattttacctcaacaaatagagaatatcagtaaagacatagaaattacaaaaattaaacaaattcaggaactgaaaaacaataattaatagaatatgtaagcatatcatatatatcacagtattatagattttcctttaaccaatcatgtgtgtattttaaagatactgaaagga

SEQ ID NO: 10632 - DNA, 1027 bp, Homo sapiens
tttctacagctgtctaattgaaacctgaaaggtagttgttatgattcattttactttatcactacatgcttcattatgctactctaaaatacattttcttacataaccatattatgcctgaaaaaattaacaatcatttctgcatcatccaataccctgaacctgttcagatattctctccattgtttcaaaaatgtccgttgacagtgttcaaaataggctccatcaaggtccacaaaatatattttattgttgtagttcttaatctagaactattgcttttactttctttttctgcatgcatgtcagagatttattgagaaaattagattatttcgaggaatgttccacattctgaattttcctcgtggtgtcatttaactagtttattcttctatatttctgtaaggagaagtttaccttaaaatggttggggtaggttaacaatgtaaaaataattttgtcttttttactcgcattcacccaagagtgtacgttgttgttttccagaggctatatgatactgcacatatgatattgcagcagagtacatacagaagcatataaaagaattcatttgtagggccgggcgtggtggcttatgcctgtaatctcagcactttgggaggccgaggcaggtggatcccttgaggtcaggagtatgagactagactggccaacatggtgaaaccccatctctactaaaaatacaaaaattagccaggcgtggtggtgcacccctgtaatcctagctactttggaggctgaggcccgagaatctctggaacccgggagatggaggttgcagtgagccaagattgtgccactgcactccagcctgggtgacagagtaagactctgtctcaaaaaaaaaaaaaaattcctttgtcttccattaaaccatatatttaaaaagattacaaaaatgtaaaacaataccagtcttatcactaaatttttcttgttttggaaaatactgactttttaattttaaatatatatttgtaacataatgagttataatttt

SEQ ID NO: 10633 - DNA, 1027 bp, Homo sapiens
ccaggctggagtgcagtggcgggatctcggctcactgcaagctccgcctcccgggttcacgccattctcctgcctcagcctcccaagtagctgggactacaggcgcccgccactacgcccggctaattttttgtatttttagtagagacggggtttcaccgttttagccgggatggtctcgatctcctgacctcgtgatccgcccgcctcagcctcccaaagtgctgggattacaggcgtgagccaccgcgcccggcctgtaccttctcttaagtcagcttgcaatttaaatttttagttagtaaatttaactaattttaaaatatgttagtgtctgtctgcttaactattgcatacttattaaagaaacatgcgtggttatccattggaagagatcgatcctagggcttcctgatacaaacacacccacagaccccagccactctagatttctggttttcatcccaggtctattgtgtataccctggctattagtaaccagtaaaccactctcccccttctgtagatttagtactaacttagaaaaaggatacaaagaagagtttgtatttaacagctcaggattgccttttcaggtggaagaaataggctctggagttggatctgcttcctttcaaattccggcaatgtcattgcctagctgtgagaccttgagcaaattatttacttctctgagcctaaagtatttgtgaagattaaatgagaaaggcaaagtgcctggcatacagttatcaatcagtacctaataggtatcaccattatcatcaacatcattattattaatacatatttagtagtgaaataaggtgtctctttttatgttaaccagtgacattcagcaaattgcattaatttaaatgtgcttcctaagtgtcacataaaatcaagctttaaatgggagaacaagctaacatttatttgtaatcttgtcgatcaccttgcaaagtgctttacatatactgttttaatcttttatatcatgataagtagataatgtcttcatttc

SEQ ID NO: 10634 - DNA, 1063 bp, Homo sapiens
catgggttcagtgttcaaaatagttaaatgctgtattgatttatgtgtttagggaacaaggttgaacaaaagatcttctaaccaattagaacatttagctttcttttttaggcaataaattcctttacttgaaacacagcagaagatattaacatctgcctaaattttttcattgtcacatatggaagtaagtgaccctgctgtcactgttccatgttttcttgtgaagagctaagttgtcactacccaactgtgacactgcatggaccaactcctgcaggcgagtcagaaaaaaagccgggatagtaagaaaggaacctaaaagaaccttaattggaaatttaaaaaacaaagttcaaaggccctgcttttattaatgtatttctgtttatggttttcagggggtgaagccagccagttttgacaaagtagcaattcctgaagtgaaggaaattattgaaggatgcatacgacaaaacaaagatgaaaggtaagttgcctcttttgatctgggtgatacttgaacaaaacctaaaaagtaatgtgctttgagtacaacacacattctacggtgtatttaatatttgtgattggtttctctatttgtgcctgtaacatttttaaaggtagggttttgttcattgtggttattcagatttgatatactggaacactgtaaaaatatggtttggtagagtttcagtaaaccagaaccaccataaacatagctacattccatgagaactgcttacttaaaacatcagcatgatttataaaactcaaaaaagagtttaatatctaacacaggaaatcttttcttagtcctttaccattgaattctaagtggtgaaataaaactttggctctttaaagtcagctcagctattacaggtctgatttgccgtccttacgccagaattgaagaagagcaaaacatcaaaattccttgagtaaaaagagaagacttggcccaggggttggaaggagatgtggcttagtcatttgtactaacagagggcttctcttagaggagtggcaagtatctgatctgccatgtagctga

SEQ ID NO: 10635 - DNA, 1005 bp, Homo sapiens
aataaccttggagtgaacatttattttaatttaatcatttatgtaagatgatgtatcagcaaaccaaagaactacataatgttcccccatggaagtattttttccttaggtttcaacctaaggtgggactgtagctctaatgaatgcattagatgcatatatagtatgtatgactttctttggctccattaatgtttataaaagatctatcttataaaattattttaagcatgtgggtccttgctgcttttccaaataaagaatatagttaactttctgaactagcaaccccagaattttcagatttttacttaggagaatgaagaactatacagtgttattatggctttgagacataccatgagtaaataacaataaaatgagcattctgactgaaaatagaaatccttatttagctattgtgaacagttgatctactttgccagctcgataaggatcttccctatggaagaatgaaactgaattcttttaaaaagcgggggaggctgtgatagtgaattcttactattatttacttatttatttatgttttggagatggaatctcgctctgtcgccaggctggagtgcagtggcacgatctcgactcacggcaacctctgcctcctgggttcaagtgattctcctgcctcagcctcccgagtagctaggactacaggcgcatgccaccacacccagctaatttttgtattttagtagagatgggtttcaccatgtttggccaggatggtcttgatctcctgacattgtgatccacccccttcagcctcccacagtgctgggattacaggcgtgagccaccgcgcccagcgggtaatgaattattatagtgtatattgtttgcatttggcaagctgtgtttctaaatttagtcttaaatctagaactgcttctagaataaaaagtgctatcaaataaaattggctgtcatttatattacccttttcagttgattagaacaccaggatgtcagaatcagaaaatt

SEQ ID NO: 10636 - DNA, 1091 bp, Homo sapiens
tattatgaatctgacgattctagccagctaaaattacagcctgagcagcattgacagcttaggttttcactgtcagtgggttttgcatgggttgggatcagaacatgttgtgtggtatgatccttttctaaatttttcttacaaaagttgacccagaggcctctcccatacataatcaggttaatgtttcattttgatcaagcaaactctgaggagattaaatattcattgcaaaagcctgacctctatacacttactttaggccttctctaatttgttgtgttcacttctttccttcaggcacaggggcagagccagggtcagccatcctcaagtagcttaacaggggtttcatcttcccaacccatacaacatcctcagcaggtgagaacaatgcattgcaacattttatgaattagcagtggccagaacactattttaacttttgtgatttgttatataaatggcctgctaagtttttgaaaggaaaattaagaggcataccatgtcttgtgttcagtaacaaagaaaaaaaagagacttttctgtgtttcagaaaaatctcttttgtttaatatacttttgaacaatttagtagacatacattattactgatataattatctttttaaaagaggattctacaccttttttttgagacaaagtctcactctgtcacccaggctggagtgcagtggtgcaatcttagctcactgcaaccaccgcctcccaggttcaagcagtcctcctgcctcagctttccacgtagctgggactacaggtgcctgccaccacactcagctaatttttgtatttttagtagagacggggtttcaccatgctggccaggctggtctcaaactcctgacctcaggtaatccaccctcctcggcttcccaaagtgctgggattacaggcatgcgccacctcacccagcctggattctacacataatttacggtacaaagagtatgtcattccttttctctttttttccactgcttgcagcagtgatttgtcattaccttcattgtgcttgcctctactaatcctgcacttctttttaattatttctaatctgtagaatgatg

SEQ ID NO: 10637 - DNA, 1032 bp, Homo sapiens
gttgaatttccataagaaaagtactaattgtgaatctgttgtgaccaggaaaaatcttctgacatgagacaagccagtaaacttttaaactaaattaggaatttatttttgaatcatatataagaaataagaaaaacatggtaaattgcttacttgagaagctgagttggaatttatccctatttctttggtcccaatgtacaggggaacactatttgaggaacttgccacaatgaagtaaaaaccccaacagagaaagcactccatcagccaccacatttgggggaaagtgcattgtgaaagtccgtaaatcaggagttagaaaattagttttaaacttattttctcatttaaaaacatggattcagatttctaagggagtataaagtgtgacaaaaaatagcaagtgagacatgtggaggggtaagggtaaatagctagtgcctagatagagggaaaggcctaagcaaagactgtgcaagaatagattgatagaagccaagacagatgtaggattagactgtggaagggtagaaggaagctgtgtgcttgcggtggatggaatggttaacaggatggaatacccagacctccttgccaccatctgtagggaagaagtatacatgtaagaaagaggaaaataataccctgtgatagtgacagaatatgttaatgccatcttttattcataggggcaccttcccagaaagatgtataaaactgagaaagaaaagagggaacatgagatacagtgaatctaccagtagatctttgtacatttttcacaatatattttaaaggtcgcacaaataaataactctttctaccgttttgagtaacatcaaacatagaatgtaataagacttctcttaaactgcaaaaacatgaactactctgagccttgagagtctgacatacaatcttgagaaactggcaaaataatcaaagcagtacactaaatttgagtatagttttgtatgttccataaagacaaatgttatgttgtgccaatataaagcataaaacagtgtg

SEQ ID NO: 10638 - DNA, 1120 bp, Homo sapiens
cataaggaagctggagaactcaatgtaaaatcaaacccatctgtaatttcgagtgggtggagctcttgcttttggtacatgccctgaatccctcactccctcaagaatccgaaccacaggacaaaaaccacctactgggctctctcctaccctgccctcctcccttttttttacccctctcttttttattttttctttgctctttagaacccagtgaaaaataccagggtactggggtgcaactctttcttatgataggtcattagtgctttaagcaaaagatattagcagctttgactgcagcattagcaattaggaaaaaaaaaaaattaagttccctgcggacatgtaactttgccatcagttttgatgtggaaacactgtgatatataaaatgttgttggacaacagtagttttaagagtaaaatatgaaacgtttaaaaagttccaaaaaaagctagctctgtcctttacttattgagacactttaactttttcctttgtatttccattgtattagataaataaatgtgaatgtaaaattgtataaattactgtacttgaatacttctgtttcccagtgttgcttgctggacattttagtgccttggacttctattgcttctgccattagcatcaacttaccagaccccagatcaataaagggcatgtggaaggaaatcgtaggtccatgtgaccccagcagtccagcagtggttatgccaaagggaaattgaaaaagtatttttttaagtcattcaacaactttgtctagagcaggtgtaagatgagtagggtgggaagttaggttggcatcagtggttaaaaacagaaagttctgtttcgggaatagtgaggagggggtgttgtaacaaaattggacaacttaaaagaatggtgtgtgctgggtgaaagacaaagactaaagaatgaggaaacaaacgtgatgcctggccagtgactgtcatataaacctttcttatttgagctaggcttgaacagacgtgacctagaagaaactgaacataaagagaagggggtggggggctagttttcaagttggggaacctgatagtgaaaagtcacagatggagaaaattgctctcagaaaaactgttt

SEQ ID NO: 10639 - DNA, 1051 bp, Homo sapiens
agtgatggacaagcttttcaaaagtgctcagctctaactgcagtgggctctcagtcagatcctcttgataaggttcagaatgaagcaagataaatcgcaatgacgttcattctccagcagcgatgaacaatttcatgaccaaaaagtagttttccaaagtccctttgtgacagagtccaattatgtggcctgagcctcagttaagatggatcatatttccttttcttcatgtcctggctcttcctatgagattcccagtttcctatggaagacaaaatggcttaaatgtagctgccataattttaaaataaactgacagctaatgatttctggattatattaatgatcctaatttagactaagcccaagaatgagaattactgttaggaggaaggcagatgattctcctagaccaagtggcctcgtgctcatgacagacctgctgctgggagggacagctctccatgcagtcgtttccgcttcctgctattatcaggagctgaaaagggctgcacctgaagtcaggagcccaaaggaaacgttctggctcttaaatcaattctgttctacttgcagtaccattccctaatagaagttcccgattctatcaaactttaaatgaaatgtcatccttcctcaaaaattcccagaattaaagctaggatctccccttaatttttgtgcctaaacacctctctgctacctgttgtgcgttggtcagcgctataagtttggaggtcccaagatccagattttgcttgtggtttctggtggcaaacgctgtgtggagtcctgttctgggtcaccatctggttgttcaaggctaatgtgtcagaggtctgggctgggtctgctctagacgagggcttgaccacaccatcccctgcatcgggagtcacagcccacttttcagagttgtcttcaagagtctctacagaggtcaaggaaaagtgcgtcatcagcaaataatgaagtattctcacagaaagcactggaaaaactggccctcagaaattccatgtcttcagtaccttctgaaagtttttggaat

SEQ ID NO: 10640 - DNA, 1073 bp, Homo sapiens
acttgtagccatagagacacctcacaaggttcccatttttgttgttgttgttgttgattttctgctcacacctttcctgaccttgcaaccatgtatggaagtgcccgctctgttgggaaggtggagccgagcagccagagccctgggcgttcacccaggcttccacgttcccctcgcttgggtcaccgtcgaaccaacagtacgggagggagttcgggaagcagtgttggaggtggcagtgggaaaaccctttcaatggaaaatatacaatctttaaatgctgcctatgccacctctggccctatgtatctaagtgaccatgaaaatgtgggttcagaaacacctaaaagcaccatgacacttggccgttctgggggacgtctgccttacggtgttcggatgactgctatgggtagtagccccaatatagctagcagtggggttgctagtgacaccatagcatttggagagcatcacctccctcctgtgagtatggcatccactgtacctcactcccttcgtcaggcgagagataacacaatcatggatctgcagacacagctgaaggaagtattaagagaaaatgatctcttgcggaaggatgtggaagtaaaggagagcaaattgagttcttcaatgaatagcatcaagaccttctggagcccagagctgaagaaggaacgagccctgagaaaagatgaagcttccaaaatcaccatttggaaggaacagtacagagttgtacaggaggaaaaccaggtaagttctacgtgtgtttacctttattggctgaattcatgtatataaatgaaatagcctttttttcccctttcctagatttttcccttcgtagtatatgtatcttcctttttcctattgattttactgttttgtgtcctccatttctcagccctttccaaatttggtcctgtaccctgttttcttctagctgcccatgtctccttgctcccattcttgcttggttcttttctctggtttctctttctcttcgtgtctttcctttcagcatatgttatcttttttttttttttccaattcttctgagagtataa

SEQ ID NO: 10641 - DNA, 1062 bp, Homo sapiens
tctgtatttgtgaaggttaactgaaccttttttgtttgcttaccatctattcagtgttttccctattctttgttctatttatttagtaatttaaaaaattgactcattttaaaaaactgaatcttattttaaaatgaaactgtcactactacacgtggaaaacatttgccaaaaaataaaaaatgaaagtgtaaatacataactattaagaaaaaggtcaggccgagcactttgggaggccgaggcgggttgatcacgaggtgaaggaatcgagaccatcctggccaacatggtgaaaccccatctctacaaaaaaatgcaaaaattagctgagcgtggtggcgcgttcctgtagtcccagctactagagaggctgaggcaggagaatcgcttgaacccgggaggcggaagttgcagtgagccgagattgtgccactgcactccagcctggcaacagagtgagactcagtctcaaaaaaaaaagtcatatatgtaccactctgaagattatttttaatatcattttgggaactactagcgattctgatacagatagttttgtcatcatacttggagaaatattgaactagagacaaaaagtttcacttagattgcatgattttcagctactgttgcacacttggaatctggggcatttttaaaatacttttggtcagcccccatcccccgatttaattggtgtgggctacaacctggacatcaggatttttaaaacactctcctaaggtaatcgtaatgtatattctgggttgaggatttagaggttaaaaagcatataatgcagttagactaagaagcataaattcatgaatactaaaatacacttatctcggtataattagaaataaagaagactggctgggcatggtggctcatgcctgtaatcccagtggtttgggaggccgaggcaggaggatcacttgaggcgaggagtttgagaccagcaagggctacatagcaaggcctcgtctctaccccaaaaaaaaaaaaaaaaaaaaaaaaagggcagaagaaaaattagacaggtacagtggtaggtgc

SEQ ID NO: 10642 - DNA, 1033 bp, Homo sapiens
tgttaatgggtgtgtggataaatattaattatgaataaatattgcctttttggtgataataaaccgctgtgttttatttcacacttttgagtacaaggaataaaaaaatacaacttttctgggcttgagataagtgctctttaggttaagctataacaccgaagagaaaatagtgctccattaacttgtttcatcagtcttttaggcaaccaaatgagaaaagcaaagaaaaacagtacagtctagattgtatactccatctgagaaaaaacattaaaaagtattacgtatctgaaaatgaaattgtcggacaggcgcggtggctcatgcctatagtcccagcattttgggaggcggaggagggcggatcacctgaggtcgggagttcaagatcagcctggccaacatggtgaaaccccgtctccactaaaaatacaaaaattagccggacatggtggcaggcgcctgcaatcccagctactcaggaggctgaggcaggagaatttcttgaacccaggaggtggaggttgccgtgagccaagatggtgccgttgcactccagtctgggcaacaagagtgaaactatgtctcgaaaaaaaaaaaaattgtcagctgcaatcattttatcctgtttttctgtttgaatagtttatttgaatagttcatggaattaataagttgaatttatttctatatctagaaacttgggaggggaagggtaaactgttatgtatggtataaaaaatttaaaagtgttgtgaaaatactattttcaattctaaaacgcttgttcaattctaaaatgacttgtttcccctatgcttgatatagatcaagagggaaaaagtattaatgggtattatttattcagcaaacattgagtttacattcaggactgtcaacttgactatggaacaattcaagtagctttcgttagtcttgcctagcttttcgttatgcattaaatatgtgcttcattcaggaggagatcaccccaccccagccaggttagttttgtcaggtagaaataatg

SEQ ID NO: 10643 - DNA, 1024 bp, Homo sapiens
ctccaactcttggcctcaagcaatcctacccactcagcctcctgagtattctcttgctgttttcagaatattcttttttattactgtgattattattatttttagagatagggtcttgctccattgcccaggctggtgtgtgatggttcagtcatagctcactgcagccttgaactcctgtgttcaagtgatcttgcctcagcttcttgaatagctaggactacagctaaaagattggccatccctggctactttttacattttttgtatagatagggtcttgctatgttgcccaggcttgtgtcaaactcctggcctcaaagaatcctcccgcctggcctcccaaagcattgggattgcaggagttagccaccgtgttcagtgtagaattctgtttttatcatttacttttgacaacttggcaataatgtaccttagagaggactttctttgggctgaatatgttttgggatctgtgaataccaaagattcgagggatatatgcctgtatctctgctgagacttcggaagttttccgctattatttcattaaacaggttgtctatgccatttaccatctcttctgaaattcccaaagtgcaagtagttgttcacttaatggtgtcccatatgccatgtgggctttattcttttttatcctctcttctttttcttctgagttttttctttttttttctttttctttttttgaggcagagtctcgctctgttgcccaggctggagtgcagtggcacgatcttggcttactgcaacctccgcctcctgggttcaagtgattctgctgcctcagcctcctgagtagctgggattacaggtgtgcaccatcacacccaactaatttttgtatttttagtagagggagggtttcaccatgatggccaggctggtctcaaactcctgacctcaggtaatctgctcacctcggcctcccaaagtgctgggattacaggtgtgagccaccgcgcccagccctgtctgagattttgcaaaagacctgtcttca

SEQ ID NO: 10644 - DNA, 1040 bp, Homo sapiens
tgtagcagagctgacagaggagaactttcagaggcttcatgctgagcatgagcggcaggccaaagagctgtttcttcttcgaaagacattggaggaaatggagctgcgtattgagactcaaaagcagaccctaaatgctcgggatgaatccattaagaagcttctggaaatgttgcagagcaaaggactttctgccaaggctaccgaggaagaccatgagagaacaagacgactggcagaggcagagatgcacgttcatcacctagaaagccttttggagcagaaggaaaaagagaacagtatgttgagagaggtatgtgactacttttttagttttatgatttgttggttatcttttttttcactgattaatcagcatcttggccccagtgaatctacgtgctctgccgtgctggtggaagagaatttcatcctttgtatttaagtgcgtcactgatttctgttctgatttgccctgttgtatgggatgacattgtctggtatgtatgctggctcagtgactttctgggtcttttctctcctgctcccctgattttgagagttcatttgttgctaaaggggtaaaaaattccttgatttttcactcatctctagatctgttcatagagacaacaaacacaacaaaaccagaatcagaatagctaaccattgcttaatttaaaaatattagtaaaagagagtaagcggttatctcagcttatgtgtgcttataaaagtccttggcagcaataatggatatttgccctgtggtttccatggaaactgttgccttgctgtaaaagatacgtgataaaaatcattggctgccatggaggcatagctggagagagtgatgtagagacacagtgttacttatttttagctgacctaggtgactactgataattttttacttttctaaataatgtatcattttaagaaggcgtaaaggaagaaaccatcttatattgaattaaaaaattaatagccataataacttttctatatatagttggacttcaggtaattttcacttttgg

SEQ ID NO: 10645 - DNA, 1060 bp, Homo sapiens
cctcaaaaacaaacaaacaaaaccctaaatttatgataaagttttgtgtcatgatttatttggaggcatttccactatttcttttcagcatgtacaacagtggtgtgtcttataatcagtggcatcttagatttgatgaaataagatagcattaaaatggcatttgtagctattagtagtaacatttgtaattagttttacgttttctttattaacatgattttgtagctggcaggtaaataattctcccccccaaaagccgagaggtaaaaagtaagatttcaatgaagcattgtattttctgtttgtactcaaatcacattgttgtttgaccgcttattcttagcttttgtattatttcgctgtagctcctttcatttgactgttagaagagtggggacatctcttggacaaatgctgaattacaggcaagacttggttagtgctgagggcttgacaggtgattctgttatacaccaacatttgaggccccaactttggttttcagtccgctagcagaggatacctaagttggctgtggaatttttgggtcttcaatccatatgcataccaaacattgtctataggccaactaaataatatatttcagtatgtgctcctacttacttaaatgctggtatgctattgtgattaataaaatacaactttgttttaaaacattattgcagcctactagttttttgtctgtattttaatcaacaaaccgtattagtacaactgctatcgtgttaggtttgcaaaaatctttgaggttaaaagtgctaatatttgaatatgttctaggctagggaattctgaatctaactagcatatctgaggactgcttgtcagtttgtcagtattactggcagatagaaggtataagcagaggagattaaagaaaaaaagaaacatatatatatgtttatgtgtatttatttatatataaatatatatttttctatatataaatgtatatttttctatataaatatatatatttttctatatatatatatatatatatatatatagaaaaacatagaaaatgaataggaat

SEQ ID NO: 10646 - DNA, 1031 bp, Homo sapiens
gcagtggcgtgatcttggctcattgcggcctccacctcccaggctcaagcagtcctcctgcctcagcccccgcaagtggctgggactacacatgagcaccaccacacccagctagttttatgtgtttttcatagagatggggattcaccgtgttgcccaggctggtctcgaactactgagctcaagtgatctgcctgccttggtttcccaaagtgtttggattacaggcatgagccactgcacccagtcaggactttttattcaaatggatttttcggttttctttaggaattaggtgatgctcaagaggagaaatcagatgaaataagttgaaaatctaaattgtgtgttattttttaaaaaatgcagttttaatattttcaagtagatacagaaataccaaataaaaatgttgtaaagtataggttataaaattttgttaataaatgaagattgtttacagttagcagagttcattttatttttactcagacaatttaaagttcgacactcatttattgaacaaatactgttaaatatctaccgtgtgcccagtcaatcaccttgtagtgtgcagaacagattcaacatggacaaactaggctgggaggaggctgacgagtttgtcgttttaaggcaggtgagagattattatggcctaaactaattaatgtgttaggtgttgggatggaagaaaacaaataattttaagagattttaaaaactcttttttgatacaatatggaatgcatgtaagaaatagaataaaacaggtgtatagttaagtaaattataaagtaagcaccctcataaccactacctaggtctagaaatagaactttcacagccacccagaagtcctgtacgtgaaccaacccagccagaactctcccttccctctaaaagtaaccagtgttctgggttttatagttatcatgcctttgcttattatacttatcacatctgatccttactatcatagtattgttatcttgtattatatgttaaattaatatcattcctaggtatca

SEQ ID NO: 10647 - DNA, 1043 bp, Homo sapiens
acattcttaggtggatgctctccgattgcgtttggaagagaaggaaaccatgttgaataaaaagacaaaacaaattcaggatatggctgaagagaaggggacacaagctggagagatacatgacctcaaggacatgttggatgtgaaggagcggaaggttaatgttcttcagaagaaggtaaggtacaggtgtttcgagttcagtggcccattcctcatacatcttcactcctaccactaagttatttctaaatgctgtcagagtttcttgctcatttttcagtttatatttttgtgattagtaatttggaactcttgttgcggtaggtagattgttaagactgctctatatattcagtttttaaaaatttaaacactgttagtatcttccagtagtgcttttcatgctgtttctcaaaagtgccttgtaaattgccaaagtgtttgaactgacattcttttgccccttctgtcttttattgaaactgtaccaaattggtttagtacatggacttgggatggtacaacttcatttatgtgtttaataagatgacaattttaagccgagaccagtagcatccagaccaacacataattcatatatgagcaaaaaaaatgtgtgtgtgtctatttcaatacaaatcttactgttccttagtgcttgttatttccccttttttcagttaatatattttggtattctttccaagggtttcttcattgttgttactaacagcattgtatggatatactatagcaaaatttctactgatggacattaattttgctaaaaatttcttcctttacataaaatgattaatagtaaaaaatgttgtacatgtttagtttatacatatgtcaagtcaagtatatttctaggataaagtccttaaagttgaactgctgagtgaaaggatgtgcatttataattttgatggattttgccaagtaaccttaaagagactgtaccaagtttcatttctactatccgtgatgaaagtgttatattcccacatacttgtctgcagagtgtgttaataggc

SEQ ID NO: 10648 - DNA, 1023 bp, Homo sapiens
ccgagatcacgccattacactcgagcctaggcaacaagagcgaaactctgtctcaaaaaaaaaaaaaaagtggattctttaaaaacttaccattgtcttttgaatatagaagtttgaaattctgctaaaagcagaattacagtcatataagtgcaaaagggaatttcttcacatgttgatatattctctcatcaggagcggacaattgaacgcttaaaggagcagagggacagagatgagcgagagaagcaagaggaaattgataactacaaaaaagatcttaaagacttgaaggaaaaagtcagcctgttgcaaggcgacctttcagagaaagaggttaagctccccaaaatggaattagtttgtttgcttaatcattgcatgtgtctgtatgttggtgtttacataatgcatataaaaaagtattcgatggaaaattttcttaatattcttttagcaggcttttgttgaataccttaaggaatatttcagaaagctttgcagagacatagcggattggttcattcattttctaagtattactcactttgttttatgttggttttttacttactaatatttttatagacctaaagtaactgaagctcagatacatttggagaaatagtgtgctaaagataagaaagttgacagataaaaggaatatgcaaaaggaggaaattttatgtatagcaactatcaaagaacacaacagctattaaattaggtgacttaatatactttggtcttgtttttggagaatcctgttaatatgacctaaatagcaaagatgcctcatgctatgtaatcagatgatgataatgcatgagctttagcatctttctgtggattttctttctaatatctttaggcaatgttatggaagtttaaattcctaatagaatttttcttttaatagggaaaaatgtgattttttttttttcttttaagagactgtgtctcactctgttgcccaggctggagtgcagtggcattatcatagctcactgcagtcttgaactc

SEQ ID NO: 10649 - DNA, 1004 bp, Homo sapiens
ccccttggcctcccaaagtgctgggattacaggcatgagccaccacacctggtgcatgtgcgcacgctatttctctctctctctctctctctctctgtctgtctctctgtctgtctctctctcactctctctctctctctctctgtctgtctgtctctctctgtctctctacacacacacacacacacacacacacacacacacacacacacacacacacacacacatatatatatatatattttttttttttttttttttttaagacagattttccctctgtcacccaggctggagtgcaatggtatgatctcagctcactgcaacctccacctcccgggctcaagcgattcttgtgcgtcagccttccgagtagctgggaatacaggcatacaccaccatgcccagctaatttttgtattttcagtagagatggggtttcaccatcttaaccaggatggtctcgaactcctggcctcaagtgatccgcctgccttggcctcccaaagtgctggggttacagggatgaaccattgtgcctggcctagatttttgttatacagatgtttgaggttaaacaactggtcctgcattacataagtaggtagcagagtcatgcctaacaattccagtgtctgtctctccttcctgaaaagaaatccttttcaggtgttcagttttcattaatgacctcacctcctagaagaggaggctgtagacagctagatgattcagagtctgttcacttgaggatcttactgaggccagagtctttcccacatgctggaatgcccacttacaggacaggtactgcataactggcatgtgggttgttttgctgctaggggccagtttttctacacatgtgctttttaatgcttctctcagtctggactcagttaagggatacgtctggctcaaagagactaagactccatcaatacagaagctattgtcatttcatttatagattatgctagcattggcgtttatctatagcttgt

SEQ ID NO: 10650 - DNA, 1041 bp, Homo sapiens
taagggagaaaataatagaggtagaggaagaggttatatacacttatttctcttactatgaacattttacttagaagtgtaaggttgtatgtcttgtttgatacagtgataaaaattatgataatgcttaacagaaatgggtgctttgctccataaaagtgctccgtgctttcctctgtcattatgaattaatcagcaagaaatccagaagtgaacaacataaaagtattccctctcctcctttttttaaacagtgaaaaaagttgacaatatatttattctgtcatagatccaaaaagccaagcctgcgttttaaggcagggttttctttggttttctatttctcagccacaccttcagatttcttggcacagtacagtcatagcattgtgtcatatccttggtctgttttatcagactttataaattgattctgactgtaccagcagtactagattcttatctttacacagtttgggaaatggacaatgactcttttggaaaaacagctctataaattgtgctgtggtatgtgagaatgggttctctgctttgcttttcctctagcctgctgccattcctagacagtgtcatttctctgatttagggcattgtgtagctgttctgggtagagtaaacctgcctctaaatgtggaacagattgttacccgtcagaattctccaccttggaatggtgacactgaaagatacaattcagctctggccaacacctcctgtcttcccagttcacttactctcgtctccactccaattattgcatctaattaggaccttgaaacaacaacctactacttttttttgtttgttttgaacctcgtatggcctcacacttccttccttacccgggtcagatttcatggtccagcagtataattactcccttctaaatccccttgacttacttgcttttctcttttgtcacacttgcttgcaaaacctcaatcctgatttaaagcaagtgtcttcctacactgcctctgccctgagcagctttatgttaccgggcaagaagagtcacaa

SEQ ID NO: 10651 - DNA, 1050 bp, Homo sapiens
tagtgtagtagtgagaataagcatagaaataaaagacactaaatgtaagatgagactaattatcctgcagtttccttgctgattaaaaaaatgttgaattgatcatttaaagtatttttgcagaagttaaaagtgtttatgtaaaactccaagtaattaacacttttacgttctgtattgatatcttttctccttttcatcatgacttgttttctttagacagttaggaatatggttccgtgaaaataaaacccatatttaaaatggcttttaaatagtcaaaagcattttaattagataaataacaagtgaaactattagcattttatttttagttttttggttactctttgggcaggtattttttaaagcacaattagatatttaagtagtattataaaattttatgtcttaatttttatgttaactgtgagtggagctctttggaagaaggtaaaatgagagagagtgtgtgtatgtgtgtgcacgtgtgcaatatatatagtcatgagtcattgaataattgggatgataggttctgagaaacatcactatgtggtatcattgtacaaatatcatagcgtatactaacacaaacatagatggtctagcctactgcacagccaggctgtaaggtatagactgttgctcctaggctataatcctgtacagcatgttaccgtactgaatactgtaggcagcattacacagtggcatttgtgtacctaaacatgtaaacatcagtaacaatccagtattataatcttatatgcatctgcatacaagatgcagtctattattgaccaaagcattatcatcatgtgctgtaggactattatgagtgtacatattctctttttttttttttcttttttgaggagacagggtctcgctctgtcacccagactggagagcagtggcgcgatcttggctcactgcaacctccgtttcctgggttcaagcaattcttgtgcctcagactcctgagtagctgggattacaggtgccaccatgcccagctaatttttgtatttttggcagatacggggt

SEQ ID NO: 10652 - DNA, 1084 bp, Homo sapiens
tcagttacataatccaatggtaggaaaaatggtctgggttcgttttggtgagtgcaaatgtggttaatagcagttgaagtaaaactctaaagatactgctttcattttaggtgatatgaactatttaaaatgataaagcatgttcctttgctatctctagatagctattaagtgagatgtctgtgacacacagtacatttctaaattttgggttgcctgaattgtttaagcagagtaaaatagccaagttagggcaggtgcatggaataaaactctctctctacttagtcttattcccctaggctgccaatttaatgcttttttctaattagtgagtgctataaaatggcttatctccaaacagtacctgtgttaatggcaaaaaccacaattactttggcaccaacctaataattcccctttgtaatttttttaaattttatttttattttattttatatatttttttgagccaaagtcttactccctctcccaggctggagtgtggtggcatagtcttggctcactgcaaccaccgcctccccggttcaggcaattctccctgcctcagcctcccgagtggctgggattaccggtgtgcatcaccacccaggataatttttgtatttttagtagagatgtggtttcaccatgttggccaggctggtcttgaactcctgacctcaggtgatccacccaccttggcttcccaaagtgctgggattacaagcttaatttttaattgacaaataataatcgtacgtatgtatggtgatgtttgaatacatgtatacattgtggaatgatcaaatcaggctaattaacatatccatcacctcacatacttgtcatttctttgtggtgagaacatctcaaatccactttttttttttttttaatactttaagttctgggtttcatgtgcagaatgtgcagttttgttacataggtatacatgtgccatggtgagttgctgcacccatcaacctgtcacctacattagctattttctcctaatgttatccctcccccagccccaaacccccccaacaggccccagtgtgtgatgttctcctccctgtgt

SEQ ID NO: 10653 - DNA, 1043 bp, Homo sapiens
cccaaagtgctgggattgcaggcgtgagccaccacgccctgctttcttgggtatctattcccagattcctttctacacccataaaattcctcctgatatcattgctactataaaaacacatcatcccttactaattgcccttggataatccatacatctgctgtttttcttggaaacattcatttcctttctctgctgtagtgtgtagttagtctctaggttgtgtcatgcttgtggttcccttcaccactcacctatggtagagctcttttttctggatcccacatcttctttccaggtttacctcttcattttcatagagtataccgtagtagcttcctgagagagtcgttgagtgagatacttttttggggggattttgcattcaactcccatatttgattggtagtttagatacagaattctagattggtaatcatttgttttcccttagagttttgaaaccattactcaaattgtcttctactttcctgtgttgcctttaaaaactccagtgtcttctgatttgttgatctgacaagtgatcatttttggcctttctaaaagttttcaagatgttttctttcctctagtgttctaaactttacagaaagagtattcatattatcatctaagcaccaaatgatggatttaatctttttgcaagagcgaggacaagaaagagtgattataaatattacctagcagtgctgttgatactctggtatttgtaggactcaagggctttcctgtttatttcttacagtggctcaacattttattaaattaaataggagattcaagctgtggttcaacacaagagaaacttcttggtttattttagcagagctctcaaaattccaaaactaaaactagtgccagattttacccactcgatagattaagtaattctggactttgtaaatgaaggtgagagagatatttgccgtcttctttctcttgtattttactatcctagtttgatacagttgcgttagagcaaatgcttccatacttagctttacatcgaaatgttatgtgac

SEQ ID NO: 10654 - DNA, 1032 bp, Homo sapiens
tgcttttttaaaaaacagtctttaatacccaagaaattagatctttgcaactctttaaattttcgacgtaaaacatttatatatcaagttaaaatcattctgtctcagtatgtttgtgagcagaaaaaaagaagtataaaaagatacattttaaaaatcatagttgtataaactcttttaggaggtatagaagcaaaaatgtgtagagagacttttggtctatgcaagaggttgggcagatcaggcaatagctgaagagattccacagtgacagtggagataaagagaaatagatagatttaaaacgtcttttggaaatagagctaaaaggatttggtgaattacatgtatggataaaggatagaagagaaaacaaagatggccattggatttctggttggccaactgggagaatagtggtataattttttgagatgagaaagcctgagggaaaaatttgaggataagaagcaagacatggtattaaagaaatgttagctacattatcgtcagttttagaattgttatcagatatttttattattgatttagagatgagttctcgatatgttgttcaggctggactgtagtagctatttacaggcatgattatagcacactatggcctcgaactcctgggctcaagctacctttccacatagctggcactgtatgcgtgcacaatttatatttttagccaagttttctcttctgagatccaaagttatgaaatagacaacaacccatttcatatctttacaccaatatttccttgatatctcaaccagaaactaagttcaatcttttgattctcaccttccaaccagtttttcccccaggcttgctcatctcatctgagaggacttctttgtaatcttacaaagctgaaagtaggcttactgaatgtgagggaagtcgagtctgagagaggcagaagtgataggttaggtacagaaatttttacactgtggctttccagttcaaaaggtcgttccagaaccttagggaagctgtattccataatggcgaaga

SEQ ID NO: 10655 - DNA, 1049 bp, Homo sapiens
tagtaaagcagacacacagagcaaaggaacagaatagagaacccagaaataaggctgtacacctacaactatctgctcttccaccaacctgacaaaaacaagcaatgggggaaaggattccttattcaataaatggtcctgggataactgcctagccatatgcagaagattaaaactggactctttccttacaccatatacaaaaatcaactcaaaatggattaaagacttaaatgtaaaacccaaaactataaaaaccctggaagacaacctaggcaataccatgggcgcgggcaaggatttcatgacaaagacgccaaaagctgttgcaacaaaaacaaacaatgacaaatgggatctaattaaactatagagattctggacagcaaaagaaactaccaagagagtaaacagacaccctacagaatgggagataatttttccaaattgtgtgacaaaggtttaatatccagcatctgtagggaatttaaacaaatttacaagaaaaaaacaaccccattaaaaaatgggcaaagggcgtgaacagacacttctcaaaagaagacatacatgtggctaatgagcatatgaataaaagctcaaagtcactgattattagataaaatgcaaatcaaaaccacaatgagataccatctcatgctagttggaatggctgttattacaaagtcaaataacagatgctggtgaggttgcagagaaaaaggaactcttacacactgtcggtgggagtataaattagttcaaccattgtggaagatgatgtggcgattcctcaaagacctaaaaacaaatacagtttgatccagcaatcccatcactaggtatgtacccaaaggaatatcaattgttctatcatatatacatcatgaaatattactcagccgttaaaagtaacgaaataatgttttttgcagcaacttggatggagctggaggccattattctaagtgaagtaacacaggagttaaaaaccaaaagccttatgttctcacttataagtgggagctaagctatgagtatgtaaaggc

SEQ ID NO: 10656 - DNA, 1073 bp, Homo sapiens
ttcttttcaactccctgctgcccactttgtggtgttgtatgaataatgagtccacaggccctgtaaacatgttaggtgaggtgtttgttgtttattagtagttgggattaaatagaagttgcacactgaaattgagtgaagtgacttttctgcagttaacttggatgtcattggtttgaaggagtttttctgttgcagctgcttgtcctactacttttagctgtgggtgcatcctttctgcgtcctgctaaaaattatattcttgttttcacttttaaaacctaagacggttccagagctgtgtttggtttttgctttaaactaatgcccgagcgcccctttagttagtcaccaatcactgtttaggtaagttgatgattcctttttgctacccaagatttttttatttaaaattgagcatttttaacttgctttttaggtcagaggatcaatgtcctctgtggtattcctcctccatctaagcttcttaaagcagtattataaatagaggctttcaacctaaaaagtactgtgtatttcattgactagaactgaactgaactgtaggctaataaaaagtaccaaatgaaaatattatggtatctcattgcactccattgtagatgtaatgtagtgtgaccagcagtagctttgattcattgtaaatcccatctgaatactgacaacagttcaaaacatcaggagataaacctcaaaggtcacatttgtgtgaatggtcattgtgcatataagacatcattttattatttgaaaactagtagtgtagctcttaagacagggcagtgtcctaacctctgacagggatagaggcgagaggagaatcagtgggctgccaaacagtcatgtgttcataggtgaggttctgtttcttctttagctgttactattgttattattattattattattatttgcatgaatggtagcagttacttcacaggcaaatttcctatgaatcccagagtattgcaacagattagcagcaaataaagacctgagataaagaaaaaaaaaatgcttttattcagttatattaaaattaggacatttca

SEQ ID NO: 10657 - DNA, 1113 bp, Homo sapiens
taataactaattcataagaatgctgtaaacataaaatgagtattactaactgagaatgtacagtagatagtaggctctcactacatgctggttttccttcttcctttccattctcttaggaaaactgatactcagaatggctaagtgatctgtgcatagtcaaaaggccaatttagtgatagaactgagactggatccatcactttgattacagctagattctttccattataccaagcagcatccatagtaatttactttcatttgtacaattttctatgagaaaaaatgagcaacaactatcagtttgtcttcaatcctgataaaatctagcacttacagaaattgctaagaagtaaacatttattacacaaacccatgccagagaggggtatgttgagttctagtctaaacatctttaataatgataattccataattctcagctgtttcttttagattgaccttttctcacctgataaaattttccaattctaagctctttattctgattgaaatctgacataacttgtctcagtcatcatttttccattctgagcttgcttatattttctaaacttttaacttggttctccagcctggcgaccttaatttgtccattttagaacagccaaaatatccttgattttgctggattaattcagttatctcaaattatctctgacttcctttttcacacctgattttccttagttttgttgattaaagattaatatgagtttgtatgccctgacagtggatgatacaaaagaaaactggtctaggaattaggaaacctactttctgtttcatctctcttcttattgccaagctgtttcctcactatgatgggaaaaattatgttgtaatcttatgtcttataaaagagggctcaaattggtatagactgtatattttgtggggaattaattatgtgactattcaacatttgacaaataattttggacgtaagtgtgcaatgtctaaagcccgaataattctaattttaatgtcaacgcacttgatgagttgaagtatggtgcttgctggtaatggggaaaaaaaaaggctacaaccaaaagtattgtgttatataaaattacatgtgatttg

SEQ ID NO: 10658 - DNA, 1026 bp, Homo sapiens
atgttatctgttcagtggcatcagccgctattaatatatgctcatgacgtccaagtacaaataaatacacaagtggtttactctagcccatatctctgttcccaactttgggcccctatcaactgccaactgcacctgacagcttgaacattccataaacgacctcaacatacctaaaatcatctcatcattttttttttttacaaatatgctcctcagtatcttcatcatcaagaaatgtcgtttactcagttgttcaagccagaaactaattaaattgttcctaacaactttttttcccttgcctctcatagctttttcaacctttgagacatatctccacatcattttgcttctctcttcacaggaattattctattttatcactttgtttttgcaacagcatcttagctaatttgtaactaattttaccctttgccagtccttttcttctgcttcttccaggttaatacttggttgtttgtttgtgtttgtttgtttgtttttcctttggagatggtgtctcattctgtcacccaggctggagtgcattggcataatcactggtcactgtaacctcaacctcccaggctcaaggaatcctcctgcctcagcctcccaagtagctgagaccacagatgcatgccatgatgtccagcttaatttttttttgttagaagtgaagcctcacttcgttgcccaggctggtctcaaacccctgagctcaagtagttctcctaccatggcctcccaaagtgctgggattacagacatgagccactgcacctgcccttaatacttttgaaaacacgtgtatggtcatgttatttcctcttaaaattttccaaaggcttcttatcctttcaggataaaatgcagactccgaagcctgacgttgaaggttccccataatctgacttctcctgttgtacgccacgcccatgtgacctcacgtttctcctttctctctctttcgcttccccctcttgcctttttcctttctcccccctccccttttctccctca

SEQ ID NO: 10659 - DNA, 1051 bp, Homo sapiens
tcattcatagatttggtctctttatataataccacatttcttggaggttttgtttattcctttatactctcttttctctattattgtctgacttccttatttcaaaacgtcagtcttcaagctctgagacactatcctcaccttggtctattctgctgttaatacttgtgactgcattatgaaattcttatagtgtgtttttcagctctgtcaggttgattacatgttttttctttgctggctattttgtctgtcagctcctatattgttgtactgtgattcttcgcttccttgattttgtttcagcatactcctgcatctcaacgatctgcattcctatccatattctgccttctgtttctgtcatttctgccatctcaacccggttcagaacccttgctggagtggtggtgcagtcattttgaggaaagaaggcactctggctttttgagttgtcaagagttcttggattggttctttcttatctttctggggtaatgtttgttcaatctttgaacttgctgacctttggatagttttttttttcttcttcttcttttacactatttgatgaccttcagtgtttgattgtggtataaggtggattcagccaactgactgtttctggaagactttagggggccaacactcagctctgatcttctagactgtgtgctctaactttgggggacttatattgggcaatgactttgttctctggctcctctgaggttaggagtccactgtgctggtggggccgaagtgctccacgatcactggtcactacactctaatgggtggtgtctgccaaagtgcttcatagtgtggcggcagcaggatccgtcctcatttgcacatgccagcaacagcagcagcgcagcagagtgcacgctggacaactgtgacagggtgctagcaggtgccagggtgcctgcccccatgtaggcattcaccgcagtggcagaggcagctcagctggacgactgtgacagggtgctagcaggtaccagggtgcccgcccccatgtaggcattcactgcagtggcagagg

SEQ ID NO: 10660 - DNA, 1055 bp, Homo sapiens
aaaactttcctgctaaacgtctccactaaataacagctatggcgttatcttagcagaagcaggagaaatagtgcagatgaaagcagcaatggtattcaaattgctgttgcttccaagattcggaaggtatagtcctattatgatgacgtttcctaagccagttgaggcaagccttgtattttagaaggaaaacaatgtaaatatttaatgtgggcaaaatggagagctatctgcctggtgtcagcagtctttccctgccaagagatcattttaccttttctgcctgcttcctgatacctggaactgaatttatgccagggtatataagatgcatgtttgattcctcatgaaaacaggtttttgataatagaactggatgcctggagtaggaagagacaaacagagaaaggttgaaggaaaagcaaaacataaagaaaaacctccaacttggtaattttgcccagatccagccctgagatagagatagcatcttggaaagtaggaagaaaagaagtataatgacaaactacagttgttcctgagtatcctcaggggattggtttcaggacaaacccacccacaaatgccaaaatccatggttgctcaagtcccttatataaaatggcatagtatttgcatataagctacacacatcctcccatatactgtgttttgttttgttttgtttttgagatggagtcttgctgcgttgcccaggctggagtgcagtggcatgatctcagctcactgcaacctacacctcctgggttcaagtgattctcctgcctcacccttctgagtagctgggattacaggcacctgccaccatgcctggctaatgtttgtattttagttagagacagggtttcaccgtgttggccaggctggtctcaaactcctgacctcaggtgatctgcccgccttggcctcccgaagtgctaggattacaggtatgagccaccatacctggcccctcccatatactttaaatcatctctagattacttgtaacctaatacaatgtaaatactgtgtaaatagttgttatactgtat

SEQ ID NO: 10661 - DNA, 1093 bp, Homo sapiens
cgtggcagtatctccctttgatctgatgcccttgaggtttgactaaggaaatccttttcttagaaaaagtaataattatgattaataagttcacacatatttggtggccttgcactccctggattcactgcccatgcctatcagtgatctcactcccctggagtcagttctccctgaaatgtctttgtcttggtgttaaacttcttaaaatgatgaggacatgtgtagatctcttaacgttgagcacaaccaagaaggatggagaggtaagttgtggaaaggggccatgcgctgtgaggtgggaagctgtccagatggctttatcctgagggcatgaatgaagttgaaacgcactgggtcaaccagaaagctcttcaggttaggatgctgcatgtcagagaaagctaaagctgagagcagtcaatgtgctaattatctgcactggacaagggtaggtatttgtcatcatcaagcatgtgagaccgtgcagtagctggatgtagtttactggtctcttagaaatgagcatgcccctaccttgtctattttggcagaacataggagcttcttagcttccttcagctggaagcaccacatatgtggacatgattatatttttgtcgcaaatcctttttctggccaatcagaggaagcctgttggtattctaggaaacaggcctataggtaacttcaccaggagactagaaagtaagcaaatcagtatataaacttgttcctgaaatcttcattttcctttctctaccaaaataggataacttagctttttccaattatcgcactattgagcatattgcactaatatattaactttcattggtttaacaccatgcaattgcaattagccagccataactggcgtttctatgatatggtgtttccaattttataaaatgtgctgtaaacctcattatatcataaggattttacctaaagaaatgcatgagtgacccctaaaacactgcagaagttttgactggctatccactttccttctcctgtttcctcactaattttacagaagatagattttctttagaaattcaaacttttgaaattgacgatttaccttatc

SEQ ID NO: 10662 - DNA, 1044 bp, Homo sapiens
tctcaaactttatgctatcattggcatacattttattcctccatatattataaaagccatagtacattgttactgtttttgctttaaatcagttatctttttttattgtttattgtgctaaaacatacacaacataaattttaccatcttaaaaatttttacgtgcacagttcagtgttatattcataacgtaaactatcaccaccatctatctctgtagctcttttcatcttgcagaactgaaacgccatacctgttaaacagtaactccccattctcccttgccccatattccatctgccttctgattttactcctgtaagggtttcgtataaatggaatcaggcagtatttgtcgttttgtgactgacgtatttcatgtagcaaggttcgtctgtgttgcaccttgtttaaggaaatgctgtgtcagaatttcgttcctttttaaggctactgttttatataccacattttccttattcattcctccattgatgaacactcgggttgcttccacattttagctctcatgaatagtgctaccgtgaacacgggtgtataaataccttttcgagactgtgctttccgttcttttggtataaaatcaaaagaagagaaattgctggactatgagttaaccctattttcaattttttgaggaaccaccgtactgttttccacagcggctgtaccaactgacattcccaccagcggtacacaagcgttccagtttctccatatcccggccaacacttgttattttgtagtctttcgtgtgttttttaaatagtagccaccctaatgggtgtaaggtggcatcacatagttttgatttgcatttccctaatgattcatgatgttgagcatctcttcatgtgcttattggccatttctgttttttctttggagaaatatctattcaagttctcagcctatttttaaatcaggttttctgttgttgttgttactgagttttagaagttctctacatagttagatagttatccctaatcagatatacgatttgcaaatattttctcccgt

SEQ ID NO: 10663 - DNA, 1052 bp, Homo sapiens
tgtagctgttgggggacagggcctgaggggcagcagggagagaaaagaacaaagaaagaaagaagaatggttctttgtggggcagcaaactttcttctggttcccagcctgaatgtttctgatctggttttcttctttttgtgatgtttgaacttgtttcctcaactcagatgctgaactcttgtccaaaaaacctaagggcagcatagtgtgagagactgtgggaggcaagtccagcaatccagcaaaaagaattgcagaactgtgaagataaatgtgtgtccgtatcaggactgcgctggagaacgggaagagaggggttggggtgctaagactgtgtgtgtgtgtgtgtgtgtgtgtgtgtgtgtgtcttgacaaactgatgagaaacactattgagtagttttctcctctctgctctcacacacagtctggcactttcttcttctgtgacagctgccattaactttttaatgcgaagacaagggtatcttgccaattggatgttgaaatctctggcaaggaaaagcttgctttaaaaaaaaaagaggcagggaatatggggaaggttgggcagacataccaaaggtccgggggaagacagggtactaagttggaccttacaatgcagaatggctgccctgcttctgataaaatcccctcaaatgaagttgggaaaagaaagaggaaatgggagtgtgagtgtaagggagataaggaactcttttacgcagttgcaatgacacagatattaagtattatttgcaattcactcccgatggatgtgagaactcctcatggagttttggtgtatatgtgggaccttgtgctaaatgtagaataatcttgtttgtgcagaaagagaaggaaagagaaaatattaggagacctctgtagaccaaaacattatgatacaaaagattgttccagtcatttccttccatagcttatctcagagaaggggagttctggtgttcgtggctcgcctatcaggtcttcccctcacctctaaactacggcagctcttgatccttattactggtacctacccc

SEQ ID NO: 10664 - DNA, 1112 bp, Homo sapiens
ggttttcctccatctcaaaatagtgtctgttctcgctttgacacacaagattcgtggttataaatagcaagaaggaggaggtgtgtctccttggaaggatggcagtgctgaaagagacctcttaggcacccttgtgagaggagtgatggagctggcgtcttcatggtgatgacaagtccagcagtccaagggaagggtcacaattaaaaccagggctttttactaacagatgcaggtggcgcggacaacagggcaggacgtgaagggagtaaaggaacctaaagtgacaatggatgggtcaatacccaaaggcagtcaggagagacatctccccttccctttctttctcttcttaaagacagtcaggccaagggcgtgtgacactctgtgggatctgcctgccaggggagcaggagccaggctcggaggagctggctggtctttttccacccatggatttcatactttcccaggctctgatatcttatgtatttgaatatgaataggtgattgagcgtgtgtgtctgtgtgtttctccaaggtatctgaaaccggtcccctctttagttcatttggtgattgtaatatcaccaggggtttcttattgacttgaaactacccttttctaaaattttttctgtccaaaaagcataagttaaagggatattgccaaaattgctgggagccatatgctgcgaaaagaaaaaatctggaattcttcttcccttgtgtatttcaccctctgactctaggggcagctgaaagattttttgtttgctcttcttcaaggtcaagaaaggcagaggactaggctggtctgttctaatttttaattctaggatggttctgctgctttctggattgccgcagcctggcttctctagcatggagggaagtttttacgtgtggtgatagtccttgtcttctctgaaatagaaaccagtcagtccaaaaaagctctcgtgtcagcgagagctttttctctctggctccttttcaaaccgcctgccatttatctccttcatcttctaaccaggtcttcagagcccatctttgctccagcgctagtcctggatgcagtcctcagagtgtgtggtcgtggtggtagttac

SEQ ID NO: 10665 - DNA, 1046 bp, Homo sapiens
cctggcccatggatgaaacttagcaatatttcatccatgtcgtagcatgcatcagaatttccttccttttttaaggctgaataatattccattgcatgtgtatacaacattttgtttatcccccaatagaatattacttttttattttttaacttcaatttttatttgtagttgacaaataacaattgtaaatttacagggtacaatgtgatgtttcgatatatgtataccttgtggaatgattatatcaagctgacacatctatcacctcacatacttatccttttttgtagtgagtgcatttaaaatctattgttttagcaattttgagatatataatacattattattaactgtggttgccatgctgggtaatagatcttgaagaattattcctcctgtctaactggaactttctaccctttggtcaacatctgtgcattccccacccctcacccccagtatctggtaaccaccattctacactgtaattctataagtttgactttttaagataccacacataagtgatattatatggtatttatctctcttgcctggcttatttcactcagcatagtatcctccaggttcattcatgttgtcagaaatgacaggatttcctcctttttaaaggctgttagtaatccattgtatatatgccacattttctttatccattcatccattgatggacacttaggttgattccatatcttggttattatgaataatgctgaaatgaacatgggagtgcagatacctagtcaacatactgattccaatgattttggatctatatccataagtgggatcactagatcatatggtaattccatttttaggctttaaaaaatttatgaacaacagaaattcatttctcagttctggaggctgggaagttcaaaagacaggcaccagcaggtttggcctctggtgacggcttgttctccacttccaagatggtgccttcttgctgtgtcctcacatggcagaaggggtggaagagggaaggagcaagagcactcctctcagccattcttata

SEQ ID NO: 10666 - DNA, 1033 bp, Homo sapiens
cagcatcacaagtagctgggaccacaggcgtgcaccatcatgcctatttcattcgtttaaattgccttgaacagaattacattaataagggctctgatctcataaataacccaagattccttggtgttgaggctggaatcacagagccacctcctagaaaggcccatcgaagccttgggggagcctcagaactgcaggcttagggcggctgatggttcttttcctcctgtctgtgccagggtagcaaactgcatatcacagcagattacttggaagataactaaatgagatatagggatgaactccttgggatgctgggatatcagtgttggatttcataatatgcaaccacttttatggtgagggatttggaagccaactgctgtcggaattactgaaggtgccaacatgaggccaatatacgcaatataggcaaaacctatttatagtaatgtcccaaacaccatccaaattcttttgcagtataatactaaactgttgctgattaaatcttactgaagtctgtagaccataagctgggtttgaatttttttaaaaagtaaattttctctgtagcaatacatttaatggaatctgatctatattacttctgccaagaaggaattcagaattaccaattggagttaatgtggtacaaagaactagaaacctctcattctcaggaaatggacagggcagggggagtccttaatgaaaacactgtgtcagtaatttttgtggcttaagatcaccacgtgtagttccatgggttcagaatagattctcagagatgggggttatagtagaaagagcaaaggattaagcatcaggaaccagatttacccctagtcccgtaaccctgggtaatttacctgccttctttgtgttcccatttcctcacctataggaatggagggattgcgcagggtgcagtggctcgtgcctgtaaccccagcactgctgggggaccaaggtgggaagattgcttgaggccagaagttcaaggctgcagtgagttatgatagtgcccctg

SEQ ID NO: 10667 - DNA, 1048 bp, Homo sapiens
gtttagtttacaaaaccaggaaattattcctctggaccagagagagagagagagaacaagaaacaacaacaaaaaacccaaatggaatctataaagggaagacagatatattctacattgttcccattaaaatggaaaccccgtggggagaggaaatgcatctgtggaatgtagagtggatttctttcacatatgggcactcagtaaacattattaatgaatgataatgatttgtcagtgattgaaattgtttcagggcaggaacagggaatgaaatacgtagacattcctctatctcatggggaaactgctaggcaggtcatccagatgtattttctttggggagttgtgaattccttgtgtgtccagctatcactatgtaatgatattttacgttctcagtaatacatatcatcattatatatatcatcatcttatatgtatatatataatacccctgtacatagatatatgtacacatgtatatatttatatgtataaaattaaagtgtggaacttgtagtttcctgtcgaagaagcttgcaaattgcaattccatcctagcaagtaaaaagctgaacagactgaaaaagcaagtctccttggatccataaaggaagcgaggtctcagagcaaaccactgtccccagaactggagaaaccggcaggagaatgcagcttcacaaggtaccggagcagaagccctgggcagcagcctctgcccgagcagtgacaggcagggaaacctgagctgtcatcaccagagtgccggaggcgcagagcgggcaagtctggaagttaaagatccacgggaaccatgtcgttgtcccctctccctcaccttctggagcttccccgagttctcacagtgaataatggagaaaaatcccctcgtgcctcctgcagtgggaagaagaaaaaggaccattttgaaagagactgccgcactctgctcttcctaacgaggtcgcctcccctaaccccaccgcggctttatcagcgcctaactgacctgggggaagggaaactcccacgccagcccactcta

SEQ ID NO: 10668 - DNA, 1085 bp, Homo sapiens
cacactcacggcctctttacagcagctgcctttacccggtcacagccactatcaagaaaaagatataagacatactaaagggcaaatagggcctggcacggtggctgacgcctgtaatcccagcactttgggaggtcgaagcgggcggatcacctgaggtcaggagttcgagaccagcctggccaatatggcaaaaccccatctctactaaaaataaaaattaaaaaaaaggaaaagaaagaaaagaaaaattagctgggcgtggtggcaagcacctgtaatcccagctgctcaggaggctgaggcaagagaaccgcttgaaccgggaggcagaggttgcagtgagccaagatcgcgccactgtactgcagcctgggcgacagagtggtactctgtctcaaaaataataataataataaaatgaaataagaatcaaataacacatgttgaagggacagagcaagcttcacaaccagactcagagacagcagggatgctggaattaccaggcgggaaattgaaagcagctctgattaatgtgaggggctgtaatggataaagtaggcagcatgcaggaacaggtgcgcaatgaaagcagggagatgggaatctaagaaaaaaccaaatgaagtgacagagagcaaagcacggtgacggaaatgaagaatgccgctgatgggctttgatggatttgtggactggacacagctgaggagaggatctctgagcataaggttatctcaatagaaacctccacatgtgaaaagggaaaagaaaacccacccacacgcacacgcgcgcacacacgtgcgcacacacacagaacagaatatccaagaactgtgggacatctacaaaaggtgtagcatgtgtaatgggaataccaggaggaggagaaagaagaaatacttgaaatggtaatgacagatttctccaaattaatgtcagacactaaaccacagatccaggaatctcagagaatcaggacaaatgccagaaaaactacacctgggcatatcattttcaaactgcagaaaatcaaagataaagaaaaagtcctggaaggggccagagtgaaaaaaaca

SEQ ID NO: 10669 - DNA, 1037 bp, Homo sapiens
agggaagacagccaatcaagagtgggttatcacaccggtgatggacgtggccactggggccaaacctgctggggaagtcagccggggtacaacatgtgtccttatacaacggctcctgcctgtccctggttgagggctgtcacagggagcactcatctctggcatctccttcctaccggggtgggcaagagggctccgcaaaaaaagtgcaggagctggtggtcagaaggtggggtctcgtgcctgaagggtgaaggtgggaaatgtgggtgggcatggctgtgtgctctgcctggaatacctgcctgctgagctgacgctgatttcacgccgtggggttccctgtaggctctcctgggtctgatggtgagtagaatgtctagcattttgtctggttttgcaagtgaaaaaagtgaggcaggggaagggcagtcaagttaaggactaagtgagcaaagcagaacggaacccaagtgtctcgatcacttttgcccatcttagtcagaacatacactgaatagtcaatgaatgaatctttgatgacgtgaccatcgagaccaagcggtagtaattctcctcggcctctcttgatctttttccctttggtggtcctcccaggtggtgtggtcatgatgggaggagcagtgatggtgtagaccaagctgcctagtgtcgccatgtaatgcagctccatctacccttgtctgctgctcctccagatgagcggttgctgcaggacagtggtaggttaaataggccattattgtccatagtcctttctctgtgtggcatgtgtttatcactaataatcggtcattgctatgactgcctgattgcatggtccttcagccactattttagaatcttgtatatatcttatactttatacatatactcatgtatcaaaagcatgctattgcatggcagtaggtgtaaaacagtttcttttttctggtggggttttttttgtttgtttgttttgtttttttgagacagagtttttgctcttgttggccaggctggagtgcaatggcatg

SEQ ID NO: 10670 - DNA, 1057 bp, Homo sapiens
gctagaaatgcaaaggtaaatgccagtactgtctgggaggcattctctgacccctagaccaggtcagggcctcctgatttgggttacgttagtatctggtgttacattttttgtctgtcttctccacaatactgtaagctttgttaggctggaactaaggtctgttctttgctgtatcctcagcccctatcacaggacagggtgcctcgtagaagctcagcacatacgttcaaccttgtcagctgaatgccaccccagccacgcacgactagggggtccttctagggacagcagtgatgtaaagaggatgtaacattgcggggccagaagtgccgataccggaggctcaggcagctgaggggcacagagatagcaatgggaggctgcacagtgttcattcaagccaggacttaaagggtgaggaagagttctccagtcaaacagagagggaagaacattctatgtccatgggtacaacatacataagtgcacagaagagtgaaatgaggccgggcctggtggctcacacctgtaatcccaacactttgggaggccaaggcgggcggatcacctgaggtcaagagtttgagaccagcctgaccaacatggagaaaccttgtctctactacaaataacacaattagctgggcgtggtggcgcatgcctgtaatcccagctactcaggaagctgaggcaggagaatcgcttgaacctgggaggtggaggttttggtgagctgagatcgcaccattgcactccagcctgggcaacaagagcgaaactccgtctcaaaaaaaagaaaaaaaaaaaaaagagtgaaatggttgtgtgtgaccagaataagaggctgcgattcaggaggatgagaactggcaggagatgtagcttggggtgtaattgggaccactgtaatggggttaggactttgttctttatgaaacaggaagtgagtggagactttgaaacaagatagtcatacgatcctatgacatttttaggatgaaatctctggggatagaatacagagatgatgaaacctgccccctgaaaaatgcag

SEQ ID NO: 10671 - DNA, 1051 bp, Homo sapiens
tgggtggagcctggggtgaggggaggctggtggcagccgtgtgggtggaggctggggtgaggggaggctggcagcagcggtgtggatggaggctggggtgggggaggctggcagcagtggaggcacctcgggaggcagggacaaggatagcaactgagtgctggtaaaggccaccctgctaagtagccagaaagtttgcagaaccttcttttgagggatctgaagttcaagttctcaaatgctccagatcctcagtgttcaagaacctcaggaagcttcgcagtcctgcctcgtgcctgcttgaacagctggatgtgggcaggaggctgtgggagcgggccatgccagcagaatcccgccttactctggggacttactcttgtcacagcccctggtgtcctgagggtcatttcagtgtcatgtgagtattactgtggctattggaaaggatttggtacgagtttatttgagaagttaggagctttttttaaaaaaaaaaattatctttgataaatttagtagaatattttgaaagtactttttggacagtaatgaatgaacaaattgctcctgaactagaaggagggatctaaacacatcatctaagtacaacagtatgtctgaaaaatatctctgcttgtcttttatttgccctttaaagtctgtgcaaacaaatgtgaacagcctcaggactctaagaataatatttttctatggatgtgtatggacagataaacaaaaccccaagggagaaaaaacttctatttaaataaaaataaagatcccctacagctccatcctcctttgctcactgggtttgctgtatttcattttgagataaaagtagtttggatgattaacagttgaacaaaaagaaagtatttgtgtctgtctaaatctatctctatcaatgtaatctatcttatttctctaatcttatctatctgtcttatctatcgacctaactgtccatctggttttgaatattccgtattccagccataagtagtagatcttttgcatccctggggttaatggttccttgagcaga

SEQ ID NO: 10672 - DNA, 1054 bp, Homo sapiens
gtagtatttgtgcttctctctatccagttctcagttgtttagggatcttctgagggcaaaccaaaaatgtcagtaaagcaaaaatatatcaataaggcatcatactgacgaaaacaaaaccagaggttttaaaaaataatctgggccgggcacggtggctcacgcctgtaatcccagcactttgggaggctgaggtgggtggatcacctgaggtcaggagttcaagaccagctatggtcaacatggtgaaaccccgtctctactaaaacacaaaaattagccgggcatgatggcgcacacctgtaatcccagctactcgagaggctgaggtgggagaatcgcttgaggggagtgggaggttgcagtgagccgagatcgcaccattgcactccagtctcggtgatagggtgagactccatttaaaaaaaaaaaaaaatgtagttatcaattttttgtttttgaccaaaagtatttcaggaactttgaagaaaggacctgaaaattattactcaggctggtatttagtttgctgacttttaactctcagagctgaacagtctaatccttgatcattccagagtgagtttaggaatttgtagtcatttcctttttactgggtatttgcatacatcactaaccagctgggattagaatgagcagtctctcgatgctgaaatggaatgatgagaactcagggccagcctgaaatgttcatcctcatcgattaatccttaatgaacactcatgcatagatgacatcaaagaaggtcctttgcaatgtacagggaagacaaaccagcttccatagtgtacattcttaaaggaaggttccaatagaccgatacacatagttaacattttgtatttttatccatgttttgccccaagattaaacattaggagtaacgtggacatttgctcagtgtcgagggaagggtcagtgcatataactaggaagaaggctatctggcagggttgggaacgtgacctcttgccctccaaagcctgggatgctgaagtgaatgcctccaatcttgcggtgtatggacacaga

SEQ ID NO: 10673 - DNA, 1045 bp, Homo sapiens
tcaaaaaaaaaaaaaaaaaaaaaagatcaagaccttgtctcaaaaaaaaaaaaaaaaaaagacaggaaggcaggaagacaggaaggaagggagggagggagggagggaaatggagaaatggagcctaggtttgaatcctggctccctcacttactggttgggtaacttacggcaggaattatgacttatctggaaaacagggataatacctgtttcagcaggttgctttgaagattaaaacttacaagtaccttgtaaaacacacataggttctcaacacgttaattgctttccatccaaaaaggttgagagatgagcagttgaccttcactaaccactctaggtggtttatcatctttcccagagaagctccggctatatactaagtatgcctcattcaggataaggatatagctagacccatggtcgtaactttcaaacatcaatttgccgacctttagtcaagcgtatatttaacatttaacgtaaaaaggagacaaaacagaagaacgtgcttcacgttacaggtggtaggaatattttgcctattaaaatgaagaatgtgaatacagagcctaagacttgggtgctcaaatttttatcaattgaatctgtacagccatgcagtctcttggaagaaaaacagactaagaacccactgccgtgtaaccttcaggagttgtgtcaaatgctggattagaaagctgaccctaattcagagtccctacttcttaataggcttcacacttttttttttttccaggcattaagcactgtaacctaagtgggaagaaagagatccacaccttccccaaagaaacagaagatggatctagtgtcaggctcaattagacccaattgtgatgactctccaaaaaggaacaatgcggcttttgtgatatgctcaggcagaaagcttggacattttacaaaacaatcttatcccaagagaaacctgggttccagccctcttcctggaaagaggggttgatccaggaaagttttatactactcttatcagctcttgctgagatcagtatttttt

SEQ ID NO: 10674 - DNA, 1032 bp, Homo sapiens
ggtctcgatctcctgacctcgtggtccgcccgccccggcctcccaaagggctgggattacgggctgagccaccgcgccgggccagggacttgttttcttccgggtggtttcgcagggctgagctggggcccagcggcggaagtaaaacagcagatttcagcccattataaagagacgtttccaagcgttagagctacgggaagcgaagccccctgccccaggggtgtcagcagagccgtggcgtgcgggtccgtcgggggagacggggggaaggacaggtccccgggagaggagagcgcacccgcttaccgccctggcctcattctgcaggcagccgagagaccgccttcacccacgcggtgagcgccgcgggcgtggtcaacgccatcagccgggcctgccgcgagggcgagctctccacctgcggctgcagccggacggcgcggcccaaggacctgccccgggactggctgtggggcggctgtggggacaacgtggagtacggctaccgcttcgccaaggagtttgtggatgcccgggagcgagagaagaactttgccaaaggatcagaggagcagggccgggtgctcatgaacctgcaaaacaacgaggccggtcgcagggtaagctgggcctccccggcctccccagcactgcagacctagggggctgttcccgggctgtgccaccagccgtggcctggccttcaaggaaacgggttagtctgaccgtgaagattcttacctacgattgcaaatttacatgtccacgttattgaacaaatccttttcaaaatgccccacttcccaatgggcatacgtgctttttcttttcttttcttcttttctttttacttactttattatttcacggttcctagaggacttaggtgcaatgtttggatcagaattccagacgtaaggattagagcagcgctcttgtcttggccacccctcctttgcaacttgaatagataatgcgatgggatgtttaggccgttagacctcatctagggtttatgctctgttaaag

SEQ ID NO: 10675 - DNA, 1034 bp, Homo sapiens
attacacttttttttagcagctttagatgtacagaaatttgagccgatagcacagaaagttcccatattcccttcccttccctcgtttctcctattgcaaacatcttgcattaatttggcacatttattgcatttgatgagcccatatcaatatgttgttatttattggtctatagtttacatagggcttattctttgtgttgcagttttttttttttttttgttttgtttttttaagatctcactctgtatctcaggctggagtgcactggtgccgtcatggctctgcagcctcgacctcccgggctcaagcgatcctcccaccttagcctcccaaagtgttagggttacagacatgagccactgcacttggccgagagttattttttacaaaaatgggatcaagcccagtggtggcttgcgcctgtagttccagctacttgggaggttgaggtgggaggattgcttgaggctaggagtttgagaccagtctgggcaacacagcatgactctgaccagtctgggcaacacagcatgactctgtctcttaaaaaaaaaaaaaagtgggctgagggtggtggctaacgtcggtaatccttgcactttgggaggccaaggcaggtggatcacctgaggtcaggagttcgggaccagcctggccaacatgaatgaaaccccctctctaccaaaaatatattaaaaaaaaaattatctgggtatggtggcgcgcgcctgtaatcccaactactcaggaggctgaggcaggagaatcgcttgaaactgggaggtggaggttgcagtgaaccgagattgcaccactgcgctctagcctgggcaacaggagcaaaactccatctcaaaaaaaaaaaaaaaaaatgacgaaacccgtcattcagcagtcattcaccttttttggtggttttcaggatatagtgcttttggactttctaatgtaaacattcttgatttactaattttcagattaatgacaatttattttgggaatggaaggctggcttggatgttactttttc

SEQ ID NO: 10676 - DNA, 1062 bp, Homo sapiens
caggtccccttccatgctgtggaagcttttttctttcgctcttcacaataaatcttgctgctgctcactctttgggtccgtgccacctttaagagctgtaacactcaccgtgaaggtctgcggcttcattcttgaagttagcgagaccacgagcccactggaaggaaccaactctggacacatcttggtgacccagacgggaccattggaccccttttgcttgctattctgtcctatttttccttacaattcaggggctaaacaccagggcacctgtcggccagttaaaagcaactagcgcggccaccggactaaagacacgggtgttaggctttctgggaaagggctctctaacaacccccgactcttcagagttgggagcgttggtttgcctggaaccagcttcctctttgcctgtacttctgggctgagccaagggttgacaagaggggaaagccattcagctgcggggtcccaacaaaaagttggttgaccctgtagccatgaggggaactctgtaggtcagccaaaggttcagtgggtcggtccaggggtccttggtagaagttgttagttgaactcatttggggttccatttgtaagaccatctatagcttgatggcatcgatcctggaggaaacaaatttgacaaggagtttaaaaatacgggcctgaaggcgagtaatagcaagatggctgttacgggacctagaaaggggagaagccatgttgcccagctccagaggttggtataagagtttgaaaggcgttgtctgatttcagaagccttttcctgtaaacgccaggtggcgtctcatactatccctcactggttagtgtaaaagcaacattcttcccctaagaaggtgcatagtcctcctttctcagcagtgaggaagtctaggccttggcggttttggagagtcactgctgccaaagagtctatctgggattgtagaggaaggatagattttgttatttcttgcaagctgtctgagaaatcctttgagagtgtgtggtagtaggataatgaagtagataaatctgctattccaattcctg

SEQ ID NO: 10677 - DNA, 1017 bp, Homo sapiens
ttttttttttttttgaggcagagttttgctcttgttgcccaggctggagtgcaatggcgtcatctcagctcaccacaacctccgcctcccgggttcaagcaattctcctgcctcagcctcccgagtaggtgggattacaggcatgtgccaccacacccggctaattttttgtatttttagtagagatggggttcgagctcctgacctcaggtgatccacccaccttggcctcccagagtgctgggattaaagccttagccaccatgcccggcaaaaatatatttttcatcagtctttaaagaactcagaatataagacattatacattttgagatgtttgcctttttaaaaatgaattgtttttcccattataaaacagtgtgataagacacagttgttaggggtcagtgttggtaaattgacaactaaaatcacaaagatgtttgataatacctctctgccaggtatgggaaggtcggtggcgagtgatccctcatgatgtactaccagactggctcaaggataatgacttcctcttgcatggacaccggcctcctatgccttctttccgggcctgttttaagagcattttcagaatacacacagaaacaggcaacatttggacacatctcttaggtatgtaatgtcagtgatgtaatgagctggtgattcactttcttcctttttattttcatgtatttgagggtaagcacagaacttcagaaatgtatttggatttgccattttgttttctgaatttctaatgatgaattttctgactggtttactcgtagtttatcctggtttgcactatgattttgttataacttaagttatatttctttctactagattttcagatcttgtcctcaaaccaggccaagtaaaagttgctatacaaaatgtggtttcatattgtagtgaccactgagaagaaagtattatttaatagaagtaatctgatcttttaaaatgcattacttatatgcactgctaattttcagtttggcctgaagt

SEQ ID NO: 10678 - DNA, 1034 bp, Homo sapiens
tctcagtggaagcagcacatgagtgggtgacaggatgttagataaaggctctagttagggtgtcattgtcatttgagagactgacacactcctagcagctggtaaaggggtgctggaggccatggaggagctctagaaacattagcatgggctgatctgattacttcctggcatcccgctcacttttatgggaagtcttattagagggatgggacagttttccatatccttgctgtggagctctggaacactctctaaatttccctctattaaaaatcactgccctaactacacttcctccttgagggaatagaaatggacctttctctgacatagttcttggcatgggagccagccacaaatgagattctgacgtgtccaggtttctcctgagctcatctacatagattggtagacccttcctttggattaggaaagatgagttttacctctggtacactgtcttggtaagcctggatgtgacagacacctcggctctccttgaataagaaagccagcagaactcttaaagccagttgtagtacggagttgtcagcactcactgaacctcactttacagggataagagtggtgtggcattttaaatacaatggtatgttattgccagggagtgaggtacaagacgatggctcatgtcacaggcctacctgatacggtgtcagagaaagtggtggggaaaggatctggttcatggaattctgatcttggcccataggtgaaccaccaaaatagtgctcgagtcttaggttactgtcatcaaagacttgggatgactccattatatcctggggttgtgggtattagaactaaatatggaggtcctgagcatggggactggcgtcctcagtaggtgtttgggaatatgggaagggtctcctatttattcaatagagttttctcagttattttcctcccttgcccttgcaatctccagcaaaaggtgggatctaggaagaaagaatccagtgtagaagttgagaagaacttgaacgttttggttctggataaggtca

SEQ ID NO: 10679 - DNA, 1473 bp, Homo sapiens
ttcccgggctcacacctttgggaaatgctgctctgtgttgccccaagaaccgatgcattaggagaaaggacagagctggaaacgggatgagacacgttgcaaggctggtgtaggaaaggagcaaagaccacaggactgtcttcatcaggaacatggcatttcaaaatagatggcagcttctggatgggtctgtgcttcatctcatggtcataaacccgcagagagcctggggcaattgtttgactcagggtttactcactaaatatttcagagagaggagaaagcattgtctgctctgcgtttgccagcggatgggaaaagagagatgatgatttgaagtctaaatatggtgacacctcttgctccagttttatccatctttattcattttttgggggagaatcttccaaataaattcactgtttatgtaatagaacccctttcatgtaccaaacttcttgtaatttaagtatatttgaaggaagtctttccagaatataaaatacaaatccctggatccttaaaagaaaaatctgaacatatttcatcctttttctgggactatacaattcttaggaatttcaatgattgcacctgttgtaatgctggggagctgtcaggagagctaagcaacccgcacagggtcccggaacgtcctgacctggggaagatttgggatgtgcctttcatgcaccaccctgttggggtgtcagcctcctccagcaccagcctgattaatttgctcccccctctctcctgcaggcttgggaaccagttgatcaagtccattacagttatgtgcaaagttagagtaaatagatcctgattgaggacctatggggcttacttatgaataaagtgcattagctttaatttatgggttttataacattgattttggcttcttagaagccatttttcccctttattctctttgttctctctagtttctgtatgattgaagttgttggattggcgccttctaactaataataatagcagcaataacttcagcccttacgctgctggcattgctctatggtccgtgtgttaactcatttagtcccctcgactaccccatgagacctttcttttttttttttttttttttaatgccaaacattacattttattacctttgagcttattaaccagctttgcgtttattagcaaatacatttaaatatctcttttttttttcttttctttttttattatactttaggttttagggtacatgtgcacattgtgcaggttagttacatatgtatacatgtgccatgctggtgcgctgcacccactaactcatcatctagcattaggtatatctcccaatgctatccctcccccctccccccaccccaccacagtccccagagtgtgatattccctttcctgtgtccatgtgatctcattgttcaattcccacctatgagtgagaatatgcggtgtttggttttttgttcttgtgat

SEQ ID NO: 10680 - DNA, 1064 bp, Homo sapiens
tgcttcaacccaggagttcaaggcagcagtgagctatgattacaccagggtgatggggcgagaccccatgtttattttttaaaatgctctggaaaaatgcaaagtgccatataaacatagaggcattattgtgatcattattactgttatgattcaaactagacagatatatttgtctctaaaatacttactgtttttttttttctggcacattcctctgtgaacctttttcctcagcctcctctcaagataacttagagatgcaaaagaactagaagccaagttccaaatttagttcttgacctttccaagatgggtggtgagtggtgtggctgcaacctgcctgctgccaagagtctggcagggctgccggggtccgggagcgccaggccagtggaccctgtctttgtgtgcagtcctggagccgacacatcgcctcacacaggcgcccctgccgggagctcatgcgggccactccctgttttctcactgggtctagctgaactctggcacagcgagtgtagctgctgagtagttcgtttggtgctgtcctgtgacttgcaaaccccttcctcaaatgcatagcagaaatagtgggaaaaccccagggcttttattatctgggctctcgggcacacagtcagaaacatggcctggggcagcctctcttctctgtgcctttgagtcctgaggaacaaggtcaggcatcaagaataaggaaggccaggatatccaggaggagacctcacgtctgcaccgaggcttcatcagatctgactggaagtgctgtggtccctgtggccaggccagccttcacagggctggggagcacaagccttggtgtggcctgtgcttgcagatggatcctggttgtgtgggggaaggcaggtggcaggtggtggatgctatgcttgagggctgggctgtgtacgcagctcacagtgtggaggtgcttgaaccctggcagttgggcacggttgatagggacgggccttgtgggagaaggtgtcgaaggccagggtgtggctccgagtcccacttctgctagactgaccagagagagc

SEQ ID NO: 10681 - DNA, 1048 bp, Homo sapiens
gggctggctctgggcagacctggggaggaggctgcgggcaggggacagcagggccaggaccccgaggtgagcagggcccactgtggctgctgctcaggaggggagatgaaggaggatgtgagtggggttggaggggcagacaggggctgaattatgtgggtcagcatgaggagtttgttgtgagtgtgacgttggcaggtctgtgtgcttcccaaggctccagaggagcaggaaggatctggaggagggttaggaaggtagcagagataggcgagggttacggccttgactttagcattcccagagcagttgatgtggttgccagagggcctggccagagctcactggggaagaaagccctggacggtgcaagctgccatttcttgaagggaagtcggtcatggaaacatgtcaaagggacctgccagaagcttctgggacacaaggctcttgtgaggtgttttcccgtctcttttgtgtacactgtgggcttggccatccagccttcatttccctagcaacttctctacatccagatccataagagaaacctttctggtcaccccataagggatgcaagctccgtaacgagcactcaggctcctcgctgatgggggctgcgaggttccagaaggttggcccatgcagcaggccactccttagcgcctctggccctgggtagactttggcctcaggggaaaggagcgtggagacagctgtggacacccagattgctgtatatctgacagcgcttggcccccatctatctggaagtggggtgaggcagactgcattttcaagctcaaccctttcctttatggcagctggggtgggtgaccagccctgtgtaagccataataacccagcctgcatgaggataccataaagcggaagccgggcggctctttgaagggatgacgtgggaagggtatcctctcctttccagcattccttcatttggggagcactgcctccttgggacaagactctgtattggggaggcagcactgaatggggaagtccctggtctggtgggggacagccacca

SEQ ID NO: 10682 - DNA, 1061 bp, Homo sapiens
tctaaaaattaatattactaattatgataatctcacaattttatgtctgcttttcttctgaagagctcaaaatgcaagtattaaaataatatgtccaaatatcctacattaggaagaaaggaggacccacggagaagttgggaagatggcatccaacgttaagataaggctcccgtctttctcttgtctttatctctgacttcataaagatagctagtctttcctggcaataagccagaatagtgataggattagggaaacgggattatcttaacgtcacagaaaggagatgaggcacaaataagggaatgaagctaattagatactgcaaaatgccaagattggagaaaactggaatagacttaccctgatggaccttgtctgtggagaacggatatagggtgggtccagggagactggccagccttggctggggcctcatgggaccagaagtggcagtggacagcagagttggtgaggagctgggagggggattcaccaggaaggactgagttctgaatggcagggacgtttgcagacaggagactggcgtctgtccaggagagagcagggcttactgtgagcgagggaagcagtgggatgagtgtgtccggcggtgtctcttacttaagagtgacaaaggaagagtgcaggagtttccgtgtttggccctaacccaggtccacttcactgccctgagagatgtagtgggatgatggaggggactgggggcagagtggatatttaagtctgaggggagaagttaggaaagggttgtgggtcacagaattagagagttaccaaggaaactgcagagaccattacttagtcagttctccatttccaggaaggtttgtcaccataggaaagaaattcattaaccttttattcaacgggtattaattggctatcatgtgcttttcttaccccacaagagcttatgatggaaggtgatcatacaatttatcatccaaattgggatacatttgagaaggaaaggcggcagattatgtgggaacaaagactggcccatgccagctgggacatgtggtcaccttact

SEQ ID NO: 10683 - DNA, 1035 bp, Homo sapiens
ctgttggtgagccttctggtcaatagtaggctatgagtagttaagtctctggggagtaagaagttaccttggattttcaactgtaagggagtcagcgcccccagtccccacattgtttaggggcaaactgcattccatcttcttggactgctcttcccacaggtgttgcccccctcccttttcctctgtcaggtcccagagcatgggttaccaccacagagaggcctctgtggatgcctatgtaaagtggcaccatttacttcagccgagaggtgaaggctgccgtgaggcaggaccatatcactgcactcagtctgggcaacagagtgaggccctggctcaaaaataataccaataataaaaaaaagtgctaccatcctcccagctcctcactcccaggaatcactcaggagcccatggttctgtcttattttgttcatcgcacaattactatctgaaatgatctcatttatttacttattttttgtctgcctcccaccagaatgttctctgttctctgccgtatccttagcactgagcagtgcctgcacatggtgagcactcgacaaaaatttattataaggatgaatgaatggatggaccctcgattctgttattattatgttttaatccagacaacactcaggagtttcactgtatcagtatatccattaggaaggttagtaatgtgtaaaaactctcctgtgaatgctttcattcagtactcagtctgtaaggggtaaatccttcagcagactcttgaggagtgtttaccaagtgtcaggcactattctagagcagtggctctaacctagggatgattttgccttccaggggcagctgtcaatgtctaggaacatttttggttgtcagggtgggtggtaggttgctactggcatctagcggatagaggccagggaagccgctaaacatcctgccatgcacaggacagccccacaacaaagaatcatctggcacaaaatgtcaatagtgtcaatagtgtgaggttgagaaaccttgttctggagtctgagg

SEQ ID NO: 10684 - DNA, 1024 bp, Homo sapiens
agcctctcactccctgagatgcagggccctcagtggatgtccagtaaatgtttattgacaacgcgtctcctgcaggttaatcatcaacaacatgcaacaatatcccagatatgaccggctccctccaaagagagaaacctgctttatggcaaactcattgacttttcttcaggaagaaaatttctgctggtgcagcaccatattctgcaggagtttggatagggtgtgctggaaagacagggatatttttccctaaaggcagtgcataggggcagaggggcaaaactcccttttttattcctgtagtgcttgtactggggcagaggaagcagatgcattaccaagagcgtggaaagaagtcctacgtccagcctagagctcagcgcatctttcagctgccaaatggaaggtctctctgtggcaatgctggggagggaaattgagttaggatggcttgttccaaataaaatgctatatttaatttcactctgggaaacatttgatgtccgggctactgtaatacgtgaaatagatttaagaagatcctttttttgttagaacaacagaaaatacaaaacagggaggttctcagatcagttgcaggttgcacgtaggggtctgatcatttcagtgtggtttttaagcatctggcagctgctggccaacggttgactagtcagtatctagcagcctgagtgtcactgtatgcgttgaatctgtctcagtagttcagcctctgaaatgcctttcaagttaagccaaggcattcggcacaggaatgggaaactgtcagtttgtaaatctgggatgtgtatttgtgtgcttgacatgtggaagggaagggttgagtatgaaccaatgctgagttagatcaacaaatatgtatctgactatatgatctaaaaatcagccaggtagagttccatctccagaactgctgtcccttttatgatggtcataagcgccatggctgctggacgcttctctccctttgtggagctctgccctggtgcatttctgggct

SEQ ID NO: 10685 - DNA, 1032 bp, Homo sapiens
agtgtgcccagcaacctgagcagaggcgatagttgaagtgaaccaagttctcctgagaaatggaggggagtggtgccgggcccacactaggctgtggtatcttcctccctacagtgaggggcttctgtttactctgaagactccagacactcaaaatctcctcccctccctccagtcctgcagttagcctccaggggtttctggtcctaaacttccaccaccatgagattactacaatgccttgtgatactcttgttcttctggtttgagttttggtagataagcacatctgagtcttgctgtgttaatgtgtctgtattttggtgtatctgcttgcttgtcgtgtggggcatatgccaagtccagtagtggatgggctggggaagaccagaccttatcacatggtgcccttggggggaaatcttaattccaatgtgtgaaaccagtgaaagtatgattttctgggtcaattttaaaaatatacgttcaagcaaaaagcaacctgttatctcttctctttctgcctctgcacacagcagcctccattgcctagggtatgatagtgtgggttcactttgtccatctcatttggatgacatcagcgaagatgcattctgtatctctccactgaggcctgtgacaggacctaatgttttgtggagctgagagaaaataaaccaaaatgacccaatggaatataaatgctgatttctgttcctgttgtttgacagaaaggaagtaatgaactaagatgcagtagcctggccacgtgatgtcttgacaggcagctttcagatttggagatgcttcagagtgttgtattgagtctctgggaagaccctaagcactcaattcctagtggtcaatggttggcctgttttgagacataaccagttggaaggaaggatgggcctttctgctccctatgatgttgccttaaaaagacatttcctgggaagaactgggcagatggtggctttaatctcactagccttgttcttcatttttatatccaagcttcaaaaaaccagc

SEQ ID NO: 10686 - DNA, 1190 bp, Homo sapiens
attcggggtgtgacaggcaggccctctctcctagatccaggtccatttactaatgtccttgcccatccatgcctgcaagaaggaagagatgtctgaactgccaggaggtggtggctacagatggtccctggcacagcaagaaggcagtgccaatcaaaggaggtcggcctcttcaattagaactctgagcagatggggctgaggcagccagaaggggcacttcccagtttactaagtgtgtgacagtaagctggtggccttcagaagaccaggagggtcacctggttcatttcctttctggaaggaagggcagtgtttaggataagtcagatgagattcctcctcattggacagataataagctttattgtgagttaagcaatatgcttggccctacggatatcacattaaacaaaatagacctgaccctgaccttactagtttacaatcacacgatcctgaccttactagtttacaatcacaggatcctgacctgactagtttacaatcacacgaccctgacctgactagtttacaatcacacgaccctgaccttactagtttacaaccacacgaccctgacctgactagtttacaatcacacgaccctgacctgactagtttacaatcacacgaccctgacctgactagtttacaatcacacgatcctgacctgactactttacaatcacacgatcctgaccttactagtttacaatcacacctcctgtttcttgccacttgcacacaactcagggatggggtaggaggaggaatatcataaatgcaaattcctgtgccttacactggagctactagatcagactacctggaggctaagcccaggaatctacatttttaacaagcttcatagttcagccttgcacatattaaattttgagaactggttacttctccatcaatgcatggggtaatcagtcaccttgggcacattggtgtcttaaaaatgacttaaacacataattggaactgttttgctaagtctagcctgtgtctacgttgctagaaaagccctttttccccttattctgatggtatagaagaaaacaactgcttaaatcaaatgaattaatgtgttgattgagctttcattacctgtctagcttcatgctgtttggaaaataaatataaaagctataatcctggcccctgatgagcgtacagggttc

SEQ ID NO: 10687 - DNA, 1022 bp, Homo sapiens
taagtagtattattacacacaaggaaactgaggtgctcggagaggctacataactgaacccaagtcagggaccccaactcaggtttgtttgactccagggcctacattctattcccttcagttccctcaacaggaaagatggggcaacatcctgtcctgtcctctgcctcccagttaaaaaaaaaaatatatatatatatatatatgtatgggaataaagacttcttgatgtgtatcaccaacatatctaatttggttttgaatgtgggggaggcaaaatgacattgacagataataggacttacatgaaattctggtttgtttagagatgctataaagagcttggcattgtcgactcatttggaaattcgacttccaaaggagcaaatgcaaagtatttctcaagccccagccctccatttttagatctgaagagggaaacaacaaggtaggtaactgaaagtctggagttgtttctatttagttgttcctaaaggcagggggatggactagaggaaacctgcaagggctttcgactcacagggttctttcattctgtgggcaccagttctctgggcatgagagatgccaaggagctggtgtgttttggagagctcatgctctgaagcacatcagaagaaccaatggttgccgcaagacccccttcctaatgcagatggagttttctgtgaatcccggaaggtgcacttgggtgggagggagttgaggggtagaaaaaggaagacagcccctacgttcagcagaacccagggctgatgtctgcaacagcataaagtgccttctagagtctaatcctggtcatccgtgtagcatctcttcttctctaaaccctcatcctaggctttctttcacgcttatggccacacacagtgaggctttcctctctgcccggaatccacagggcatcacccttcctctggagccagcttggggctttcctgacgtcagtagttttgggggaagccagtgtcacctcatctctgtcttgaagcatatttaac

SEQ ID NO: 10688 - DNA, 1053 bp, Homo sapiens
ttgctggaggctacctacttaccctctctcccccaaaggagaaagacttcagtatcctgcagcgtggcagtggggcaggcgtgcgggtgtgcacatgcgagctgttctgttgttgagactctagttgttgccggttcctccctctttatatgaagcaaggcaacacccacaacaaagcactgtaatctctccattgaccatccttctgccctcagatcaacacaagggccaattccattccaacagcattatacgactttgaaaatactctttgtgtcccgccagaacctcctcctcttctcttcagtttcttcctcatatgacacagcttccagaccctaaccaccctgggtgtctgctttgggtgtacagtagtttttcaggataatgcccagaactaaacccaatactaatagtggtctgctcagagaggggtatgggaattttatcatctgttctgttttgacttccatatgtccaacattatcccccaatgttgcatttcaaccgtcataccatcctttccttaaaaaagcttgtgatcatctgaagcctcagggattttttttttacatgaatgactgttgagcaagggctccccagtcctgaaattaggtaaatttatttaacttaaactcagaaatttactagaaatcttattcattatgttaaaatcagggcctttgatatccagatactgagtcctgactccctcacccactgtccttccctagctttgggtgtgtctatgtcttcatctgagttagaattctatatagcagaacttgattgaaatgctgtacagaattggcctgggagtacagagaccaccttttcagtttatatcaatcagagtcatgtgggtgtggtaaggccgccctgagtccacccagccaccaccatccagcttgggcttctccactttgctcccaaggattgatggagagtgtgcgaggactggttaaagagatgtatgctgtgatagacagggcaggctagcagggggatgtggtgcctggcatgtggcaggcatccactacattctgcgggctg

SEQ ID NO: 10689 - DNA, 1021 bp, Homo sapiens
tattcagatgcccagggacatgttccagcggaggctacccaggataacatttctatctcactgaggtttttttggagccttcaaaattccatgatctgatattttaaagtaaaagctttaaatataaatgtcattgaggtacagcacacagacggcaaaatgcaaacattgtgagtgcacagcatgaattctcacctcgtgcacacggctgtgtcgccagcacccgggtcaagacacagaacgttactcacacctctcgtgccccaactagtcactgcctcccttccccaggaaccactgccctgactcctaaatggcatagatccatttcccctcttgttgtacttgatataaactcatgaagtctatatttttgtctagatttcttgactcagaatcatgttcatgagattcatccatgcctgtagttttaaagttgttcatgttcatcggtgtatagtattccattgttcatgttcatcagtgtatagtgttccattgtacaagtgtgccacggtgtttctacccattctgtcattgatggatattttctgtctttttttaatggagaacatatgcatgtactttaattacctgtaatgcctaggagtagaattgctgggttgtagggtgtgtgcctatgtttagctcaattattgccagttttacaaagtggttttgcaactgagaagttttttcaatgtagaaaatgtgagaacatttatctcctcagcccctgccgacttgcctttatgaaagaaaacacagaggtggggacttgtgcaaggtgaggactgctatttcttgattcctggcctagttgcctttctattagcctgcaaggaacctctcttttgacggacatgagagaaaaggacacgtcctcctctctcccgggtcacactttcccccaacccattctatagctcatataattttccacaaagtgccttatttgaacttcaaatcttcaaggccagatgagcaccacagacgtggccttttcttgtttatccagagg

SEQ ID NO: 10690 - DNA, 1033 bp, Homo sapiens
gccttcctccttagtaactaaacctgatttggggcacattgctacctagactgtaatagactttccagtgtcctgcatggccaggtgagctctggacgatgatagagataaactaaattactgtaggctataatttaaggaagcctcctttaaaaaagtaaggaaaggatccttttttcctttctcccttcctcccttcatttctccttccctcccttctgcctccctccctccttcccagggtgcagttgtaatggctggagttctagcagccactttggaccataagatggaagccaagcattgaggatggcaaagcagaaagctgaaagcctgggacaggatgaccatggggctgccatcccatcccaggactgtctcccttcagacatcttttatgtgagagaaaaataaagccactattatcttttgttttatttatgcagctgcaccaaattctaatgaatccatataagttccaggtgagctggcttagatggtgagaaccaaggtcaaaggcaaagggtagccctgataagcaaatgccactgctgagttgctcagagcagtagacttttgctataacatagcacaggaaaggagagattttggagacagatggagtgtgacgtcgagctctgcctgagaccgactgtgatcttgatcaactgattgtcttgagtctggatttcctaatttgtaaattagagtaataatctccaccccgcaggccattcattggcattagacatcgtatgtattaggtgtcttgtttagtacctagcacacagctggtgcttaaaaatagtggctctgtgtgtacataggcacatggtatgtccccctggccacagacactgtgctatgcgctggggacatacagaggcatacggtgtagccccagctctgagggggcgtgaaggccactgggacatctccagtgttgtagcatggggcccaggtatgcagcctgtgtgtgccttcatgctgtgatgcaggcttgggaatgcatcccaagcctgtgtacagtgcc

SEQ ID NO: 10691 - DNA, 1091 bp, Homo sapiens
gtcagcatggttcgcgttgcaatttcgattgtgggaagacagccaggaaatactaaagaaacaccccatacctccttcaccacagccacaggtactgagcattgagcacacgttatatgttctttatctcctccagtctgcactgctcacttaaaaggtggggcgtattatccccgtttcacagctgagtaaagtgaggttcacaagaatgttgtggctggcccaagttcacacagctaatgaggaggggaaaggatgccaagtgagtccgcctggctcctggagctccttctgcttctccatgatttctgaagaacacacgaggcctccctgtgtcctgtgggagaattcactgtctctactacgtgggaaaatgtgaaagaaggtaggcctgagtgctcccgtaagctttggggaatgagagctgagtgaattggccttactaagtgatctggcagtaatctggtggtcttgagcctagaagagggttggggtgagtgtgaagagtatgatcccccgcagagccgagtcatgacttctcttctgccaggagctcactggactcccatacccttctttggactttagtttcttccagtaataatgattataaagtctagaaataatacgattaacaaccacaactgagtaaatacttgggaattagtgaagtgctaggtcttgtgagcagattctagaggtagaaacagccccagaaacacaagctagaaaaagaggaacagcttccaggagagttccaggcatcctaagggaagcacgggcctctgcatgtggatgggttcgaatgccagattccagcacccctctatggcctctgcaatctgcagtcttttaaaactgtttttacattagaacatcacagggttggactgtgccgccacaaaagcgcctgtcttcattacccatgattcctcaaatcatcaaacgtaagcacatagatgccaaccagtgtctacggggtgtaccaagcacaggcccatgggagccatctaccctgtgcgggcaagaggggagcagttgtctatgggaaatttaaaaacaatcataaaattcacagaaagatggtctac

SEQ ID NO: 10692 - DNA, 1032 bp, Homo sapiens
catttatgatagaattgccttaggtatttcctccacacacatgagaaatgcatgtgttacgatttttgcttcaactgtcaaaatttagaaaactctagaggagacagaaagtgtattcatttgcccatattcttgctctttctgttcttccttacttcctgataacccaagattccttaaaaaaatcatttcctttctgcttagagaacttccttttgccattcttttagtgtaggtctgttggtgaccaagtctattagttttctttcatctgtgaaaatacctttatttccccttcatttgtgaagaatatttgcactggatatataatttggttgacactttccttcattaggcacttgcaaaatggtatgctacctctttctaatactcctggtttctgatgagaaatatgctgtcatttgaattattttcccccctgggcaaggtgacatttcccttgcactactctcaagatattttctttgactttggttttcaagggtttgactgtgatatatcttggtgtggatttctttgggcttatcctattttggcttcactgagcttcttgaatctgtaggtttatgtcttttgctaagaaattttcagccattatttctttgagtactttttcagccccatcctcctctttctctccttctggaactctgatgacatggatgttagagcatttgttataatcccacaggccacccaactctgctcactttttaaagattattttctctccattccttatattaggtaatttctattattctaccttcaagttcattgattccttccttcgttgtctataatctactattgagcccattcattgagttttgaaatttcatttattgttctttttacttttaaaatgttcatttagccttctttatgtcttccatttttttactgaggctctgtttctttgctgagactttctgcatttccacggtttcaagcctgcttgtaattgcttgttgcagcattttacagtagccacctaaacatttttgtcag

SEQ ID NO: 10693 - DNA, 1024 bp, Homo sapiens
ataaagtcaagagcaccgtcagaccaggaggttgagaatggaggtatcaccgtaggtgtgccctccttgatgagtttttgctgatggatatattaaccagcagtggacggtcactacaggtagaatcttcaacgagactcctattttaggtttctcaccataatttcttaatttttgttggcaattgtgcttgaagcaaaaaccaaattagaaatgatgtttgtctgttgttccccttgaagttaggtgccttgattgcgggtcctctttctgtctgccacttcctcgcagtcccccccaaaccccttatagtcctccctgaagctgcagtgttcaccctagcaaggcaagtacctgtgctcccttggtgcctcccatggcacttgtgccaaatgcaagaaagaggagccaacgcagggcccgctgcccagcaggggaggtggaggcaacgcaggtgtgatgtacacagtccctctcaggtcagggaggagagggaagtagggctaggaggaaaatggggcaggagaggaagggagagcacaagggagaactagtggaagggagaggtggatgagcaggacagctcggagagacaggaacgcaaacagaggagaattttcgctcggggtgggaatgaatcatcctcacctgccagccgcgggcctcagcaagctggcagcttcgtcctctcagactgtgggttgcttttagctgtcagccttggatggtgggctcatgcattctgttcccactccaatctgccagagggacagggtccttccccgcagcactgaggcttggccagtcgtgatgcctatggcgaccgcagaatcgacctcaacgagctcgtcgccgggcaccgttttagcagccccaccacccatttttggaaacacaaccctggcctcccattcacagcagaaaagggcacaaggcccttcgtgtcccaccacctcccttctctctggaatcactgtggctctggttgtggaagtttgtcatgagtggaccccagcaaggaatt

SEQ ID NO: 10694 - DNA, 1062 bp, Homo sapiens
ataaagttttcagattgtttttctcatacttccaacccaaacgtgcagaatatttaaagcttagcaaaaaaaattatagggaacttagaaatatataaaacatgtgatgattgtaattttcttgtgttaactgggtttgcaactattttgctaggataatctgcccaattaacctctcatataacttctgaaacttgtttcatagaacacgtaagggcaaaggaaaagcaagactcagtcaatgtctgaagcaaactggagtcaatgaggcaatgcctgcttagaactttgcacgcttgaagtttcatactgttaattaaatctgcctcaattcttttttgagggacaaatgggattcaccatgggaaagagagttatctgagaggaacatcccagattggagaaggaagaggtcaactcagcccaactagagtagtccaacagtttaattctatctcactacaacataagcgttctgtcaggtgagcctgctaagttcctttcctctcttctcttgggtctgtaagagtatcgcaattctggccggacacagtggctcacacctgtaatcccagcgttttgggaggccgaggtgggtagatcatgaggttaggagatccagaccatcctgtccaatatggtgaaaccctgtctctaccaaaatacaaaaaattagctgggtgtggtggtgtgcacctgtagtcccagctacttgggagtctgtggcaggggaatcgcttgaacctgggaggcagaggttgcagtgagccaagatcatgccactgcactccagcatggtgacagagcaagactctgtctcaacaaaaaaaaaaaagcatcgcaattctctgtctcttgtcatggccatgctaggacatgggcaacctggtagtgaacaaaatacctttctctgttcctccactcagggaaatctactaatacttggttagactttaatttttcaattttgcaatctagaaacagaaaatacccataaatatcccaaaatagaaacaaaatgcggcccattcagtttccaaaaagtaaacaaagtgattcttc

SEQ ID NO: 10695 - DNA, 1069 bp, Homo sapiens
cgtcctccatcgaggattagcttggaagggagctccgatgtcatctagcatgatttcccactccctccatctagtgggggattgtgcaagataacatccgagctcccttccaaccctagaatcgtgtgatcctatggtaactttgtgagagggccctctctgctccagagtgaagctgcactttgggacggatgtcagctagtatctagtattctcatggtgcgttttatagttgacagagcacttgcatgtatctgaccacagtcacatgactctggctttattttcatcatcttcattttataggtgaagaaattaaagctaagtaaaggccaagtaaaggggactctgggctcaaactgcctgggttcaagcacttgccgtagctctcacaatatgtgtggtttgggcaagttaatctctcagtgtctcagtaccttcatcggtaggatggggtaatatacttacatcataatgatgtttcgaggattaaatgaaacgattcatgcaagctgcttgggacactggttggaatatagaacacatgtaataaaatgagttgatagagtgagtggtagaggtggtggaggtagcaattaacagcagtggtagtagtatagtagttacacccagcaagtaaatggcataactgggactcttctcagaaactgaccccacagtctgtatgtgaccccagtgaccccagaatttactgcgctgtgtctaccttaggatttatatccacaggtcagaagcagcaggcaaggtaatgagaaaaataaagatgatgtttaaagagatgttttccccatctagccctgagagagtattggctggggagctgaaattctcccctcctcaacctccgataatctggtaaggtcagtggcaggtgcagggtgcttgttatgccattgctgtactatgggctcatggcaggtggctgaatggacaagctcgtgctccctcccgctccccctcccctcctcttgggagagactgcctgcgatgtcagtgtttcttcagtaacccgcgcacattatgtggttccatatggatcagtaaattt

SEQ ID NO: 10696 - DNA, 1027 bp, Homo sapiens
tgtgctgtgacactcatggtcccactgaacttgcaacccaatgagatgtcctcctggttggctggacatttccttaaagacatgagagaagaaagagagctcattaaagtcagaggtgctctctgcttgccctgggcagtgactttgcagcgggaaaccaagaggctgatgctgatgtttagcctgtgtccaagccttgtcacgctgattctgtgcaaagaggagaagctgggagcatcttaggtgatgtccttgtgttagttacttaaggttgctgtcacaaagtaccatgaacagagtggcttaagacaacaaaaatgtatacttttgtatcctggaggccagaagtctgaaatcaaggagttggcggggccattctctagggagaatctgttccatgcctttcttttcgcttttggtgttgccaacagccttggcattccttggtttgtagatgcattaatcactcagctttgcctcggtggtcacatggcttccctctttgtgtgtgtctgttttcccttcttataaggacatcaacatattggattaggggcccacaaactccaggatgacctcatcttaactaattaaattggcagtgaccctatttccaaataaggtcacatcctgaggtctggaaaagacatgtatttggggaagggaggatgctgttcaacccagtgccagcctggattctgtaacaaactgactgggaaggagtctgcgctctcctcggctaacagagagaattctgggacctaacatctattcagcaggcacacaccaagttgatgtgggggaaaagcactggggttggagtcagaaaacttaggtataagcccagtctccaccgtagtccagtggggtaaaccttgctttccttgtctttcccatggggatgataataccctttcctccctcccagggttcaggttaagaaaatccactcacacaaaagctcttcgtagcctgcaggcagtatgcacatggtggatggtaccatgcttctttttgtccaggagat

SEQ ID NO: 10697 - DNA, 1028 bp, Homo sapiens
ccatttctgttgggggtaccccagtagactatgtggtgtatgaccccaaggatatacagaatcacatcgggaggggaaaaacttgttggtatatatatacatatatacaaacattagccaggagaaatggttctgtgcctctcacaaaaagctcacaaaacactgtggtctgtggcagcagcagatgatattgatgatgatagaaaagttctgtcttcactcagacatgccattgatcaagagcatttattcagagactactatctgccaggcatcgagccacgcgacacgagccaccagtccgtttcttcatctatgccgcattgtgttgatactggcaaaggactgaaataggaaatacactcatgtcataggaggtgtcaagctgtttgtcagggcagagaagaggagagtaacgtggcacaagttgtagacatcttccttctgaagacatgggtgattggaacagcatgtcatcaggtgagttttcagtgttgcttccagttctaagctgggataattctgagtattcttaaaatgtactgctgttggaggataatggaaaagcgctgaactcagaaaaagccttgggactgtgagcaccatcaactgcattgaggagacatccaaaagtataatgccttcttcaggctgtttttactagaccatatagtcctactaataaatacttgtgcaaaacagaaatacttttaaaaaaataatatatttattcacttaattttcccagaaataatgccttgatcatatgttttccccagaaattgttagacttaccttctatggtcaacaagagctttcctgaatttcttgagatttagtgaaagcaggtagatgtaaactatattaattacattgcattttccagaaataaaaaaaagcttgaatacccctgaaattcctctgagtattatcatcctgtgctttgttgatagagaatagcagtgacctaataatttcttttttaaccactaattctagacctgaggtgtcatgacagagtatgaccc

SEQ ID NO: 10698 - DNA, 1093 bp, Homo sapiens
gtgtaacagctatggtaggaacagaggctgtgtggaggggcctatgagcagcaggggctgggtcgggtgttgtggaggccacactgtggttttggagggacaagagttaccagggagccaccgggacctctcctgcagtttaaagtggatgtggatagagagcagctgtgttcctgggatcgctggctagccagccaccctgcaggggcagagcaaacaggctgttagctcttgaactgccaggcacactgggggtccttggcagggtgtggagcatgaaggccctcttcctctccagggcctggaggacagcatcctctgcctgcccgccagggtcccagcccaaaccagcatcttccgagcccacttctctctccagaggcttcttcatcttcccagttccccaggatacaaagccgccttcctctttcctctcctgtgcccttccacagttatcagtgcctgcgttcagtcagtcaagtcgtatgggctgtcctcttcgcttcttcgcttggacttctcactccttccctcctctcccctcacctctctccgcctggactcgcagccaccttgctgccctgccttccagccccgttcccacgcaacctgtgtaatgcagccaagttcatatttctgcagccgactgtgtcactcccttgttcaaaagctttgaatgtgtctccatgggtacagaataaagcctgaacatctctcagtatttcaggcatctccaacctgtcccagccaatagcttgaaccttatcactccctactgccctgccgcaaagccagactgcatcttgttttccagaaacgcctgctgctgtcctgtttctgcacctttacccatctcccatccctctgcctacagcacctgtttcctcccctgctcctccgtggcctcctagcccaggtcgaagagcacgtcttggctcaggcctcccagagcccccatctcaggacaggcactgtcagcactcaaccctcacctacccaccagtcggtgggggtggcccagccgtcttgttatatagaaagctcttgggaggcagcagcgtgcattggtaacttcttattcactctcccactc

SEQ ID NO: 10699 - DNA, 1072 bp, Homo sapiens
gggctgtggcttaggctgcttcctattgttaccatgtagaaatcactcagggattgctctctgatttcatcgcgagtggttattcatttatgagaccacggaccttgtaaacagctcctcatgtggaaacaggtgtgagcggtggtagaggcaacagtgtcctagctactcaaaaatgccctgtgaacagcatggcttaaggctcaagaaaaacttaatctttgagtctctagattcttccaaagttggtctctttggagagttgtcattaccggggcaggagaatgccacacagacatctcagagcgtcctcattcttcctctttctactgtcctcatagctgctcctgactttctcttgtctgccattatagagacatgccataggaaatgttaaatcaatacatgttactaaaatacaaaatactatcaagattatctgaacagatccaaagtcaagtcttgaagtgaaatatgacttaaataaatgaggtcttaaatgggagctataaaatgcaacaagaaaaaagacagttaagacaaatgtttaaaaatcccaaatgaaggattctgaatgtttaagaagtaaaacaggttttttttggttttgttttgttttgtttttgtttttttgatgcctagaggttggttcaattaggccaggcaagccaagtacctgggtgcgttgtcagaattatctccattttggtcctgttcaggctgggattgacccagaagaccttcaagcatttgcccagggttcttagaagtgatgagcagctgtgatggttttcaggatggatccaagaggccagcaatggctcaagcttcctgggagctctgcccaacactcaggagttaacatggtgtaggttacctccctctggacctccctccctgccccactgaagcctgagaaacacagaactccttgtccatgagcaagggagctcaagcactgggccaggagcggggcagaaaggtgccagtggatagctagacctgaccatcctgggcaactatcacacaccagagcaaaaggggtttaggtgctttgccaagaaatttcttc

SEQ ID NO: 10700 - DNA, 1157 bp, Homo sapiens
ttctacgagattgttattccaggaaagctcatttcccctttgatccatcattccttcccttttacctttctactcctcaaagcccctgtctattcttcgtggaagctttcccttggagggtaaccacacacctaccaggtggcgctaaagaagcctttacgtttctgggaaatactccagccctggactaactaccagaggaatactcagctcccaagtcagagtttaaggtcccatggagagcctccgggttcacctataacctggtttcttccttacctgttttgaactgtttctattctcttcactcatactcctctcgctctcctgtctccaaaccagaccttagtctgacgaccactggcatgaaggaagaaggaggaagtgtggcataaatacttccccctttgccgattataataataatctattattcaaccttttactggtctaatcttccaacaactgtaggagatagggattatcatcactgctttacaaataaagtgtggagaattttaaaaacttaccatacagcggaaacttgaactcagatctctcagccttttgtctcctttttcaaaccaagtcttgctgcacctcaagaaagacaagaaggttagttgactcataagccaagctgctagtaactgaatctggagggacaagtaggcagaggaggatgaacacagagaagtccctttatgttccctctggaggcttgcaggcagtgctggtgcccctttctgccccaaaccctggggtactcactttctcccccttcctcccaggtcatcaagagagagggcacaggtacagagatgcccatgattggggaccgagtctttgtccactacactggctggctattagatggcacaaagtttgactccagtctggatcgcaaggacaaattctcctttgacctgggaaaaggtaggcgtggtcagtgggctggtaggataggttcgaggtggacacaagctgtcacaagcagaaaccattttctcaggaccaagctcagggaggaatggtttatcacagtctgttaactctttcggtcactcttttttttttttttctaccgttctgtaactatattgatctctgtctccccttctcctcatcacctcccaacaccttactcccccttcaaa

SEQ ID NO: 10701 - DNA, 1021 bp, Homo sapiens
gccaggagagtaggagtcagtggatactagagcatatcccaagggattggggtgagagggagaatccgtattcatgtatgcatttgttatgtgctgagctcccatgataagccaggcatcactcaaggcactggaattgccatagtgaataaatagacaaaaattgctgccctcctgggccttattatgaagaaacagaaaagaaacaatataggctaggtgtgctgcctctcgcctgtgataccaacgctttgggaggctgagatgggaggatcacttgaggccaggagttccaggctgtagtgagctatgatctcaccactgcactccactccagcgtgggaccctgtctctatttaaaaaaggaaaagaaaagaaaaactatacattttgtaagataattaagtagtatattagaaggtagtaagtacacggccagacgtgatggctcatccctataatcccacgactttgggaggccaaggcaggcagatcacttgagttcaggagtttgagaccagcctggcccacacggtgaaactctgtccctactaaaaatacaaaaagtagccaggcatggtggcaggcacctgttatcccagctactcaggagactgaggcaggagaatcgcttgaacccgggagacggatgttgcagtgacccaggatcatgccactgcactctagcctaggcaacagactccgtctccaaaaaaaaaaagaaaataagtgcagccgaccacggtggttcacgcctgtaatcccagcacttcgagagcactttgagaggctaaggcaggcggatcccttaagctcaggtgttcgagaccagcctgaccaacatagtgaaaccccgtctccagtaaaaatacaaaaattgggctgggcacggtggctcacgcctgtaatcccaacactttgggaagccgaggagggcagaccacaaggtcaggagaccgagaccatcctggctaacacagtgaaaccccgtctctactaaaaatacaaaaaaaaaattaac

SEQ ID NO: 10702 - DNA, 1031 bp, Homo sapiens
acacacacacacgcaaggctcaggggctcggtgggtacaaaaagccagtggaaacggataaatacctatagcgttaatagcagaagtatgtccaaggttttgcacagggtaatcaaactaactggcttcagacatttgcagccacaggaaaaaatagctctcagccttatgagatggacattcctatactaactcccgctctttgttgtattgaattctggctgtttcttcccccactcaactgtgagcagatgtgcacagactccgagaggcagacaccaggaggtccagggacataggttggtgaggcatggcggtctagttgtgggagataatgaggcccagaaggtgtggtgagagacatggtggtgtgggaagttgagttgtgtttggggtggtattgggtgatggacaaggacagcagtcagcagagccttcgacccagcccaagcaggcaccccattgtgcttaggttcctatctgtggtcttgatttggctttgcttttcttgggaggaagatgaatcagaatcctggcatcgtgggccctctagtgaaaactcgtcctggggagtaggacagctgctgagaagcagagaggaatgcggccagctggggaaaatgggacagcaggggtcagggaggtgattggaagggcagacaccatagtccccagctacctggcttcaagagcccccgttccccacacgcctcttcttctaaggcaaggtctttccctctggggactgactgagacagcagtcactggccaggctcttggtacaaaggcaggaagggtagctctgagaacggggctttcagccgcagcactccgtgctccaggtcgatgcagcactgcggggtgtagagcagtcatgccaggtcacctcagcccgccacctgcctcccggcctgctccttttgttccccctcccacttcccacagcttccacctgccttttgctcttcccccatccccatttccctagactcctgttgaagggggtgacccagttctcttgatttttcact

SEQ ID NO: 10703 - DNA, 1002 bp, Homo sapiens
tgtgtcatgaacagttcagtttagtgtcatgaactattcacttcatatttttcttgtattaactgtttaaatttttaaaatatcttgtagtaactctttaaaatgtatgtaagtaaatggctgcagaaagtttttttagagaatcctgcttccatcagtaatacagcaatattaccccatccactaatggtctttgtttccttaaccactactcattaatccttaatcacctcattcaaactaattcattctgcatttttgagtaccaactcttgtcaggctcagtggcagcttctacgacctgatggatggaaaaaaatcaaactctgtgactctatggttgactgccacctctgcaaccttgactcatctgctgaaaaggcaagaagaagaaagggcagcaagccctgttttagggactacataagatgaggggagataagggggacatagatgagttctttaggattgcgtgtgttttgagtttttgtttctaactgaagaaatctgtcaatattaaatagggtgggaaaatggtttcttagaataactgttcaactgtgtgtaaataaggaaagttttcaatgagtattacttattgtaattaatgcagaaggacttccccagtcaaccgaatgtctcggccttttactcagacaagtagcatctcattaaacccattcatttagcattcattcagctggacctactgtgtcaggtccagccccaactagatcaagcagggattactgtatattttacagatgggagtttgatgcagagaatgaaccatgcacaggtcacacagtgagtgcacgctgacccaggcagtgtaacggtccactctcagcgtgtgcctcctaaagtactaacttgtaggttcaaaaccaatgtggaaacaactttgaccttagaacgccataaagccatttgtgcagtgacttgtcaggactcaggatgttttgtagggactataatgtgcatgtcggtagggagaaaggg

SEQ ID NO: 10704 - DNA, 1024 bp, Homo sapiens
cactccagcctgggcgacagagcgagactccgtctcaaaaaaaaaacaaacaaaaaaaaaaacaaaaaaaacttggagacggctgtggtggctcacatctgtaatcccagcactttgggaggttgaggcaggcgcgtcacctgagatcacgagttcgagactagcctggccaatgtgttggaaccccgtctctactaaaaatacaaaaaaaataaaaaattaaccaggcgtggtcgcactcctgtgttcccagctacaggggaggctgaggcaggagaatagcttgaacctgggaggaagaggttgtagtgagccgagatcgcgccactgtactccagcctagcgacagagcaagactctgtctcagaaacaaaaacaaaaaaacttggattctaaagatacgttgttctgtagatggtctctggaccgtactttcctcctttctcctcaatttcatttagagcataaaagcactttcttaggctgtttgaagcacttggattggaaatgttgcctgcagtaacctgtataaacatcaatatatcaataacagattattagtgcaaaatttaaatgtccaaaaactgaaagggaataatgatcggtgactgggtctatgaaattacaaaagtaaagcctaagggagatggcaagctttcctattctgctacccttgtcagctgatgtcttggtagaattaataaagtactctttttaaactcaaaaacatctgttttgaataatacttttttttttaacaccctacctttgaggtaactattgttaatagtttgtgtatatccttctggaattcttctattcctgtagaccttgcagatactttttttttttctacttgcagttatttttattttttgttttttgagagtgtcttgctctctcaccctggctggagtgtggcggtgtgacgatagctcaacctcctgggctcaagcaatcctcccacctcagcctcccaagtagctggaactataggcatgcgcaaccaagccgaaatactttt

SEQ ID NO: 10705 - DNA, 1063 bp, Homo sapiens
gtgctgggattacaggcgtgagccactgcgcccagcctttttttttttttttttttttttttttttttttttttttttttgagtcagtgaatttagagacataaaattttataggagttttttttacatgcctaggagtttcaaaggaatattttaaaattaaaaaatctctttggatcagatgtatacattctggtgttaaataacgtacgagaagctggcatggtagtgtgcacctgtagttccagctgcctgggaggctgaggaggaaggatcccttgacctcaagtgttttagttcagtctgggcaacacagcaagacaccaccctccatctcttaaaaaaaaaaagtgtatgagaatgttgttagagccatgaaatgccaataagtgcttaagaaggaagtcactcagtagggggtaagggaatttccacaaatgcaagctgagctttcaaatggtgtataacagcaacaaaggcagcaccacataatgaagaaaacattgggctgggaatcagaaggctttggtctagttctggctctgccattattcagctgtgtgattttaggtaaagttcttaaagtcagttggcctcagtcatttcatctgtagagtgaagttagactggataaaataatagaatgttagaaagaatcttaagcgtgtctaagttagagccaagatggaggcatattgaggaagggcaggctacagctcagcccaggcatcccaggtgggcagtatcttggtgcgagcttcacagtccagagtaggccagcctgcccaagggatacagtgcacacccatcagtgacggtggcacatcctagcagttaccctcaatggaggtggcagaggctggggaagccctgcccagatgtacattagattagactcaggaattctgctatggcagtgtccctttggttaagtgtcactggtcatgagctctgtaggataagaaacagctaaaagcaaccaaagttaatcagtctcccgaggattggtttgtattagccagtctcgtaagtgatgaatctgaatctgagaatcactttctag

SEQ ID NO: 10706 - DNA, 1094 bp, Homo sapiens
cactaaattcttgggaagatagattcttttacagttcaattcccaagataattaggaaatttaaaagtgattaagttttagtttatatgacacttaaaatcacgaaggcagtgtgttttaattgcatttagggcatctaaccatcagctctggctttcttcctggctccctgacttactctatcttggtaatgagtccttcattgatgtagcctcgtttaaagcacttttaggttttcagggaagtaaaatatagatggaataggaattgacattgttacattcaaacacaagtagcacttctctcctcccccatccaaactgcatgacggttttcaccaagatggcagcttgcacatatatgtttaatggtatttttcttatttgtaaacttggacagtagtaagatcattcaatactgaggtatagtagctgtggccctgattacagtttgagtctacagttgtttttttcttaagtcattggtctaaatgagtttgatttgtctgtaagtagatagagagaggcttccccagataccttggcaggaacactgtggtcaggggtctagtctccccttaacaagtgagagcttagtttgtcagtgaactggatataaccaggtcctttggcacaaattcacgctagttaaacccacaccagtaagttttaaaaccagaaccccaagttattaatttataaagggagctctactctttcagtgtgtattcatgtctactgttcataatactcttttcctgggaatacgatacctaagaagttaaacttcaaattagaaggcttattggtgagcaaggaatcagagggaatgaggtcaggagtttgagaccagcctggtcaacatggtgaaactccatctctactaaaagtttaaaaatcagctgggcatggtggggtgcacctgtaatccccgctactcgggaggctgaggcaggaaaattgcatgaacccgtgaggcagaggttgcagtgagccgagatcgcaccactgcactccagcctgggcaacacagcgagactctgtctcaaaaaaaaaaaaagatacttctctttcttggacaaacctgataaccct

SEQ ID NO: 10707 - DNA, 1048 bp, Homo sapiens
taagctcaaatttagtttatgatctaattttttctgtctcaggtcagctattgtgaggctttgtcccattttgatacttactcttcattactctcaatattcatatacttaatttaacttttcagttttcctcattctgtcagaagactgaagacacgggtaaattactaagttgctttgtccactaagtgtttttcaaagagaatcagattttgagtctcggcctgttgttgctcatgtatggctgtcctttcaggatacaggcacttccggttctgctactgccgcccaaccagctgataacctcctgggagacatagacgacctggaggactttgtgtatagtcctgcccctcaaggtgtcacagtaagatgtcggataatccgggataaaaggggaatggatcggggtctcttccccacctactatatgtacttggaaaaagaagaaaatcagaaggtatgagaattgatttctaagaaaactcttgagagagagaagaatgttgtgggaatagattgttgatgggccttagggaactaactctggtattagaccaagccagctggaagtagattgtatctttcagtccccagatgctgtgttctcattttctgcaaagagctcatggtctaataggcagcaagctctaccctcccacaaataagagctttatccacgaagtgggaaaatggacgggtagttgttaatgtaattattttcacctgtctcccatgattgagtttttgaatgttactgtttgttcttttggtttttctttttattacggaagaacatgacattgtggaaggagagtgagttttagggaataggaggaattagaaatacagaaggacctacaagttaaatgtcttgtttctcaccctagaagttctaatttattttataagtttgagccagcgatgaactttattttattaattttgtattaataccaggtcttaacagatgattttaagagcctagaaataagataatgatactaggtgttaattcttctaaccaccatttattgagtgtttacga

SEQ ID NO: 10708 - DNA, 1031 bp, Homo sapiens
gccccggtgactgtcacaaagcaatgcctgttgccaaacctgtggctcctccttctccttcccagtggaagtggaggacgttggtccccagctttggaccttgcctttcctgcagttgaggtcagtccagtggcagttggaaattcagggcttgtgagggtggctttaccttgcctgtcttcctttgcccccatgaccctttgttggccggggttggacgacagctccctttaaagctctgaaattggagctgaacagctgctgtccagtaaaggggggtgagggggctgtcagcagccaggagggcccaggtggaggtgggggcagggctttgtcactggggagaacacggtctccagctcctatcttctaattccacttttgcctggacgctttctgagatgacggttcttcccttgcttttggtttttcccgctactatctgggagattctaatcacacctgtgtgatctggccctggggcccttagctggtggggactggatatttgggaaaatttccactagaactcaggtctccaagatctatgcccacgtcctcctgcatttaatacaggggggctcctggaagggccagaggatgggccaggctccctgtagcgggggctggctccttggcttggtgtgggcaggcgggcccccatgggtggggactctgcttcctttgacccaaacttcatgggaacaatagacttcagaggagtcaccaggggcaggaaatgggaactgtgcagagccaggggtgaccctcctgggggatgggattgcatatccggtagagggttgggggcagtgcagagggcgctggggaggggctgatgacacatagggtgggcctctggggtggggccctcctccaaagggggccgttgactcagtgtgaagctagagctccgtgccggttctgtgctgagctttcggctcttactagcacagggctcgtgtttgccagcctccgctcgtgccacgctcgcccctgccaggacttggtcttccccttcccctcaagcc

SEQ ID NO: 10709 - DNA, 1033 bp, Homo sapiens
aacattccacagagttccagaaagcaaaacttgaatttgctgctcactgaatgctgcattgaatccatgcaaatgaagtgatgtgcatgcgttgtgttaggtatgataagttctctagaaatgatttaaagcacatgggaggatgtgcgtaagttatgtgcaaacactgtaccgttttatatgagggacttgagcatcctcgggtttcagtatccttagaggccttggaaccgatcacccacagataccaaaggactactgtacatagagtttcattatgtagaacttactagggatgctttggaggagtctctgccctgcatgggaaaggactaggtcacctccagggccactgcttcctcgaagattttgtggtcctgggcctcagtttctccacatatcagcatgcggggattccactagatgaaacacttcgggattcctgctacagggaggtagtacagcgaagctgcacctggagttggaggcaaggcttgggacgagggtgcagtgtctgagcagtcagaggaagcagaatggggagatgagggaattattgcgtggctgccatcgtctttgtccaaacaagcacggtgttaggaacaggcggaatctgggtcttgccctgaggctggagggtggggaagatgaccccccacaaccccagagagcagtggctatcagtgcagactccagagtggtgctgtccaatagaaatactatgtaagcctaggagttacatttaaaaagtaaaaagagctgggtgtggtggcttttgcccatggtcccagttactcaggaggctgaggcgggagagttgcttgagcccaggggtttgagaccagcctgggcaacatagcgagaaccctgcctctaaaaaaaagaaaggaaaacttaactggtaaaatgcattgtaataatatattctttaacctatgactacaatattatcattttaacgtaatcaatagtaaaaagtatcaatgagatagtttaccttctttccacacaaagcgctagaaccgtagtgtgt

SEQ ID NO: 10710 - DNA, 1071 bp, Homo sapiens
actcccaggtccctgtgaggctgggccaggatctgagctcaggcgtcttgagtccagagcccaaacgctaaatctctgccccaggcgtctctctctctctttctctttctccccttcctgctctctctccctttcccccttcccttctttttcctctctcttttgaccaggcattgctcaaggggtccagctctctgacttttgttccaacatctccttagcctgggaaggattgtggggcctccccccctctcacctgctccccgttccccatcctgtcctgaagccaggtgtgatgaaggcctcacaccaaaggatggccgggaaggtgctgccgtgcattgccttgcaggggctttacttgcttttctcaatcctcagtggctctgcaggcaggaatgctcatccccatttgacaggtgatgaaacagaagctttggggaggttcagtaagttgctgaacagctgtgcaacgtagctggtgagaggcaggtttcactcaggtcataggactctgaggcgtctttaacatgtcccggacttcacgtggcctttcccgagaacttgttgcatttcaggagaggaaggggcactgctcagcaagaggaaggcactccagtggtgggagctcaggccctgggacacctaggttttcttggtcttgttttctgagaagggcccttttttggcctccggcaggccctggcccttccgaaatcacaatgggatctgtttgtttctaactgagtacacagcctggcccggcccagcccaaccaaatccatttctctgctgggttctttccttctccaccaatccctttccttccatccctcgggactcacctgcctgtgacctggggactctcctgtccttctcttttcttttccagctgtaaccaggccctttcctttgctcctgtatttcgggcccaggtcccctgcagaccctcttttccttctctgccctcttctttttgtcttctatctcctggtgcgctttaaacaatttttttggtgaaatatatgtaacataaaatttgccatttgaactccaagtgtgcagtttggt

SEQ ID NO: 10711 - DNA, 1658 bp, Homo sapiens
tcattctgtgttcatcagctctgtgcagcgtgctgaggacttacagaggaagacagctgtccctgtccccatggtgtctaaagtgtggtggagaccagtccttactgggagatgggggctggatatggaaatgcaggaatctgctaaggttggagtcatcttcccagagggagtgacatatggctggaccttaaggctgagcaagagttggtccggtgaacaaggaatggaagggaagtttcaggtagcagcacctccaccaggagtggagaaagagcctagcatgttggggggtgatttggatggctgagtttggggcttggaggtgggttcaaagaaggaagtacagagggtggtgcctgtgtgcggaaggtatggccggagagcagggatcagcagatggaagcgctagaaaatcccatcatggagtgtgtagtgttatcttaagaacaaagaaaaggcattgaaaatttttaggtagcagaatcatgtgatcaggtttgcattttagaaaaatcactggctggggtgaagagattatggagcctgaatggggttgcaccaggtcatccagatgtgcatcgctggaagcttggattagggctgtgagatagagtagattcaggagacatgtaggcgacagaaagacaggatgtggtcattagttagatgtgggagatattaataagagggaaaagtcaaaacagtcatgtgctgcttcacgaaggggatgcctcctgagaaatgtgtctcttggcgatttcatccttgtgcaaccataatagagggtccttacacaaacctagatggtatagcctacgacacacccaggctgtgtggtacaacctattgcttctgggctataaatctgtacagcatgtgactatactcagttctataggcaactataacacagtggtaactctaagtgttagtatttgtatatctcaacattcctaaacatagaaaaggtacagtgaaaataaaatataaaagataacaaatggcacacctgtatggggtacaccatgaatggagcttgcaggactggaagctgctctgggtgagtcagtgagtgaatggtgagtgaatgtatgctactgtaggcttgactgtacactactctacactaggacattactgatactactgtagactttataaaaacagatacttaggctacgctaaatgtatttaaaatgatttttcttcaagaatatattaacttggctttctgtaacttttttactttataaacttcttaattttttgattcttttataataacactttaaaacgcaaacacctcacgcctgtaatcccagcactttgggaggccgaggcgggtggatcacgaggtcaggaggtcgagaccatcctggctaacatggtgaaaccctgtctctactaaaaatacaaaaaaactagccagtcgtggtggcaggcacctgtagtcccagctgctcaggaggctgaggcaggagaatggcatgagcctgggaggtggagcttgcagtgagccgagattgcgccactgtactccagcctgggtgacagagcaagactctgtctcaaaaaaaacaaaaaacaaaaaacaaaacccaaaaacgcaaacacatcgtacagctgtacaaaaatattttcttaatttatatctt

SEQ ID NO: 10712 - DNA, 1045 bp, Homo sapiens
agggacgggcaatgtgtgtgacgcggtgaggtcctcctttacaagtggactcggtggctgggatggggagaagttgggggctctgcgagggctgtgggaggtacgtggttcccagctggtactcataacccaaaaactgccttaagattactggtatgtcctgctccttcacaaacccctgagaactatgtttggaagcttacagcttggatggttggagccaagaggtcactggatttgtctcatgttaggggaaggtggggttgtgaccatgagcctccagaggcaccagaaagtcaatcctgccgttgctccagtgtgtgaggagctgccaagactgtttctttcagaaagagcctgagttgggaagggaacaggagaatagtgacctacattatattgtatatgcgtttttaaaaatttttcattgtggtaaaaaagaccacaaaatgtaccatcctaaccctcttgaagtatccaggttggtagtgttacgtatattcacaatgctgcgcagcaggtctccagaacttcttcatcgtgcaaaaccgaaactctgtacctgtcaagtcacaactctgtgtctttctcccacgagctcctggtaaccaccattctactctgtttctatttgtttgaccacttaagaacattttgtaaaaaaaatttttagtagagatgaagtcttgctaactcctggactcaaatgatcctcctgcctcagcctccctaagtgctgggattacaggtgtgagcctctgcaccctgccgactactttatttttattttattgtattcatttattttgagacagagccttgctctgtcacccaggctggagtgcagtggcgcaatcatggctaactgcagccttgacttcccaggctcaagtgattctctgccctcaccctccagagtagctgggactataggtgcgagccagcacacctggctaattttttttaaattaattttttgtagagatggggtctcccgatattgcctagactggtctgaaactcctgggctcaagggatcctcctg

SEQ ID NO: 10713 - DNA, 1042 bp, Homo sapiens
gtcctctaggaatcctagctcaaaacagtggtcttggggcaggagtgagagccctgagtgggtctctaaatggctgaagtcagtgacaacggggcccctgcctggcttccaacaggatggccccagaccagctgcccacccccacgggtttccattcatttctcccccacacccaacgctggtgccacccccaccattgttgcttggctcggcttccccagggtcgcccttacttctgggtcggccctctagactctccctgctttgaccacttcttgctctgatggttgcttattttttcctttttcttttctctctctctctttttttttttttgagatggagtttcactcttgttgcccaggctagagtgcaatgggcgcaatctcagctcaacgctacctctgcctcccgggttcaagcgattctcccacctcagcctgccgagtaagcttggattacaggcacgtgccaccactcctggctaattttgtatttttagtagagacagggtttttccatgttggtcaggctggtcttgaactccagacctcaggtgatccgcccaccttggcctcccaaagtgatgggattacaggtgtgagccaccgcacccagcttttcttttcttttcttttgtttttgagacagagtcttgctctgtcgcccaggctggagtgcagtggagcaatctcggctcactgcagcctccgccccgtgggttaaagtgattcttctgcttcaccctcccgagtagttgggtctacaggcgtgcgccaccacgctcggctgattttacaggtgtgagccaccatgcccggccttgcatctgtatttctaaataaaatacttgaatgtgtttgtggcagttaagataaaatttgtctttaacagatcccaaataacagtggcttacataagggaaatttccttctctctcctataaatgtctggagggtaggtagtccagggaaggtgtggcagctctgctccatgaagctctcagggacccaggatgcttccgtcttgtggctcatgagca

SEQ ID NO: 10714 - DNA, 1102 bp, Homo sapiens
cagctgaaggggttcctgggtttatttctcctgagaactggcatgggctctgagttttgccattcctggcttcggtcctagcattctaagctgcctgaccttgggcatttgtcaacctgtctgaaccttagtatcctttcctctctgtagagtgggaagagatggagtctgtgaagcgcctggtgcaagctgtactaatacacctaacaatgagctcctccctccctgcctccttgcctccctgcctccctccctcccatggggaggccagaatctggctgcttgctgccacctagtggctctttggggtcatcttccctcataggaaccacagatccagtagcctagagcagaaagggaaggaagattcaacctaggggtgtttatgtttaccgtgtgtctggcactcgtggagatagtgcatgggactacataagtaagacagcatcgaagaggtgtcttggagtgtggttaggagcgagggctctggagtcagacaagctacagactagctgagtgaccttggggcaagttatttcatttcactgtgcctcagtttccccatctgtaaaatttgtataacgataacctacctcgcgtatctacagtgcctagcatagtgccccacataaatgtgttcactaaatgtacgtcgttattaatcataggagcttgcagtctcactagggccgactggaaaactattaagtgatcctcaaagccacaggcgctcagagactggagagatcaaggtgcagaagactcagggaagggtagtcttgagggcagctgcccttaaagggtgggcagcatttagtgaagcagatggagggaagttgaccggcatcccagatgtggggaagaggccagcagcctagtctcctccacggcccagcccccactgtcttaccaaagaacagctttaaccaaacccctctgggcatcaggaccaccgctacacctcttgccaggctgcagagctatgcagtctggaggcccagctctcgtcagaagctggggcatgggctctaggggaacctggggtcggatgagcccctgagcaggtggcaggtgcctacatgtcccagtgtgggttcgtgtt

SEQ ID NO: 10715 - DNA, 1051 bp, Homo sapiens
tgtaatctgataacattaaggaagaaggccaacaggtttgttttattgagatgttactcacataccatagagtttgtctatctgaagaggacagttcagtggtttttactatattctcagcgtgtgaccatcagcactgtcaattttagaacctttttatcacccccaaaagaaactccattagcaatcactcccatgccccccttccctgcccccagtttttctccctgtctgagtcaaccattaatgtatcttttgtctccatgatttacctaccctggacattcatatgaatggaattatacaatatgtggtcttctgtgactgacttcttccacttagcataaggttttcagggttcatctgtgttgtagcacgtgtcagaattccattcctttttagggctcagtaatattccagcatacggacagaccacattttgtttatctgtacccattcgtcattgactgacttgtgagttattaccaccttttctggcttagacataatgtggctgtgaagttcatgtgccatgcttttgtgtggccatatgttttcagttctcttgggcaaatacctgggagtggaattgcaggtggtcttagctcaggctgctgtatatcacaaagtcccacagactgggtggcttataaacaataggcatttatttatcccagttctggaggctgggggtcccagatcggggtgccagcatggtcaggtgctggtgaagccctcttctgggttctaaacttatatccttatgcagtggaaacagggcaagagagctctctgaggtcccttttaattagggcacaatcccattcctgaagtctccatcttcatgacctaatcacctcccaaaggccccacctgctaataccatcaccttggggcccaggatttcaacatgagaatattttggggacacaaatattcagtctgtagcactgggtcatacgataactgtgtgttgaactgtttaaagacttccagactgttttccaaagcagctgtaccgttttacattcccactagaagtgtgtgagga

SEQ ID NO: 10716 - DNA, 1026 bp, Homo sapiens
agccgtggcttctcctcccagctctgcctctcaccagctgtgatttggggcaagcagctgaccttgtctgggtccgtctcagttccccatctgtaatacaaggggtgggctggctaatttctaggatttgtggatggggttttaaagaacagttttcctgagatataatttgtacaccatcacactctcccattgttacaggctcaattttgcccctgcaaatcctaaccccatacctcagaatgtgactgtatttggagggagagaagatctttaaagaggtgactgaggttaaatgaggtcaccagggcaggccctaatccaccatgactggtgccgttataagaggatattaggggcctggcaccatggctcacacctagaatcccagcactttgggatgccgaggcaggaagaccacttgagtccaggagtttaagaccagcatgggcatcatggcaagacccctcatctcaattaagaaactgtatatatagagagaggatattaagatagaaacaaacacagagggaagacaacgtgaagacgtagggagaagacggctatctacaagccaagaacagagaaaatggaagaaaccaatccagctgacaccttgatcttggactcagcctccagaatcatgagaaaataaacttctgttgtttaagccacccagcctgtggtactttggttatggcagtcctagcaaactgatacacctatttgtatatttaatatacaactcaatggtttaatctgttcaagttgtataaccactgccacaatttatattttgaacatgttatcacctcagaaagaaaccccatacccactggaagccattctctatatcctcccaaccctcattcctcccccagccctgggcaaccactaatctgtgttctgtctgtggtgttgcttatattgtggatgcttattttaaatggaatcatgtaatacgggttttgatttttttgtgattggcttcttagcatacttagcataaggttttcagggttcatc

SEQ ID NO: 10717 - DNA, 1003 bp, Homo sapiens
tggtgcaatggcagacttcctccctggccagcagggaggcatccttgctttgttactaaactccgctggttccttggttctatagtctctattctgtttcagtgtgcaatgaggtcagcagaaacacagataataacgaggctcatgataagagtagtgaagactgtgttctccctagaccacttccatcatgtttggtttcagcatgcatttggaagcagtcatttaatcagcaagtatttattgagtgtggctgtgtgcctggcactgtgcacagtcactgaggggagacggggcgggagaagggagttgggggactcggcggataagctatctcagacagtagcaggttagctcctttctttggcctgtgcttttggtatctgtctcatgttgttagcacttggaagatgggtgctgtgcttgttctagctttgctggaatttctaggggttggcagggtggggctaggagtcattttgctgtggaaactcagggggtcactttcagaaatggaatgtaggcgtgcccaatgcagctcctgactcactttccccatggctggtggatttgagggtgggcctgggagtttccagtctgtgtagagaaggggtggtggtaaggggatgaccagtctcccccttcggagcgcctcaggtcagcactccttagtgagtttgcttccctacctccaccccggctgccagcctgctgtggctctacgtgctgcagctgggcccgcagagcttaaaatagcagcgtgagctggccgctgggcatgtggggagcccgcctgaggcctgatggggcagccgcctgggcttggggctctactggctttaaccactggggtagagagtgttttggggggtttcttctaggcccagagctggagaatggggaatggatgtagctggagttcgggtgtggctggtgcagaggggaagcaaagggcttgtctttcctagacctttgaataaagggaatgcctcgaacctgacct

SEQ ID NO: 10718 - DNA, 1170 bp, Homo sapiens
ggactgtcctgggatagtcctgtagtaaatgaagaaatcagcttcttcgccctggggagtagcttagatccagggagaacctggtttagttgaatatcgagggtgagttgggtgacaggtaccaggcaggtgacattgaagtttgggttttcttctcatcctgtcacccttctcacagtctgatgagttaggagaccgctccccaccaagtttccagcgactcttgtactgttctccaaccttataggcaagagcagaaagtgctgctctgtgggtcttgggcttttgtacctgagtctgctggtggcatgacatctcgccagttctgcagggagtaagggtgggtttctagtcctgctttctcctaggggtctcggaggaagcatgtgggcagttctctgctctttttccttcgtgcaccttggggtttcaacctggttttctcttccaggtcctaccccatttcctcccaagtggaggatgctgctctacttcctgctgggatttatagaccatactatgggtttcttggaacctcttctttccaggactgtgaaatctggttcccatggagtgtcccagcccccgacgagccatcctctgcttgatggctgctgtctctgcagcatccaagaacaacagtggctgcttgtcctattacaaactcaactgactgaaacctgctgagacactgtgggaataaattatccccaacaagctctcttgtgaaaagccaggcctgtctcctgcacctcctgccccctcttcgctggcatctcagcagggttcccagaggcagcctgctgcctgtcctgttctcacaccctttctacctactgtgatggtttctttctaaccacaagtgtgataggtcaagagactttgggcgggaggggtaggggggcggcggggaggcgacttgtgcagcaggtgcccagaggtggtgagggtctgattcattccttctgtttctttttgtgttcatcagagaaagagacctcagaggaggaggatcttagatggttctgcaggacaagcaggcccttccccccaggcagaggtgtggcctgagcaaagccatgtttatgggatgacaaacttccctccctgtattgtggagtaagatgttcacaatggggctccctgggagataaacctggggtcagctca

SEQ ID NO: 10719 - DNA, 1028 bp, Homo sapiens
cccatctgattcggatgcaatgattaatcttcagtgcttagttagagccctatgttagggttagaatcctctgccctaatgttctgagggttcttgctgttgggccagaggttgggaactgggtggaactcagcccccactcgcccactccctgcattgctgcttctctcatttccttttttagatcaaaccttttttttttttttttgggtgggggtcatattaatcctcaatgcctgtccagagactataacaagatcccatctgaattagcattatgcatagattttgcccgtttctcccatctccttgtactttccctccttctcacatctggagcccctggtctgtcctgcttgcatggcccatggggtaccttgtctgcactggtctcaggcattctctgctctgttcccaccatcacctctagaggagactatgactcgctcaccttgctccccccaccagggtcaagaatgttaactcagacatgcttaatatgactgggatctggggattggggaccttgaatcctctgtgcattcattgtgtgcgcttagataagctgtcttccttccctgcctcagtctccttcgtttaatctggaacagccatggtgatggcaaataaacacaggctccttgtgaaagaactcgagggaggacatgcctgtagggcacggggtcactcgcgccgctgacctgctgccgtcctgtttctgagtctctgcagtctcgggagctccaggatccaaattcgttctgtgccctgaccttctgcctctcattccttgcagactttaagtttgccatgtacccaccgtcgatgatcgcaactggaagtgtgggagcagccatctgtgggctccagcaggatgaggaagtgagctcgctcacttgtgatgccctgactgagctgctggctaagatcaccaacacagacgtggtaggtggccaccaccttcttggctaagtccagatgtctcttctcagctcagggaaggagacgacggatttgattatgttgtg

SEQ ID NO: 10720 - DNA, 1178 bp, Homo sapiens
tggaaatttccctcctgggagttgctgctgagtctcttggcttttcgagaccgcaggcaagtcagtccgtcatctcatctggggaaactgtttgcctttttctgatactacgtagccagtccatttaagtcagctggccaactctgttaaatggatatgaagtgggtacgaagctggtttaggggtgtcctcctataaatcctaactgttggtcaagttgatacctcatttctataatgggcacacgccgtgtttcctaactggggctgcctgtgtgtgcctcattcacaccggtggacctgggttgaacatgttcatatttaaaaaccaagagtgaacgcggtgaaatgtacaattcataacactttttcaaagaaaaatctgagccctcaggaagttccaggcttacctctggcaccccggaggctggttcgctctccctgaaaatgtttttagtggaaaggttcaagcagctctgggctaggctgtgtgtgtgtgtgtgtgtgtgtgtgtttatgcacctttccaagtgctaaatctcctcccatccatcagcctgtgttctctgaaaagctgacgctcagagggaagaaaaataaaaggactagaatttagaacacattagtgtttggagggaggtgagttgtgcttcctgagctctgtttaccatttcacgagtcacgaagtggtgtatttccttcattcgtttctggaagtctttactgaaggcccagttgttgctagaagttggggtggatggtggcatctgggaaatagaggatgagattcctgccttcaaggaacttagcagttgtatgatgaagcaagagtaaagcgtgcaaaaccctagcaaattaagaacgtaaacaaaggtgtgctacgtaacgtgttacgaaccctaaatgcagtaggaaatcaacccaaaagaaggagctcatcaggcctaacgtagaatgccggcctcccagcagagaaaacttggtgatagaaactgttcttagagtagagaaacaaaatgtatgggcacgcaatggaatattattcaaccttaaaaagaaatgaaattccgatccatgttataacatgggcgaaccttgaaaatactatgttaagtgaaacgagccagacacaaaaagacaaatactgtatgattccacttataccaggtacctggaata

SEQ ID NO: 10721 - DNA, 1027 bp, Homo sapiens
ttcccagacacacagtcttgactaaagattgtcaggatcttgacacacgcttcattagtcttgactaaatgcgaatctatacctcatttcaaagaaatctgaattctttaggttccaggaccagtttattgttatacataatcacgatcatttattgagctccacttagcactgcacatatatcagtatcatctcagttgccctttactctgattattttgtggggaaactgagatcagaaaagttaaataacttaggtgccacctgcaagtatagtgggtgggcagcagataccacccttcctcatttcattgttccaggtgatatttcgtctctgcctttggcctttagtctgtggttgttcctaatcttagttttcattgaaagctgtagtttgaaatgtgggatagatgagagataggaaaggaaaatttaggggtatggaaattttgttccttagtggttagttccagctttattttgtttatttatatgtttgtttttaaagatcgggagcttgctgtgttgtccaggctggtatcgaactcctggtttcagcttcccgcctcagcctcccagagtgctgggattacaggcatgagccaatatgcctggccagctgtgttttagatctttgggaaataaagagaatgcttttgggcttggcaaaatagaaacctctgggtggggagaattgcacagtaaaagaaacaaaagggaagtttatattaaactatgaaaagacacagggaggttcaatttaacatatttgccttatgtatgtgcttcttaagagagtgcacaaaggcacctttgcagaggagagaggctagaaaatgcccgttagaagcaagtctacggtttgcaccctcttactagcaccagcaacggtccctgtctagtgatacccatgacttgtcattgcattgcatgtcatctgcctaagagaagctcctgcctggggcagacacactgtcaattacccctacaatatagactgatactaaagcaaggctgcatattcttg

SEQ ID NO: 10722 - DNA, 1867 bp, Homo sapiens
gaactggaccaagccagcacccctacagacgtgcgggatatcgacctgtgaggatgccagttgggccgaaagagagagacgcgtccataatctggtctcttcttctttctggttgtttttgttctttgtgttttagggtgaaacttaaaaaaaaaattctgcccccacctagatcatatttaaagatcttttagaagtgagagaaaaaggtcctacgaaaacggaataataaaaagcatttggtgcctatttgaagtacagcataagggaatcccttgtatatgcgaacagttattgtttgattatgtaaaagtaatagtaaaatgcttacaggaaaacctgcagagtagttagagaatatgtatgcctgcaatatgggaacaaattagaggagacttttttttttcatgttatgagctagcacatacacccccttgtagtataatttcaaggaactgtgtacgccatttatggcatgattagattgcaaagcaatgaactcaagaaggaattgaaataaggagggacatgatggggaaggagtacaaaacaatctctcaacatgattgaaccatttgggatggagaagcacctttgctctcagccacctgttactaagtcaggagtgtagttggatctctacattaatgtcctcttgctgtctacagtagctgctacctaaaaaaagatgttttattttgccagttggacacaggtgattggctcctgggtttcatgttctgtgacatcctgcttcttcttccaaatgcagttcattgcagacaccaccatattgctatctaatggggaaatgtagctatgggccataaccaaaactcacatgaaacggaggcagatggagaccaagggtgggatccagaatggagtcttttctgttattgtatttaaaagggtaatgtggccttggcatttcttcttagaaaaaaactaatttttggtgctgattggcatgtctggttcacagtttagcattgttataaaccattccattcgaaaagcactttgaaaaattgttcccgagcgatagatgggatggtttatgcaagtcatgctgaatactcctcccctcttctcttttgccccctcccttcctgcccccagtctgggttactcttcgcttctggtatctggcgttctttggtacacagttctggtgttcctaccaggactcaagagacaccccttcctgctgacattcccatcacaacattcctcagacaagcctgtaaactaaaatctgttaccattctgatggcacagaaggatcttaattcccatctctatacttctcctttggacatggaaagaaaagttattgctggtgcaaagatagatggctgaacatcagggtgtggcattttgttcccttttccgtttttttttttttattgttgttgttaattttattgcaaagttgtattcagcgtacttgaatttttcttcctctccacttcttagaggcattcagttagcaaagaggttggagcaacaacttttttttttttttttgcacaattgtaattgacaggtaatgaagctatttgttaaaatatttgcctttttaagtaaaaaagaaaaatcagaacagggctatttgaagaattattttatacacagattctgccttgtttcatagtatgagggttgaagacggaaaacaatctaagggtctctcatttttttaattttgttttgttcagtttggtttttttttttttttgcgctgctaagaagctaaagtcatccatccttattcacgttgacagtacctagctgtaatgtttcacagagtgtgctgctattttataaacatttttataatatattattttactgcttaaattcc

SEQ ID NO: 10723 - DNA, 1035 bp, Homo sapiens
ataactacaaaaggcaatgattcacgcttttgttttcataatacctcacaaccgtacagtttctgcttgggagcccattcgcatgaggaatacagaagcagtgtgagcagggctgactccctctcaggtggaaggcagggcggtctcactcccagggacctttttggtcatggaggccatcgggctcccagttagaccctggtatcctcatcatgatggaaaaaatacattgaaccaagggatcctccctccccttcaaggcagacgttcagtacaaacatttatgcggtaggctcagatgtcgtaatttgcacttaggtaccaggtgtcaggaaacagactaaaaagaattccaccaggctgtttggagatcctcatcttggagctttttcaaaagcggggcttcatctgcaaagggccctttcatcttgaagtttttcccctccgtctttcccctcccctggcatggacaccttgtgtttaggatcatctctgcaggtttcctaggtctgaatctgcgagtagatgaacctgcagcaagcagcgtttatggtgcttccttctccctcctctgtctcaaactgcgcaggcaagcactatgcaagcccaggccctctgctgagcggtactaaacggtcgggttttcaatcacactgaattggcaggataagaaaaataggtcagataagtatgggatgatagttgaagggaggtgaagaggctgcttctctacagaggtgaaattccagatgagtcagtctcttgggaagtgtgtttagaagggttcaggactttgtgagttagcatgaccctaaaattctaggggatttctggtgggacaatgggtggtgaattctgaagttttggagagggaagtggagcagccagcaagtaagctagccagagttttctcaagagccagctttgctcagcacactctcctgggccccaaggagtcccacggaatggggaaagcgggaaccctggagttcttgggaatcttggagcctaaagagaaaccgaggtgcaaattca

SEQ ID NO: 10724 - DNA, 1251 bp, Homo sapiens
tctgcttttaaacttggctgggctatcagaccctattctcggctcaggttttgagaagccatcagcaaatgtgtacgtgcatgctgtagctgcagcctgcatcccttcgcctgcagcctactttggggaaataaagtgccttactgactgtagccattacagtatccaatgtcttttgacaggtgcctgtccttgaaaaacaaagtttctatttttatttttaattggtttagttcttaactgctggccaactcttacatccccagcaaatcatcgggccattggattttttccattatgttcatcacccttatatcatgtacctcagatctctctctctctcctctctctcagttatgtagtttcttgtcttggacttttttttttcttttctttttctttttttttttgctttaaaacaagtgtgatgccatatcaagtccatgttattctctcacagtgtactctataagaggtgtgggtgtctgtttggtcaggatgttagaaagtgctgataagtagcatgatcagtgtatgcgaaaaggtttttaggaagtatggcaaaaatgttgtattggctatgatggtgacatgatatagtcagctgccttttaagaggtcttatctgttcagtgttaagtgatttaaaaaaataataacctgttttctgactagtttaaagatggatttgaaaatggttttgaatgcaattaggttatgctatttggacaataaactcaccttgacctaaattatctggccgtttttgacttatttataaaccagcagtcctcagaatggaatacacttgtctcatgtcagaactgtttcatgccgctgcaacatttggcagtggcataaaagacacattctaacctggaatggaatctacatgtgcctctgtgttatggcggtacaagtcattgttgacattgctaggggacgaggggtgcctatgcagccagcttataagctagaagcctcagtccaccttcagaaggtgggtacatcacagacactatgactggtcctcagaggatcgtccctgattgttgccagctactcattctgggctgtgaggaagcatctcctggcatgagaggtaccagaagcctgcggtgccatctccagagtctagggagtctctgggaaccctgcccctgcagctttcctggctcctgcctgctgttcttcgtggctcccacctgatttctgatccttcctgcacccctcttctgagacacaggccac

SEQ ID NO: 10725 - DNA, 1028 bp, Homo sapiens
attcattgctcagctctgtgagcctctggacatcttggtgaataccctcagaaaatcttgaagcaccacaggttttaaaagcagtcactcacttatgtttttcatatgtcactgtaagctcatcatgaagggactatggaagatttgcttccatatggcactgcctaggtattagggccaggacacctaggattttagggcctagcggtcttctcttttccttagcattctgtcagggctctggcaagaacaagaggattggcctttctagccaatgtcccccccagtgcttgctacttgcctggaatattatggactgtatcatacatttctgtattacatacaatcattgtgacagagtcaggatgctgtggtggaaaaaggcttaggtaataagatgatctgactttgaatcccagggctgccacttagctttacaagctctgagtctctgctattcttttataaaatctctctggattattagaaggattaaatgaggtagtctatgtaaagtgcctaatacatagaaagctttaacaagaatcagctagtctgaacatatgcaaacacaccaaggaccgtgttcattgcttttgaaggcattgtagatgcaatgttattttcccaaaaagtcaggggtggaggtggatatgggttttctgtggatcctgatgagactactatcaagagcacagcagtgaaacaaaagcatttacaactctcataatatccccttggtgctgccgcccttcttccagacagcaatgaacttgggcttggggagcgttctcttccccactaagtaacaggctaacaggcaaggcatgaaaagggattagaggatgcatgtattcaaataaaggggagttccccagaagcacggcaggctgagaaggcatctttcgactgtccatcagtaggaaagctgtttgactggcagatataatttttttggaaccagcaataatggggagctattggtgacagatgtcagatgttggcagagcagctgccaaaacaagtct

SEQ ID NO: 10726 - DNA, 1325 bp, Homo sapiens
tacatttggtaaagttgcaggatgcaaagcaagatacaaaaatcagtagcatttgaatatgccaacaatgaataatctgaaaaagaagaagtaatctcatttacagtagccacaaataaaattaaatactcaggaattaaccaaagaagtgaaagagctccacaaggaaaactataagacactgatgaaagaagttaaagaggacaacaaagaaatggaaagatattctatattcatagattagaagagtcaatattgttaaaatgttcatactacccaaagcaatctacagattcaatgcaatttctatcaaaataccaatgacattcttcacagaagtagaaaaaagcatcctaaaatttatgtggaactgcaaaagacccagaatggccaaagccatccttagcaaaaacaaaattggaagaatcacagtacctgacttcaaattatacaaagagctatagaaaccaaaatagcatggtactgacataaaaacagacacatagaccaatagaccagaatagagaacccagaaacaaatccatgcatctgcagcaaattcatttttgacaaagatgccaagaagatacattgggagagtctcttcaataaatagtgcttggaaaactggatatccatatacagaagaatgaaactagacccctgtctttctccatatacaaatatcaaataaaatggattgaagacttaaatctaagacctcaaactatgaaactactacaagaaaacattggggaaactctccagaacattgttctggccagagatttcttgagcaataacctgcaagcacaggcaaccaaagcaaaaatggacaaatgggatcacatcaagtttaaaagctttggtgcagcaaaggaaacaatcaacaaagtgaagagacaacccacagaatgggagaaaatatttgtaaactacccatctgacaagggattaataaccagagtatataaggagctcaaacaactttataggaaaaaatctaataatccaactaaaaatgggcaaaatgtctgaatagatgtttctcaaaagaagacatacaaatgacaaagagagggggggcggttccaagatggccgattaggaacagctccagtctgcagctcccagcgtgagcgacgcagaagacgggtgatttctgcatttccaactgagctttgaagagagtagtcgttctcccagcatggagtttgagatctgagaacggacagactgcctcctcacatgggtccctgacccccgagtagcttaactgggaggcaccccccagtaggagcagactgacacctcacacggccggg

SEQ ID NO: 10727 - DNA, 1044 bp, Homo sapiens
tttcttcacagacttggaaaaaactactttaaagttcatatggaaccaaaaaagagcccacattgccaagtcaatcctaagccaaaagaacaaagctggaggcatcacgctacctgacttcaaactatgctacaaggctacagtaaccaaaacagcatggtactggtaccaaaacagagatatagaccaatggaacagaacagagccctcagaaataataccacacatctacaactatctgaactttgacaaacctgacaaaaacaagaaatggggaaaggattccctattcaacaaatggtgctgggaaaactggctagccatatgtagaaagctgaaactggatcccttccttacaccttatacaaaaattaattcaagatggagtaaagacttacatgttagacctaaaaccataaaaaccctagaagaaaacctaggcaataccattcaggacataggcatgggcaaggacttcatgactaaaacaccaaaagcaatggcaacaaaagccaaagttgacgaatgggatctaattaaactaaagagcttctgcacagcaaaagaaactaccatcagagtgaacaggcaacctacagaatgggagaaaatttttccaatctactcatctgacaaagggcttatatccagaatctacaaagaactcaaacaaatttgcaagaaaaaaacaaccccatcaacaagtgggcaaaggatatgaacagacacttctcaaaagaagaagtttatgtagccaacagacagatgaaaaaatgctcatcatcactggccatcagagaaatgcaaatcaaaaccacaatgagataccgtctcacaccagttagaatggcaatcattaaaaagtcaggaaacaacaggtgctggagaggatgtggagaaataggaacacttttacactgttggtgggactgtaaacaagttcaaccattgtggaagacagtgtggcaattcctcagggatctagaactagaaataccatttgacccagccatcccatttctgggtatatacccaaaggattat

SEQ ID NO: 10728 - DNA, 1020 bp, Homo sapiens
ttactaaaaatacaaaaattagctgggcgtctccaaaaaaaaaaaaaaagaaaaagaaaaatcactgagctactgtatcctcatagagaataattacagtaatgtgtatgtgcgtgtgttttggtaatcttttatcttggatttatcaaacctacagaaaagttgcaagaacagtagaaggaatggctgtatactcttcacacttattcaccacttgcttacctgttgtcccacttgctttgccattttttctctctccctctgttttcccctgaaacattggagagtaactttgagtcctcatactcttcccctataaaatttcaatgtgtgtttcctgagatcaacaatgttcttatatataacccagaataaatatctgagtcaggaaatttgacattgatattgcctattagctaatccttagaccaaatttaaattctgtcaattattttgttgatgtacctgtggctttttttttttttctgaatcaagaatccaatcaatccaggactgtgtgttgtgttgcatttagttgtcatgtttcttcatgtccttccgtctactcctttgccttcctttgcccttctttttttctcccaccatctatctaaccagatgaactttgtctttcttgatcttgttactttttaaaaaataggtgagttcttgtggttttttttcctgacatatcctcattattagatttggattgtatacttttgtcagaagcagcccagaaaggatgtgtccttggtcatgtcaggagggacaggacgttgtatcaatatgtctggttcctcattaaatttgcaactactcttttagcctttattgtttattttctgactctgttttttttttctttagccaactcacgccatgactctacttttgcttctatgtttattagttggcattctgtactaagacagctttacccttcttgcctacttatttatgtcagtatgagctcagaagttcttattcaggggcttataatacagtactcttattatt

SEQ ID NO: 10729 - DNA, 1034 bp, Homo sapiens
gaaggaagtccttagagacccaaaacttgcagtatggagaagagatgggcggaaggggaatattaacaaatggaacatggcatatataatgttttactgccacaagtttctctatgaaaagtgagttagcctggagaaacttacctcatgtcatgctcttttttgcttttcttttttttggtttttgtttgtgagtttcttgtattacattttaaatatatagaaaaaggaacccacacgtgggagaaaatatttgtaaatcagataactgataagggactgtatccagagtatacacagaactcgtaaaactcaacagtaaaaagactaacaacacaatttaaaatgtgcaaaagatttcaatagactttctccagagaagataaacaaataaccaataaacacatgaaaagatgctcaatatcattagctgtgagggcaatgcaaatcaaaatcagaatgagataatacttcacacccactagatgacttaatacaaaagacaaggaatgtggagaaatttgaaccctcatatattgctggtgggaaagtaaaatggtgcagctaaattggaaaatggtttagcagttcctcaaaatgttaaacagagttattacatgacccagcctatgtatgtatccaagagaaatgaaaacatatgcccacacaaaaacccatacatgaatgttcacagcaacattattcataatagctaaaaaaaaatggaggcaatctaaatgtctatctgctaatgaatggataagtaaaatgtggtttccacaaaatggaatatttttcagccatagaaagaaatgacaactgataactgatatatactgcaatatggatgaaccttggaaacatcattctgagtgaaagaagccagatatacaggtcacatattacatgatttcatttgcatgaaatgtccagaataggcaaatccatagaaacggaaagcagattaatggttgctaggaggggagaggggtaaacaggaagtgaatgctaatgggtatggggtttctttttgg

SEQ ID NO: 10730 - DNA, 1036 bp, Homo sapiens
attaaataatgcaccttatagcattggaatttaatagtaccaattattatgtcttaaagtcctcttagaatgctttgggtcattttaaggttattataacgattggagagttcttaacgttagtaaaagcatggatttgcctacacagaattgatagtttattgaccatttcctgtatattaggcacaataataagcaattcctatgtgagatccacatttggtcttctgtaataccactgggtaagacactatttttatctccacattatagatgaggaaattcagtcttaggataagcaacttgcccatggtcatatagccagtttacatggtagagcctgaatttaaacatgttagatttcagagcccagacttctaaccatatgttaacctctctgaataaaattattgtgccagttggagtttgggatcatttatttatatctaaatgctattacattttagtactaattttcctatatctagacattgattaagatatatctgaattttctttcttattccttatatttaggcattgaaaaacatggcagtagtaaaatagaaacaatgaataagtctcctcatatctctaattgcagtgtagccagtgattatttaggtaagttttttatattaataatttttctcatcaacaatgctgtttctctgacttttgtttaaattgctgaaattgtggctagaagcaagttctttaaatttgtcaagactctcttgatgtcatggcctttatttctttgtgttttagtctcattctgtcgtactgcagacacacattcttccctgaagggtcataactacccgtggcttctagttggagcaactgacctttgaagaaaggggctgcatattcccaattctagtttgaaaattttgggggaaagattatctctgtttgggtcttggatttatccctaaaactagaggtgttcccagggcactgatgtaccatggttgacccagattgggctaatagtctattactggaagcatgggagggatgaacctgggca

SEQ ID NO: 10731 - DNA, 1044 bp, Homo sapiens
aagtggagactcggcaaaagcaggaggccatttagtggaaaagttcaaaccgtggaaacaacaaatgaaaatgtcctttgtcttgcttgagcgatttgatcacctacatgtggtcggtatgtaaaacctaggagttcgaagaaattcttcaaacatgcactctaccttattgtttctgttacttaaatctgttgtttctcttgtttgttttggtccttatggagaaagcagaggtaaatcggaagggactctctagcaatatgccagccactcttccctgactttgccctctccaactccacatattgttgcctgcaacttggctagaatgcatagtcctcaagcgtgtggaggacccagtgctgggatttagtggttttagctgactctaagcccatcgtgagtgtgttgtgatggctccccaaagagcaaatgctggtggaggctgcattcatagaaatgcaatgaccacatcaaagaatatggtcgtgctgcctgacttagcaatgagtagaacataatccagactctagaaactgtagctactttgagatcacaaagaactggaaaataggaacaaccacaaggcaggctctctctgtcaggcctgggtgtgccatcacatgaagagaggtttgaaaaaacttcacagaatgcctggagatgaggagatgcaagggagagaaagcttttttctactcaacttttgaacattcaagaactcttgagtagaaaagagatagatttgttccttggtactctgcagaggatagcaaggatcagtggaggaaattttgctcaatatagtttattcttccaagaaatatcaagtaccaaccctatgtaaattaacagttgagtgtgaaatgggttgcctagaaaaacagtgcactctgtcatagaaatattccagcatagacagagtgattgccaggaataccatagaaagaggattcttccccagggtgggaaaatggatgacatggtctccaaaacctcttctagctctttagagtctgggagtcagtgaaccctcaagagtct

SEQ ID NO: 10732 - DNA, 1033 bp, Homo sapiens
agtgctgggattacaggcatgagccaccgtgcccagccaatttattgtattttaatgtgcattttgatgatgactgttaatgagattgaaccgtttttaatgtatttattggctatttgtgtttcctcttctttgaaatacttggtcatgcctttattgtttaagaatttttctgttgtgctgtttgtccttttttattgatttacagaatattttacatattctgtctactcatcctttgtcagttgtatgtgctgcaaacagcttctcctagttgttggcttgtctgttttttatttatttaatttttaaagagcagttttaggttcccagaaaaattgagcagagaagtacactttccatataacccattcctctttacagtttctcctattattgacattttacattcatgtatagttggcacaattgatgaacgaagattgatacattattattagctgatgttcatagtttacattagagttcctcctttgtgttgtacattctaggagtctgacaaaggcataatgtcatttgtctactattataggatgataccggatagtttcactgacctaaaaataccccattgtccatctattcatcctttccccccaacaacaaaacccctggcaaccactctttatactgtctccttagttttgccttttctagaatattgtatagttggaatcatgcagtatattgccttctcagatggcttttttcatttagcagtaatgtcctccatgtcttttcatggcttgagagcttatttccttttatcagtgaataatactgcactgtatgggtgtaccagtttgcttatccattcactgactgaaggacaatttggttgtttccaattttttagcagttataaataaatctgctataagcattcatgtgcaggtttttatgtggacatacatttttttagttcatttgggtgaaccaaggagcatgattgctggattgtatgttaaggctatatttagcttcataagaaactgctacactgtcttccaaa

SEQ ID NO: 10733 - DNA, 1018 bp, Homo sapiens
tatattgaatacagactttgcatgctccctttctaacttgatatgctccctttctaacttgataactctcttgccaagtcacaagactcagaagctgtctaccccaaatcaatctgacagtttgaaaacttagtcttatatttgtcttatgttttgtttgtttgttataaacttggctcacttagattcactttcctacgacagtgcccacgttggagttcgttatcaataaagcagggacagtcacacctcctttataatcaggttgctggcggatttgatgctgtgatggtgtaatgggagttctaagtgctggccagctgcacttccctttcactgccagcgggggcgcagtctaactgagaagttgtcctgggggagagcgttctggagggtaagaagtttgtcccacgaggtttctcttactttgcctccgcagtatacacgtacatccaaagccggttctaccgatccccagaagtgatcctgggccacccctacgacgtggccattgacatgtggagcctgggctgcatcacggcggagttgtacacgggctaccccctgttccccggggagaatgaggtggagcagctggcctgcatcatggaggtacgcggagggctggcggtcggctcccacggagaccgtgggcttggccctcagacacggggctgcaccagactcgcccaggaccatggcctgcataccttgttgttgttgttgttgttgagtattccctaaaaggagttttgaaattgtgtactcccttgtacttgtcaagtcgacatctaacgttttatcataaatttaaatagttgcagaggatgtcatttccatcatattgtaaatagtgacattttaaaataaaattacaccgctctttcaaaaatatccaaaagaatgcaaaaccagacggacatgacacccattaaaatctatctgatagtatgtgaacaggttcttaagagttgtgccatgattttactttgttcttttttcccttttgtttctactc

SEQ ID NO: 10734 - DNA, 1066 bp, Homo sapiens
gatatgctgtacgtataaaatatacactagatttcaaagactcagtatgaagaaaacaatatacgattcatcattaacaattttttatatttgttacatattaaaataatattttggatatattaggttaaataaaatgtattattaaaatgaattttacttgtttcttttttacctatgtgcctcatgttatatttctattgaatagtgctctataaacataaaaaaatcacaaatagggtgttttataacttggttgtttagtatagatttaacttagaacagtcctttctgagcattccctttgtcgtcctttaatctacaggttctttagggcagtagttgccaatgcggtgaggcaggggaaagagggtagaggagggccattaagggagtgattaatggaactctttgattgtcacagtgattggggagctgtcctggttattaggtacaggcacagggatgctaaatatcctacggagcacaggacagtctctttccacaaagagttgtgctgccccaaatgcctgcagccaagctattgattgcgatactgtctgggccttgatgcttaaatctactgatcttatagctgacttcctacttgtgttgtcctgtaaggaatggagttatacattttcccttttaaaaaatacttgctaaactttcttactatctctggtaatattcatacagattatttgtaatccctttaaattttgatttattttcatttcattttcacattttcatttattcttgactcagtgttcacaagctaagtataatacttgtatcagaaatttcttatttccaaaatgtttttcttctccaaaatcttactattaagtatattcttggtattaaagttacagaatcttagcttattcctagttctttgtccctcaagtttgttggtcaccttgtcagagcctcaaaattgaagtatttaaaaagtgataggtgaaaacttttgaaccattggaattaaaccaaatgacatctattccattatttctgcagagatttatttcctgaatgtctagcattgacctgtgctctg

SEQ ID NO: 10735 - DNA, 1106 bp, Homo sapiens
cttttacagagatacaagccacatgggaacgcagggagcacttcactggctgaatagggagttaggaaaagcatcacggggaagctgacgtgtaagctggatctcacaggataggagtttggcacaccatgaagcgagagaaaaggggaaggacattctaggcaggaggaacaaagacacagcgctatgaagaaacttggctggtcaagtagcgggggtcaggcatgtacacgtacagcacgttaagaggcttggacctcatccagctggaaataggagccacgaaagggcttgaagcaaagcagtgaaagcagatttgtgctttgggaagggctctctgattgtaccacataaagggagtcagaagggggcggagctggaggcgggagactggctgggcctggggaagtcattcaagcaagatgtgaaaagtggatagaaagatgtgggtcagtctgagggatgtttagaaagttgaatgcgtgcttccggtgataaagtggatgtggaagatgaagaatcacggatgcttccgaagttcttggcttgggaacctcgctggctggtggtaccattgaccaaggcgtggaacactggaaaagaagcagatttacaaggggaagaagataaaatcaaaactttgagggtacctgtggaacatggaaatattcaaaaagcagaaaggtatttgactaataagtttgaaaaaggcaaacctaattagtgaccaaagaatgcaaatttaaatgacaataagggattttttttcccatgtagcacattagttaataaacattttgaacgttagccttagtgctctgctgactccttgttctccttctgacccttacatcatccccactgcatccgtatggagtccttagagcttctcagagcatgatgggaaaaaccactggcttagagcactagggataaaaagccaagctccttggaaaggtagaactagtcttagttactggcagcagagtttcctaatggcaaactgcccaggaaagggaaggatggccagaaagccttcatctgcagctgtgttggggtgggagaaggaacactgggaaggagggtcaggctctgtcccaggatcc

SEQ ID NO: 10736 - DNA, 1047 bp, Homo sapiens
gactacagataaaaccccaggccagctgacaccttgattctggcctccataaacattcagcagagaacccagctgagactgcccagacttctgacattcaaaactgtgttgttttaagccaccaactgtgtgatgatttgttactcagcaataggaaactaataaatatacttactttttgttctatttttttgtttgttattctctacataattgtagatatgtatatttaactttagttctgtcagtttttgctttatgtattttgatgatctgttatgtggttgttgactgaaatgaaggctgttgagacagaagttattttatttattttattttttatttttaatagagatggggtctcactatgtcgtccaggcggatctcaaacccgtgggctcaagcaatcttcctgccccagcctcccaaagtgctgggattacaggcatgggccactgtgcccagccagcagaaataatttgataaaggtttattggaagccaaatgtaaggactgacttgggaaaacacaccaacaaagttacacatgttctggagtctgttacaaattggaaggcttttatagaaaagtttaggagcagggagggggactccttataccaaacttgtcctttttcattggagggttcaatacaaagattgcaatcattgaatacacattacaacatacaggttaaaatgtctacatgcaagaccatcagtaaaacttcatgattcagcaataaatcagcatccttttcaatgccagtaggttatgtatcaatcattgcatcaataatttgaggaactcatagtaagattctttattcaaggacagaatgtcaccataagaccttcccaaggtcagttactttgaaagactgttggccgagcgtggtggctcacgcctgtaatcccagcactttgcgaggccgaggagggcagatcatgaggtcaggagttcgagaccagcctggccaatatggtgaaaccccatctctactaagaatacaaaaattagctgggcgtggtggcgcgcacctgtagt

SEQ ID NO: 10737 - DNA, 1088 bp, Homo sapiens
ttagtaaatttctctgtggttccatttcttcttctgtaagatggggacaaaaatatagcatgtttctcacagtttggttataaagattaaataattaataggttaaagcacttaaaataatatctggaataatgcattccaaaatgttagtttttattacttaggtagaaatcaaaatttttacatagaggagaaaaacagtatgcttcaattggtattgcctttctactttccttccatctttctttcctccccgtcttccttccttctttccttttgtccctcactaaacatttattgaaattccactacatgccaggaattatgctagccatcgaaatatgtgctttgattttttaaaaatattctaaccctggtagctatctattctttcctgctagagacagagagggctagtataccagcgtgaactgttagcagctcttttgctagtatctgaagacatcaagagagaagcattaactggaatgttagaaatagtttaaaaagtataggtactagcaagccaagcttctggtgtcttcatagatgagaaaactgagctctgaggtgatatataacttcaaaatgtcctatagccagttaaccagagagccaagactcaaacctgtggtttctgggtgtctcacaatctctttccataaatgctcctattttttctacccaacagcctggacagagtgcttagggagtgagtcactgataggccacatattgtctcagcatcttgtgtggtgtgttgcatgccaaatgtttctgctcagcttcccttctcttcccatctgcaaaattgtattcacttatactgtgggcaagggtgggggatgggaggtgcactgaacctagaactgacaaaagtcaaactccaaccagcacatctggcttgcaggcgttccccacagcctcagagatgcggcctcgcatgggaatggagacttttgtcctgcggccttagcagtcctctgagactctggccatctgggactggtgacaaagtcctggtctctgacctcagctgcccatgggctacttctccctgtcccatcactctttctggtctgctgact

SEQ ID NO: 10738 - DNA, 1061 bp, Homo sapiens
ccagactgctgagtgacctacgtgtagtttagcaacataatgcttggaatgagccacgccgacctgatgcgagaaccggatggtagccgaagagagcaggccaggtagtgagacaactatgatctgcagaggtgggcagcggggtggagacaggcttcttctgcaccaagtactgctacctgaactgtacatcacagagacaagccctgccgagagcagtggaagcaggaaaacacaggcctatctctgtgtctgtcatgtaagtaagtctctcttggctgtgtgtacctgccaccatcaccccatcccaccccaaatatacagcatcaccttcagctatagcttttggtttttgattaaaggacagtaatatttccaggagggagaagagtgatgaacagaagcatttatgtatggacactgggcaatttattgtttttcaaagtctaatctagaacatgtttgcaagaaagcgtgaattgagtaaaaagtttactatcgtattaaggactgttaggtacaatgactgaaggaggagttaagagtgatccttcaataattcccctgtgggattatgcacatttaaggaaaaatgttcttcaggctatttctgccttagagctaggcatcattacagcgaaatagagaactaacctttaagcaagaggaaccaagttctagttctatttctgtcaatcactgtacgcacaacctctcaaagccttagtttcctctttgcaaagtgggataataaaccctacctacttaacacaatgtggggtttcaggtgagatgatgcataggatcgtgcttggcaagctgtaaatctgtaaattacaaatatatattatggtttcaactggtacattcctaagcgaatagcacattgctctgttgggaagacggctcttctccaagtcaggctgggataatgttccctgacaagacactgccatacctaggtgttccccaaacattgtctctgggaaccttgaggaagcaccataagacatgggaagaaatgttacagcgctggcttgaaagaataacaatgtatcagt

SEQ ID NO: 10739 - DNA, 1034 bp, Homo sapiens
gcctggatccactccagtaccttaactaatctcttgactcccagatggtccaaaatatgtggatttagaagagcaacagacagctgttcctctgggcctctccaagaacacggtttggtgtctagaccaccttagagaaacatggcagaggaaatcatggtggagcagcatggaaacaggtgaaacccagacttagtaccttgttaaattccatcctggagtggagataccagaggagcagatattacctttattaactgatagaaatgtttggggatttctctgacttcttgtagggttggataagccccaaagtgaagagaattttgctccttgttttagccattaggaaactcaagaccctgctacagtgctattggtttaatttttccctatcacattgcctctgcaacttctgaatggttgcagccatttcttaaaatttccctgcattgtcactcagacaacaagaatagatttggccttcttcatctcaaaataatggtcatgattaatagttattggactgggaacagtgctcagccctctgtacgtgatctcaggaatcctcacagtactcaatgaaatagcaattttattatctcatttttgcagacaaagcaacggaaacttccacacattttctacattgcacctaagatcatctgagaaactatgctgtacttgtttttctaatgtatgatctgatttttctattataatgttaattctatgaggacagggctttctgtggccttgcttcattgctgtatctccagcacctggactactgcatggcacctggtagttacttagtaaaggtttttcaaatgactgagtaactcatccaagattaaatgtctaggaagtggtggcaccaagcttaggacgactcttttctgattccagagtccagacagccctaaccactatcccacactaccttcttgtttatttttaaatcattttccttcccttcaatccctctccagtgccttacaccttcttgctgtaatttgaagcatggccacagt

SEQ ID NO: 10740 - DNA, 1051 bp, Homo sapiens
gcattaaaagagaagtgattccccagatgtggacatctcagtgcctgggaggcagacgtctttagagtgcttggtgttcctccccatatctaacttacctgttcttaggacatattcccttgagtgtcttttattatttcgttgattgattaagggttacaaatttgttacaaaagcagcagaaattttgaaagataaaacaggtagaaactgttatttaattggaggcacaaaagccagttccagcttgagcattaactggctgtgtggcttgggcagctcccctgcacttttgggaccatggtttcttcagctctaaagtgaaagctgagagttcctctgaatgctaaaatcttgcttctctgtgattattgttttttaaatgccgccgtcatttcaaaacacatacatggggcagccctcctcagctgcctgtcctgttctcttccctccttccctttgtgccatcagcgtctcccctggatttatcgtgctgtactccttggacacccttgaaagtggagagagaataattctcattccctttccccaaactctgtcctgaagcaccactccccacctccctaccatgcctgcccctccaccccccacattttccctctgatgagatttcctctctgagggaatattttggtcctgttctctgttcccaaacaaattccccaggtcctttaaatctggtttcaatcaacataatcacagtctcttcgatgctatcaactctgccttgatttggttgtgtgattcatgctgtgtcctccacctcctcaggctgttttatatatacacacttaagtgctcatatatatgtgtatatattacacaggttgtatgtatatgatgtattgaaagagagagatgttttccaccgtgcctgtaattactttttatcttcctccaaatcagtatcttaatgcatatcacctaaactggattcattttgagaacactagggccttttttttacttttcaagaacagctatctaattctgggccaaaaactagttatcaaatgagggcaggtaatgg

SEQ ID NO: 10741 - DNA, 1050 bp, Homo sapiens
ctctggcagcaggccttggccaaggggcctttagccctgacgacccggggaagagtctcccaaagcagaacgcccggtccggcgcccagaccaaacgcgggggaaccggaagggcgaggcctccacgtaagtccgcggtaaaagtggcagggagtggctgcctgcaaagaccccaagacggcttgaagaaggagtgggtggcgggtgggggttagggcgactaggcggggaaacagggagagggtcgggctccgcggggcagctggggccggggctcgccgacctgggcgggggcggggggcggggggggtgcggcccgggcggggccggtggggcgggaggcgtggccggcggggggagtgggggcggcttttcccggcacatgcgcaccgcagcgggtcgcgcgccctaaggagtggcactttttaaaagtgcagccggagaccagcctacagccgcctgcatctgtatccagcgccaggtcccgccagtcccagctgcgcgcgccccccagtcccgcacccgttcggcccaggctaagttagccctcaccatgccggtcaaaggaggcaccaagtgcatcaaatacctgctgttcggatttaacttcatcttctgggtgagtgagcgcgactgccgcgcgctcctctcagggcccacctgttcgcgggccccggacactggccgcggccgcgagtgccggcagctggcactgcccgcaccgggcaggcaccgggcgggaagagagagcgccctgcggctgccagctggctccaaggccgggtccagagccgggcgggacggccgcgacgggcgcattcgggtgggggctcatcaccgcccagccggcgtggggagccgggccctcttgagatgaggcgtgcgggagggtcctgagcactttagctcgcctaggatttgagctggggtgtgtgtctgctcccagctcaagtccctccgagtgccagagaggaaggcagggagaagcggagcacccctctttgggccaaggccaaggaggactgtggtgagcagtatggcttgtgaccg

SEQ ID NO: 10742 - DNA, 1034 bp, Homo sapiens
taagaatgccccattggcagagactcgctttgtggagctcaacttggaaattaatttacaatggaaattgaaggaaaatctacttcatgtccacaccaagaagggtggcctcaatgcctctccttcagttcactccttgtgccttccaaaaggaagttgattcttcgtatgtagaattttctggacacctagaacacctacacccagaaaccaggtcccagagagatgcagagccacggtcaccattgcttgtgtagacaccaggggtaggaagtggaaggaaggtagcgcctgagggtgcagcttcccagggaccaccacctctcccagcctcaatggcgggagagaacaaacccaagggagaagctacgggccagcatcttccctccctccctcttggcccccaccagggctagggtcaacaccccaaattgaaagcatctgttgtcaagctgcagcaggcagggaaaccctgtcaccaggttaaggcttaagtcagagcattttgccaaattcaacacgtccaagcctcccacttgtcccccaagaaaatttctcagggattcacatctttcccagtcaccccctggccagtgaggaagcaccgtgcatcgagaagagcatagctttgagtcgtctatgtggagctggttccatctgagctctgcctcttcctggctgtgtctttttgagtcagttgcttaaaatctctgagcctgattcatccataaaatgagggtgatgagaggattcagtgagagactgtacataaaccacctcctgtaatgtgtcgggggcgtgggtccttgtacatagtaacttctactgttaaattgctactgtggtgttattttccctaagctagacaacctgcaacttgaccattagcctcttttttttttttttttttttttttgagatggggtctctgtcacccaggctggagtgcagtggcgcagtgtcaactcactgcagccttgacctcctggatttaagccatcctccttcctcagccccccaagtagctggaacta

SEQ ID NO: 10743 - DNA, 1050 bp, Homo sapiens
atttaaattctcacaaataatctatgagctgtagggacaaatgtggaaactccatacagagaggcttagtaatttgccaaaactcatacctaagtgaagagaaaaacaagatggaagcctgagaaaatagtcaggtcaggagtagtatttcaattattatcatcctctagatcatagagattcaatttaggagccaagttaggagccaagtagagctgaaggactgaccaaagtgtaagggacagggagaaacagcccgagtgggtttctggaggatgtgggaggagatgggaagtgcccaaaggccctgagagaaggcagtgctagcagctgccatctgcccagtgacgttgtccaagcacaggcatctggtggctgagagcttagagagaacaagatggaacgcataacatttgttcgtggaggaagatgtgaaaatgccgtctctgcccctctctcgtctgcccattgtaggtgattaaggaagtccaggagttttacaaggacacctacaacaagctgaaaaccaaggatgagccccagcgggaaacgctgaaagccatccactatgcggtatgtcgccttggcaaagacaccctcctgcgctttctccggattgtgtctgcacacagggtgctgactgcaccagaccagtgcaaacattctaatcgtcttcttacaatttgtttctctcatccccatccctgccttctcgctgtagttgaactgctgtggtttggctgggggcgtggaacagtttatctcagacatctgccccaagaaggacgtactcgaaaccttcaccgtgaaggtaaactcagaccaggatcctggtgtccctgcccccattgctctggacaaaccctgcaagcatgaaagtgacagcagccaagtgctgcttcagcaagacccgttctgcctgtgaaagggccccagggcacccatctctttctctcccactttgggccctctgtttactcaagggcaataaaacaaaggccggaccaggggaatgacaagtgttctggcaccgcccactgctgccagccc

SEQ ID NO: 10744 - DNA, 1029 bp, Homo sapiens
ctcctgcttcagcaccttctgactcgtttggcctcctggatgccattctccttgtcatttttcttggactgggtgacccatgtctctccctttccctcagccttccttcagatcaaaccaccctgatcctcatgtttcttcctatctcctagatatttggcatgatcttcagtatgatcttgtgctgtgctatccgcaggaaccgcgagatggtctagagtcagcttacatccctgagcaggaaagtttacccatgaagattggtgggattttttgtttgtttgttttgttttgtttgttgtttgttgtttgtttttttgccactaattttagtattcattctgcattgctagataaaagctgaagttactttatgtttgtcttttaatgcttcattcaatattgacatttgtagttgagcggggggtttggtttgctttggtttatattttttcagttgtttgtttttgcttgttatattaagcagaaatcctgcaatgaaaggtactatatttgctagactctagacaagatattgtacataaaagaatttttttgtctttaaatagatacaaatgtctatcaactttaatcaagttgtaacttatattgaagacaatttgatacataataaaaaattatgacaatgtcctggactggtttttgttttgtttaattattttgagagctatttggtttgcaaatgtctttcaactcctattaactccacctgcatttttttttttttttaagacggagtttcgctcttgttgcccaggctggagtgcaatggcccgatcttggctcaccacagcctccacctcctgggttcaaacaattctcctgcctcagcttcctgagtagctgggattacaggcatgcaccaccacacccggctaattttgtatttttagtagagacggggtttctccgtgttggtcaggctggtctcgaactcccaacctcagttgatccgcccgcctcagcctcccaaagtgctgggattacaggcgtgagccaccgtgcccg

SEQ ID NO: 10745 - DNA, 1027 bp, Homo sapiens
gctggggtgggagaattgcttgagcccaggaggcaggggctgcagtgagccatgatcatgccactgcactgcaacctggccacagagctagaccctgtttcaaaaaagaaaaaaaaagaagtgtactgggaatggtggcttgtccctgtaatcccaaccacttgggaggcagaagcaggattgttaaggccaggagttcaagaccagcttgggcaacatagtctctaaaattaattatacaaagcttaaaaataaataatataaagaagaagatagtaggacctgtcatttcatgttggatcatcagagaaggcttgctgttacgtcacgtttgagcagagaccttaagaaagtaaggaaataaactatgcagattgttagggaagagcattccaagcaaacagaaaagcctatgcaaaggccttgaggtgggcaaatgccaatagagttggagtgcattaagctaggaaaaagagattaggtaggaagtggtacagattattctagaatcttgctcctcaaaatgtggtcctcagatcagcagtgttaatatcaggatctcatgatctgggagcttattagaaatgcaggatgtcaaggcccaggatgtcaaagctgctgaatcaggaaatctgtattttaagaagattcccccaggcaatttggatgcaattataagcttgagaagcactgatctctagagcctcgtagatcatggcaaaaacttgaacttcagtgtgaatgaacttgaaagccattgggttttgagcatgggagtgacatggtctgacattttaaaagattcactggcgactgtgttgagcagagactataagaggcaaggagagaagcagggatactagttaagtggctaatacagtaataccaagtagattggactggagggatagcaggggaagtggtgataaaacgactcaggatatattttcaaagtagagcttttacaggaatgctgatggattggattggattatagggttagtaaaggaatctgagatgagaatga

SEQ ID NO: 10746 - DNA, 1330 bp, Homo sapiens
caggctgcctttcgagctcaggggcccctggctatgctgcagcactttgatactatctacagcattttgcagtaagtgaaacacccaactggtactttaaaaagaactggtgactgtttgtcctaactgtgcatgttagtcctgaaattccaagttataggttcactgataaatgcctctggatattgatatctctactgatgagcatgtacccagcttgccaccgtatttattcagttgaacaatttcacgtgtatttttaaacattcgattccacgggttagatctgatctgttagaaggggctctgcaggctccttcctgtctcacccccacactttctttccctcatagtcactttcgaagtatagatcctggcctcaaagaagatactctgcaattcctgataaaaggtgtttatgggtcagggggtaggggatggaaggtgtttgttatcgtttgtttgtttgtctgtttgtttgtttttcctacattttgtcagccacatgatgatatcaaggctgttgtgattcagttggtttggctaagcccagggacctttggcctgttaaaggtctgtaatcttggtgggcgatacagagttatgtgtgttcactgtaagggcagaccaacaagaactttttcctacttttgagctacctctttttaataggggtgattcttccagttgctggagagaaattgtggtaactggagtgagagagtaggaacagggcatgttcagggtatcagggccaagggtcctaaaggacttagcttgtgttatggccactgagagatgaaacacagatctttggtaatctgatggctgcaagtgctgggtgttttgaagttggggtatatgaaagaagtgagtgaaactgactccaagattctgcccctcacagtggtatcccgccactcccaggagcttccagctatcctggatgatacaactttgagtggatcagatagaaacgcccatctaaatgccctcaaaatgaactgttatgctctgatacgtctcctggaatcctttgagaccatggccagccagacaaaccttgtggacctggaccttggtgggaaggtaatttggagttttgggctcacgttatatggggtctggggagataggggaatagatggaaaagaagggaatccaatgatccacaaatcctttctgtcctcattgagaatttaggagaaagaactcaaaagtgtcacacgttttcttcctggacaagtagcgctgtggaacttgtaatatttcttccgtattaccttctatgttgtcttggtactagattgtttgggcactcagactgaca

SEQ ID NO: 10747 - DNA, 1030 bp, Homo sapiens
cccaccattaatcaccagaagaaccgccccactcgggaagccataacacacctgcttggtgtagccttgacccgttataaccatatgctcagtaagttaccagtcgctttgccccgccttttttgtattgcccataatttctcatgtttaatgcttccacaggtgctacagtgaagatcatccagatgctgcagcactttgaacacctggcacctgtactggttgcagccgtgagtctatgggcaactgactatggaatgaagagcatagtgggagagattgtaaggtgactcttccttctcgaagtttctcatgcttattttccttggggagggaataaagaaagattggaaatacattatctgtgcaacagtagattccttcagatattagatacctgtcttaccttcccttactgggaactgaataattgatctatgttgctatggctgtgttttcttccctgtgtagagagattggacaaaagtgtccccaagagctgagtcgagacccttcagggacaaagggctttgcagcattcctgacagaactagcagaacgtgtcccagctatcctgatgtccagcatgtgcattttgctagatcacctggatggagaagtaggtggtccactaggggtcactgagctttttctggggattttaagtccagtgttgaaaggctgtttcttaacagaacaagaaagtagctttgacaagttgtctagatttatcattgtgacatttcctttctgtagagaagcaggtcaagtttgttgaataaggagctctttattaatctgttaatctttcaattcacattgcttttatccagttctggtaagggagatgacatttctgcagcttaagtctagtaagagcaactcagctttgattttttttttttcttggaggtaggatctggctctgtcacccatgctggagcatgatcatagctcattgcagcctcgatctcctgggctcaagcaatcctcccacctcagcctcccaagtagctgggacttcaggcac

SEQ ID NO: 10748 - DNA, 1026 bp, Homo sapiens
ggctggattgcggggcgagctgcgcggccgatccgggcgccgcgctccccgccgtgcttctcggggccccggagcccgactccgggccgggacccacgcaggggtcctgggagcgacagcttctccgtgcagcgctccgccgcgcagactgcctgacccagtgcgcagcacggaggctgggccccgggggcgcggcgcgcttcgcgtggggagcgcgctccgggacgccttccgccgtcgggagccctacaactacctgcagagggcctattaccaggtggggagcgggccgggcagctccgagggtcccagccctcaccacgacgctgtcctactttgcgttgcccaggagtaggcggaatgctgttgcccgggccccgcacggggctggggagcgtaccgcgggcctctgcgtaggagctggctaagcgaccgcgaggacctcttgagatcgcagaggagcagccgagggggagtgcgagcagaatgggaatggggcggggaggtcgtgaggtgggacgggagcagatcgaagatggagggacagggccgcctcttcctaggaatgaagcggaggcggtgggggcgaaaccggctctcggacgggaagtgtgcgtgggtgtgtgtgtgtgtcgggggtggtggtgagtgtgaaccttcgcttggggcaggaggtagcttcggaaaggaaggagcagacggaggcaaggttggggtcctccgaggccagacctctgcgggcggggaggggacagcacgccgcagccgccggtaccgcagcagttgcctacgtggctggggaagcggggcgccggttgtactcacctcagctcagggtcctagagacctgcgggttttgctggtcgctgaggtctcccccacttccccacctcacttaagccatcacttccacctggtctcccaaattgaggtcctgaagtcctgagacccatgtcccacccaactccgacgtctttagatcccctttccctcggtgccagccttctgagagtcccaacgttctgg

SEQ ID NO: 10749 - DNA, 1827 bp, Homo sapiens
aaaattggctgggtgtggtagctcctgcctgtagtctcacctactcaggaggctgaggcaggaggattgtttgagcacccgggaggttgaggctgcagtgagctatgattgcaccactggactccagcctgggctacagagaccctgtctcaaaaaaggaaaatactgcagatgagactaaatttttgattactccccactcaaatcctcatccctttcctaccaagcctgtcttaccttatcctatacaggtagaatcagaatcacaagtaattccaaccctcacccggtttcatctgtcttccctgaccgtcagccccagaagggccatgaccgcactcatattactcatattcaagggaaccaagagggtggaccttactggctctccttctgtcccctcaagtcccttctgtgcaagggatgggatggtggcctggctagtcctgagccacttcccctgattctcttcctgcctcctgctctagacgtgtactcatatgatgaggatgacatggtcctggaccccagcctggctgagcacctgtcccacttcggcatcgacatgctgaagatgcagaaggtgagacccccttcaacttcagattcttctacttcctgcccctgtgagggcccttcctctttgcctgaggctgaggtagggttttggagaaatcttctagttaaccccatccccaagatacacaggcttcttttaaatatctaaaatcatttattcagtgaatagtactgagtacctactatgtgctagaggctgtgtgaataagacagatgtggtttttgcttacaagagttctactctagaagaaaaggcagacattagtcacattcccagataaataagtgaatagttgcaaactggtgggcactgtgaaagagaggcggagggtactacagtaattgacagcagggtggcctggcctagtttagggatcagggacatttccctgaggaagcgatgcttaactgacaatgtgaaggaggttaggggtaacttaaggatgggaaaaacatttcaggtagaaggaaattttattcctcattcaagcagaggccctgatgactaacgggcctctgggacaattatgtgtggccttccagaacttgaactggacgatactcaacatacctcccatgtttgagcctgtaattccacaaattctaggccacagttgagtatcatcctagactcagtgagagatcgaggtaaaaactacagggttgagtttctcactcagtctgaagtgccccttctcacacagacagacaagacgatgactgagttggagatagacatgaaccagcggattggtgaatgggagctgatccaggagtcaggtgtgccactcaagcccctgtttgggcctggctacacaggcatccggaacctgggtaacagctgctacctcaactctgtggtccaggtgctcttcagcatccctgacttccagaggaagtgagtagtgccctctccttccccaggccccctcctggtcagcaccctctgggcatactcctccttcagcttccctcagcacctctgtgtttgattctagtcttagagtagttcctatcggctgggtgtgttggcccacacccgtaatcccagtacttcgggaggccaagatgggagaattgcttgagcccaggaggttgagaccagcctgggcaacatagcgagaccctgtcttctcttaaaaaaaaaaaagaataattcctgtcacactctggctgacatgctgtgaggggagcaagttagggagctgcaccaccagcaccccaacacacaaaccccactgatagtgc

SEQ ID NO: 10750 - DNA, 1008 bp, Homo sapiens
ttgtctatcccacagttggagaggggccctctctgccccagtgggcgatctgggctacggccaagttgccaccagctagttccgcttgaaaaccacttctggccccgtgggggactcaagtcgccaagcgagggttcccctgagcgccggagctcacaggtctcgccttgtcccgaaagccccgcaatcgaggcggaggcgaccgagcccccgactctcctagaacgttgccacaagaagggggaacgtcggaacagtgcatcatcgggcggcggccggggcggcggcaggagggcgggcggggggcagggctccgggggactgggcgggccatggcggaggacggcgaggaggcggagttccacttcgcggcgctctatataagtgggcagtggccgcgactgcgcgcagacactgaccttcagcgcctcggctccagcgccatggcgccctccaggaagttcttcgttgggggaaactggaagatgaacgggcggaagcagagtctgggggagctcatcggcactctgaacgcggccaaggtgccggccgacaccggtaagccctcgccgaggaggggtctggccgggccggggccggggccggggcaggagtggcagcgccctctcccgaggccccgaggccccgaggccggtatccgcgcggacctgatgcagggctgtgggacgagggccgctggggtccgggcaggggcctcgcagccgcagccccgtcggtgcgtcgagggggcagggcggagcacatgatgccccttggactatggggcaggtaaggacgttttgggtctcctggaggaaggtggccccggggcgcgcactggggctgtgcccgccaggcgacggggttaggagcggagcccgaggctctgcgggagaccgggggaggctgggccgcgtgggcttcccgctccctgcgccctggcctcccgcgccgtgcgccgccgcacgtagccccagactcctccccttcctcgccggcgtccgcgtc

SEQ ID NO: 10751 - DNA, 1252 bp, Homo sapiens
atcagagccctggtactctgactcagtcagaaaccacactaagtgtccactggtgccagtgatttttcctcttagagaggcagaaaaggtcttacttaggccagcttcttgttctaggcccaggaagtacacgagaagctccgaggatggctgaagtccaacgtctctgatgcggtggctcagagcacccgtatcatttatggaggtgagtggctttggttcccggctgaggtggagtgggctgaggactagactgagccctcggacatggaggtggggatggggcagactcatcccattcttgaccaagcccttgttctgctcccttcccaggctctgtgactggggcaacctgcaaggagctggccagccagcctgatgtggatggcttccttgtgggtggtgcttccctcaagcccgaattcgtggacatcatcaatgccaaacaatgagccccatccatcttccctacccttcctgccaagccagggactaagcagcccagaagcccagtaactgccctttccctgcatatgcttctgatggtgtcatctgctccttcctgtggcctcatccaaactgtatcttcctttactgtttatatcttcaccctgtaatggttgggaccaggccaatcccttctccacttactataatggttggaactaaacgtcaccaaggtggcttctccttggctgagagatggaaggcgtggtgggatttgctcctgggttccctaggccctagtgagggcagaagagaaaccatcctctcccttcttacaccgtgaggccaagatcccctcagaaggcaggagtgctgccctctcccatggtgcccgtgcctctgtgctgtgtatgtgaaccacccatgtgagggaataaacctggcactaggtcttgtggtttgtctgccttcactggacttgcccagataatcttcctttttgaggcagctatataaatgatcatttgtgcaagaaaaaaaaaaaaacaagaacaggtttctataacaacatctcttactatttttacttgaaaaaatgttttgcgtagcagactgtcatagccttgaacgccggctccctttcttcctccctccaagtggctctggggctgttgatttccgcagagcttgggttggggtaggggctcagcctcaccagctttcagcagctggtctaggccagcagtgcctccccacctccccaaggggaggggtggtggcaagacctcagcacagtctgtggtat

SEQ ID NO: 10752 - DNA, 1025 bp, Homo sapiens
cgcagggcgcagaccgccggccgcttccgcccccagctcctcccttgggccgagcccgtcccgcggccccgcccctccagggccctctggggcttaaccctctcatcgccgcccacggccgtgcagctccgaggccacgcccctgtggggccccgccccctcctgggcagttaccgctctataccggcagcagccgcggagagcatgccccgcccccgtggagcccaccccgggcggttaacctcgggtctcagtcccgggctgtgaccctccccgaggccccgcccccacggcgaaggcccggggcagttaacccttctcttgctgcggcagagtccgcacccgggcaggcccatctcagaattaacgctttgatggcatcaccgcgtcgggaatccctggggatggtgttctccaccgtcaagacctttgagccgcctgagcgactaactcctgcgcccctgagggtaaggagcatggggtcaaggaggggcttcattgtgccgaatcccatttctacttccctgtgattctgggtcactgtttctgggctggtccctttctgccccgggttgtgagtcagcctgtgccacctctgaggctgtgaaatctgcttcaggctctaggctgtacgcatcatagttctccctgctggtccagtcttcatactggatgccaatccattactgagccgttgatctcatttggtagagtgtcctgattaagacttcgagtttgagtgaagctatgccactagttaactgcgcgatcttggggaagttgcccgatttctcttttttttttttttgagacagggtcttgctgtcaccaaggctagagtgcagtggcgccatcacagcccactgcagccttgacctcctgggctcaagtgatcctcctacctcagcctcccaagtagctgggactacaggcatgtgctaccacacccagctaatttttaaaaaaatatttttatttttatttttatttttttcgagacagagtcttgctcttgttgcccaggc

SEQ ID NO: 10753 - DNA, 1048 bp, Homo sapiens
tatatatgtcatcttttcaatttttctctctccttatgaccccaaacttccatcccattctctctgataatagcccccaaacccgtctggctccatctctgccacagatccctcaccccaagcttctctcacttctcaccaggcacccacaaagcccccaggcagctccatctttccaatccaatcccattatcccaatctctaccccaggatcccccaaactcctcccacttcacctctgccacagacccgctcgcccccaaacttcagcctcccctcatctgccctcaccacccacagcccctcctacctagccctctcccgcgccgggcccgcgggctccccacattccgccacggctagccctccccgcgccccggccccctcggcctcggcctcggccaactcgcgctgcgcctccccctctccggctccccctctctcccccctcgcggcttgcctcgcgctccctccctcgcgtctccctcctggcccctctctcctccgttcctccgcgctccctccttctccctcttcctcccttctcccatccccctctcccaggctccctcccttcgccgtccgctttcctgtgcgagtcgccggacgcaccgcccagcccgtccgcagccccgcgccgggtcggggcctcgggccgggccatttcggagggaccgcggcttcggggaggggctaggaggggggagagggagccgactgccggggaaggggcgggggccgcgggcgaggcggccgaggggcccgggatcgcgcgggtgcgggctgcgctaggcgggcgcgggcggcggcgggtcggaaccgcgccgagggccgggcgggccgcggggccgggcggcgcggcgggggcgggcggcgcggcccggggcattccgggcggccagggggaggcggcgagcccggggaggtggggagcagagcggggatcggggtttgctccgggggccggcgggcgattggggccaggcggggaaaaggggggatgggggccgccctccgggggggtcggggccgccgccgccgtcgtcgc

SEQ ID NO: 10754 - DNA, 1038 bp, Homo sapiens
ggacacctgggatggtctcttgaggggcaccttttgccactgtgttgctatggtagtgatccagtgggatgtcagattggttgggggggcttcgaatgtttattggacctcagcctgtggctgtccttgggactctgggctgggttttggaggttgtttctggatctgttggtggttgggagtttccccacggtgtgcaccctttcatgttgaagtctgttggaacaggtagatacgttccttgcagatcataggtgtttctccaagtctctccacctgggcatgatgggaggatgaaaacgcttctgttcaggttacaccatcttttggcagttggttctgacctctacctcccttattatgttattttttgtagagttgtctttttgcttctttgcactttctttcattttctaaaacttgaattcctctttgagcctcccttcttgagtaacccttttcctctttccctcaactaacctttggccttcttccctgaccttgtagaaatggctgggctcccaggcccatcccaggtgagggtggcccaggacagagggctgtgaaacagcttcatgcaggggaaatactatagaacaggagccaggagacctgtgtctagacctggctgtgcctctgtgaccttgggcaagtcacttctctttgagcctgggcttcattgttaagatgaaggggctatagatgagatgatctctgaggcctctctgaaggtcccggattctcagaaggcttaggccagtgcatcgttatctgctggtctgggctgcattgttatctaggagtcactttggactggtttgttagtctggcaggtccagaatgatgttgggggctgggccaatgatcctgaaatttagcctgcgagcccctcccagagagcttgtgactccactgtattccttctgacatcccatatttctctcttaatttcttttcctgttcttacttaggggctctttttctagttctcactttcctcccaacccagtctggtcttaatcattttctttttaaagt

SEQ ID NO: 10755 - DNA, 1043 bp, Homo sapiens
ggcctgccatcgctgccaccaccacctgcggcccctgcctcagggccgcccctgagcgccacgcagatcaaacaggagccggctgaggagtatgagacccccgagagcccggtgcccccagcccgcagcccctcgccccctcccaaggtggtagatgtacccagccatgccagtcagtctgccaggtgagcggccaggtggggcggaggtgggcctggaaaggggacgacgacaaggcggcgacgagagagggagtagcagggaggggccttgcgctggtgtagtgttttagaaaagcacgcccctctcctccgtccaggcctagtggccagtgaggcccgcagcagctcacagcctgcaggggtggttttgaggcgggggctacaagcactcgccggggccgcggcgctgcgggctccatcgggcagctcgcaccgcctgagcgcccgctgcttccacgcccggcaggttcaacaaacacctggatcgcggcttcaactcgtgcgcgcgcagcgacctgtacttcgtgccactggagggctccaagctggccaagaagcgggccgacctggtggagaaggtgcggcgcgaggccgagcagcgcgcgcgcgaagaaaaggagcgcgagcgcgagcgggaacgcgagaaagagcgcgagcgcgagaaggagcgcgagcttgaacgcagcgtggtgagtgcgtcactgcctgcgccaccgccttctttccctctttccttccttccctctgcgctgcgctgcgctacgctacgctgcggggctgtggctgggtgggcgggcgagtcacgtcgccacctgtcggaggggaggtaccactgcagcccaggaaatggagcccaaaaggttttcagcgagagccatctgcattcctgggttgggaaaaggcatgctcagatgggactacctgtggatcccaagaagggcaaatattcgggagcgggggccgcagttaagttccaggtgggcagagtttcaatgagttgaggcattttggcattcggctgtcgaaacaaatgggcagctt

SEQ ID NO: 10756 - DNA, 1055 bp, Homo sapiens
gttatgaagcgggggtggggtgggctagttttaataggtccaggcgattagtacctggcatccttaaccacctacagtttgagaagggagtgggtgataaaagcctggaagggaagggaaatcgggccgggcattaggctccatcgctcatcaatagacaaggcctttaggaaactgcgacaacggcttttgctctgggcctttactgccgaatccaggtctccgggcttaacaacaacgaaggggctgtgactggctgctttctcaaccaatcagcaccgaactcatttgcatgggctgagaacaaatgttcgcgaactctagaaatgaatgacttaagtaagttccttagaatattatttttcctactgaaagttaccacatgcgtcgttgtttatacagtaataggaacaagaaaaaagtcacctaagctcaccctcatcaattgtggagttcctttatatcccatcttctctccaaacacatacgcagcagtgttacagctcttttagaatttgtctagtaggctttctggctttttaccggaaagcccctcttatgatgtttgttgccaatgatagattgttttcactgtgcaaaaattatgggtagttttggtggtcttgatgcagttgtaagcttggggtatgaaggtttgggccacgcctgggcgcttccggctgcgccggatgctgtttcctttccgctcccaggggcgttgggaacggttgtaggacgtggctctttattcgtgagttttccatttacctccgctgaacctagagcttcagacgccctatggcgtccgcctcgacccaaccggcggccttgagcgctgagcaagcaaagggtgagaatcgtcctagtcaaggcataggctgctggcctggggtagtcaaggcatgggctgctggtctggggaggatgcgggcggaggatgtggggcgacaaacctggctacgtccgccgggaaaatggggtaggggacgccgggtaccgtccttctaagtggggcgcttgcccccaagacttgggatcttattgggttacctaca

SEQ ID NO: 10757 - DNA, 1029 bp, Homo sapiens
tggggagtgcaaataaggctgcacagtaatcccccgaagggcttgctgggctccacccccagtgttcctggtttagtaggtctagggtgggcctgagaatttgcctaacaagtttccaggtgcagctgctgctggtagtttggggaccacacttgaagaaccacggggctaggtaacagaagcttatgctgttctctcgtcatgttccctgttcttcaggtagggaagacatatgagctactcaactgtgacaagcacaagtctatattgttgaagaatggacgggaccctggggaagcgcggccagatatcacccaccaggtaactccagggacagtgctcacaaccctttgagcctctgtatggaagggttggcagctgagtgctgcctctcttcagccttaaccatgtctcggtttctgctttgctcagagtttgctgatgctgatggatagtcccctgaaccgagctggcttgctacaggtttatatccatacacagaagaatgttctgattgaagtgaatccccagacccgaattcccagaacctttgaccgcttttgtggcctcatgggtaagaagccttagaacaaagttagaatgaacttgtcagtagggaagaagggaggaagaggaaaagggagaactaaatgtggatttttaagcgagaaaatgggagaacaacatgattaataccaggacaaggactgttattatttttctatgtttgtggaaactccactcctgttcttgcagtagcttcctggctgagtgaaagagggagtctgaacccatcactgtacagctagccatatgcttggcaactgtttgttcctaacatttcaggagtccagtctagatataaagcacacagggaactcatcttatccatggggttttccttgttcgatgactggacagaaggactgtggtctccatctagctctgaactcttttttcccccttctagttcaacttttacacaagctcagtgttcgagcagctgatggcccccagaagcttttgaag

SEQ ID NO: 10758 - DNA, 1109 bp, Homo sapiens
attaagaatccagtatcagatcactttccagttggatgtatgaaagttggcacttctttttccatcccggttgtcagtgatgtgcgtgagctggtgcccagcagtgatcctattgtttttgtggtaggggcctttgcccatggcaaggtaaggtctgggctcaaccctgaaattcttggtagagctgaacttagtatagaattcccagagcagtaggcattttaacaatgcttacaatgagctagaagacacatgacagttccacaccctgccccagggcacatcctttgagggctgctgccataattggaagtcacagttaggaccttcttcatcctttgtagggatttgatattcaacagcacagctgaaatactagctcagccatagttttcctgccctaaagaagggctgaaacagctactgagtgacagagttggctgacaaaactgttcttttcttaggtcagtgtggagtatacagagaagatggtgtccatcagtaactaccccctttctgctgccctcacctgtgcaaaacttaccacagcctttgaggaagtatggggggtcatttgacagtagtagaacctgttctgaaaccagaaactgttgatgtcacatcctttgaccctggtctgagctgactgctggaagatgatctttctgcactgagactgtggagtttggggaagccaaggctgtacatttgctatttgtttatcctatgaatactgttcttgcaaacctggttgttttggggttcctaaagtatccagtggtgtaaaactgtttgttccccgggacttcagggacagataggaggttacagagtttgcagtttggttccatgctttgaaggcaggctttagctcccagattcccatgtgctaaaggagagaaccctgatgatggagaagaactgtgaaagagagcagtcaggaatgctagtggtgaaaaactgaacaaacagaagtgattttatctaatacagttccaaggtagaaaaagtggagcaggcagggccttgcacccctctccacccccccatggggggggtggtggtagcggcacatacacaatcatagtaaattggcagaagaaaaacac

SEQ ID NO: 10759 - DNA, 1032 bp, Homo sapiens
atccttgctcagtgctatctgaaagggagattgcacaggctggggaatgagggagagctccgctctggaatttgggttcagtcttttgttaacaacttttttcttccctttcattaagtcttgaacctctctgccgatgaatgggtacttacctgatctttccctccgtcaaagtagtcaacagccaaacctgagcagagagagaacggatgggtagggtggtgggagaggacactgaggatgtggcctgtagactgagtgcagccagaagtgtatggcggggggcggagggggggtgccgaggaagtttttagtgagatgggggagggacctacatgtaaggaaggcaggcagtgaccatcactcaccaatcagcttcaaagtcagaacacaatgtggcattgtccacttgatatcgtagttgccggtggcagtgtaatagtatccagccagaaggtaggcctaggagaggcagaagtatttattctagcatcactactatttcttctccttgctctgaaattcaatgttctctttcctttttcctttctcctcatcccatcattaaaagccttaataaattcctacaaatggaggtgctgaaaacctgtaatgggaagagcgttgctcaaggcttcttggcaaaatgagggctaaactgagatgagaatttagatgctgggaccacaggtgcatgccaccccacccggctaatttttaattttttttgtttcaccatgttgcccaggctggagggctaatttttgtattttttttgtagagatggggtttcaccatgttgcccgggttagtctcaaactcctgggctcaagcaatctgactgccttggcctcccaaggtgctgggattacaggtgtgagccactttgcctggcctaggcttaggttctttaactcattctaagttgcttttctgtcttgccttgaagtgactctgctcctggatagtgggttaaaccaaagagcctaatggcacagtatgcaaagggttagctggtggcccttccttgag

SEQ ID NO: 10760 - DNA, 1021 bp, Homo sapiens
ctactttatgtctctatagattggcctattctaggtgtttcatataaatggcgtcaggcaatgtgtagacctttgtgtctggcttatttcacttagcatgttttcaaggttcatccatgttgtagcatgtatcagtacttcattcctgtttatggctgaataatatcccgttgtatggatactctgcattcttttttttaacatttaaaaattttttatagacaaggtctcactatgttgctcaggctggtcttgaattcctgagctcaaatgatctgtccacctcagcttcccaaagtgctaggattgcaggcatgagccactacgcccagcctggatactctgcatataatctacccattcatcagctgacaaacaactgggttgtttccactttaggaacattatgaagaatgctgctacaaacattcatgcattttgtagagacagggtctcactatgttgcctaggccggtcttgaactcctggcctcaaatgatcctcctgctttggcctcccagagtgctgcaattacaggtatgagcccatgtacaagtttttgtgtgaacatatgtttttatgttttcaattctcttgggtatatacctaggaatggatctcctggatctttttcttttttttccctttgggacagagtctctctgtgttgtccaggctgaagtgcagtggcatgatcttggctcacggcaacctccgcttcccaggttcaagtgattctcctgtctcagcctcccgagtagctgggattacaggtgtgcaccaccatgcccagctaatttttgtattttcagtagagatggggtttctccatgttggccaggctagtctcgaactcctgacctcaagtgatcgacctgccttggcgtcccaaagtgctgggattacaggcgtgagccaccgggctgttgcccacgctggagtgcagtggcatgctcacagctcactgcagcctcaactttctaggttcaagtgatcctcccacctgagcctccctagcagc

SEQ ID NO: 10761 - DNA, 1103 bp, Homo sapiens
tggctaatttttttgtatttttagtggagacggggtttcaccgtgttagccaggatagtctcgatctcctgacctcgtgatctgcccgcctcagcctcccaaagtgctgggattataggtgtgagccactgcgcccggccgaaaattgagtattcttttaatggattttaagatataaaatctcaggctcagaaatttgagccacctaggggtgagaaattttggcctttgcccgcttcgaactgacttaactaaattaaatctatagaaagtaaaaaataaaggtctgtgaatgtacccagtactctcaggaagaagcatatttgccatgaagctaaaaaagcttcagtttcactccccttccaaggctctggggggtggggtgggggcgggagctagcaacgtgctcacatggtcatatatttttgtaaaacttatagaagatatttttgtattctttttcttaaagaagatatccaagattgtataagcttcagatcccagaaatcctagatttaaaaaaaataatcaaccaccaccccaacaaaattaggcacatgcctgaaaattctgctgctactgccagaattctgcgggtaggggcttcatccaaggtgttcctaataataggcagagtccccagattagttccggtgaggcttttgggaggggttatttggcgcggtgttggtgttggtaggatcctggctgtgaggctgaggcaggcctgaggagggctggggctgacaggtaggcagagttggctgggatgtgaggtgcaaggggtggtacttcggaaacaaactttgaagaggagaaggggcagcaagactgtgagtctggactttgtgatacactgtcacccctagtttagtgtgcctggttagggagaatcaagcagcatggaacccctcttcctttttcactaacatttttctgtatagtggttgaaacccagtgttaagagactgcatgacattggaaaagaaggggaggagaaaaagagtccatatgaggcaagaacagaacgcagccagaattagggcaggcagggaaaggaagggagtgagatgtgggagtcgggggggagttgaggtaacctg

SEQ ID NO: 10762 - DNA, 1037 bp, Homo sapiens
tagggaggggccgcatgtgcgggaggcagcactgcccacacgtactgtgcagacatgtcagatgacttgtgacctttgtacacatgccatttcccttcttatggctggttttaatttggcttttactctgcatcttccttgcttatccccccggatctgactgttgtgaaggaaggccctgctggattttatgccttacccctcctcttggcaccctgacccatagcattttgcacagaagtcatcaaaatcagctcctgagcacccctgggccttgttcctcatcccctacatcagtcctcctttctttgggccctccctctggtgttgtcctctccctggcatgactttgatgcagcttggtgccctgtggggtggggaggagcgtgctgactgcctcagtctcagggatagatgggcaggctccctcctgttctggctctccgtcgggattcctgcttgctcctttctggcatatgggtgtaccgtgtcgaggctgtaccttggtgtacagtataaggctgtatctcgttgtgcccatattgaggctgtttgttggtgtacagtattgaggctgtatcttggtgtacggtatcgaacctgtccctccatgtgccgtatcaaggctgtatcttgatgtaccgtatcgaggctgtacctcggtgtgctgtatcaaggctgtatctcaatgtataatgtcgaggctggctgacgtgtcttcatccctccttctctctggcatatgcagggccactgtgcatgtgcgggtcaacgatgtgaacgagtttgccccagtgtttgtggaacggctgtatcgtgcggctgtgacagaggggaagctgtacgatcgcatcctgcgggtggaagccattgacggtgactgctccccccagtacagccagatctgctactatgagattctcacacccaacacccctttcctcattgacaatgacggtgagtccacccctggcttccctggccacccagttccccttgagcacccacctccctcaggacaacccagggttgcattc

SEQ ID NO: 10763 - DNA, 1061 bp, Homo sapiens
ctcttgttttcagttgcccagtcaacttctctgtgtcccaccatgtggtaggctgtccccaccccccatctccacctccattaaagcccctccattgcaatgggaaagcctgggtaatggtgtgccccattctttcatcatcccatcctgggactggttggccccaactccgaggcctgttcttccctcaactgcagggcctacttcactggagagggcttagtcttgacctgctctttcatttctagccaattctccaacctcatttctcttgaccttgacaactcttttgaaaagggttgtcacccatgatgtatgtattaaccaaaggactgatgaagagctggtgatggagtgggccagctgatgttccctcctcagccagccagccagggtgcctaagaagcccaagttatcacttggactggaatgtgtgtgtgtgtgtgtgtgtgtgtgtgtgtgtgtgtgtgagagagagagagagagagagagagaggaaagaaaaatgctagagaacgagggaatgagagaggattaagagaatccaacatcctctccttcctgctgctttgaacttgttctggcctcagcctctgcacttgaccccatccccttcctgtgccctcagaggacggcttctctcactactcgctgactgtccacggctgtaggattgccttcctctactggcccctgcttgagagtgcccgcccagtcaagttcctctggaagctggagcaggtgaggcaagagccaggctcctgggagggctgagtagatgtgactcacttttaggaaaggaccttctctgggcagggtcagcattttctgggttcccccttgccctctctttgcttcttcactttcagcccctgaccattctactcccaggtcctcttgttcccttttcccaaagcttgtcccctgcagaaagcacttctggatttaaaaaaaaaagggaacaaatgactactaacaccaaagtcgaccaaccatctatttcctccttgttttattctctctctctcttatttaggactttaacagtatacatccctgac

SEQ ID NO: 10764 - DNA, 1045 bp, Homo sapiens
atgtgattccctctccccaaatgggcctaccaagggggcgggctgatgaccataagcggtacggcctttcaggagctgcctcaacgtaggggtgggtagtctgtgttctagttcctacataattgtaggaaaatgagctgtgtcatctctgagtcccttggtaattcaagggctgtacatccagctacagatctctctgctcatcatgccctttcttggtgctgctttttgggtaggaccccacgatttagggtaactgttatcatcagctgccatttctgatagggtctaccacatctgtaatgtctgtcctttcccccacttttactgggaattgatagtccagcttccttgggcagtgtaagtaggaggttcatctgctgtgcgcctctaatgtctgtctggatgggatgtgttaggagttggcctgttgggttgaattgttgatttggctgagcagagctgagttttggtaggagtgctcatggttctgtcattcttggacctctcctggctgagctctgattccctgtgagcacgatgctgatgcaatagtcctgtgtcatcactgcagcggtcctcaggagctgccagggccaattgctacagagtgtctgggtgtgtggcataggaggaaggtttgcttgtgaaatgaggctgggtgggagcggggagggactagatcagaagagatcaagggctctattcaggaacgttggtgggaggacagagcaagtgggaagggggtatggtgagtgcggcaatccctcatcctcttagaagcacctgtgaatgggaattgagccaactgttatagaaaattggttcagaaagtgcaatcttgccagatttctagcaaataggttcagtgttaccataagcctttgctgtacttcttgaaatgtttctaggggagagcattggaaaatccccttcccccatctagatcgaaggaagatgagggagcagcttggattcttctcagttgtcccctgcatggggagatacactaacccccagaaatgactgctaagcctcttgcctt

SEQ ID NO: 10765 - DNA, 1051 bp, Homo sapiens
tatctctaaaggaaaagtttgagattctgacatcctgaaaaccattgcagatgcagtgcaggctttgtaatgcaaaccactgcaggcttgctgcttccacttctacctctatagtctgtcagtttgctaatttttaatttctagtattctcttttttccccatttaaaaacaacagctacatttatttagcacttactaagtgctctaaaaatattaactcaaggtaatccttacaacaatcaaaatagtggagctgggattgaaactcaggcagcctaactcctcatgtgctacacctagccactgccctctttgttctagcattctgtatggggcaggaagtcatcacaccttattacctgacattggcattagaacaattagtggcctttcagataaaatgggaagaaaactgagcctgttattgtggatcttacatgtttcatccaggatcggtctttcactccgagaatgtctatgtgtctgtttttctctgcctttctcccagttctgtagtcttcattagacgtcgtgtggatgtgatggaccctgccctttggctgcctttcccagcttctatgggtatttcctttcagtcttccagcacacagagaagaatgtggcctgactcaggttctgcccaagccccgtggcacagggccctggagagagaggtctgggtaactaggttggttggactgagaaatggaagtacctcttgtttgcctttctaataatagccctgaacattagcctcgtgccattattttggggagcgtggaatgtgtggcagccaccagctcattaagtttcattcacttccctccagggacgatgctttggcagggtttatgggttcatctcttttatggaagggggaaactgaggcatcaagacttcactgggggccaggcatggtgtttcacacctgtaatcccagcactttgggagaccgagatgggtagatcacctgaggtcaggagttcaagaccagccaggccaacatggtgaaaccccacctctactaaaaatacaaaaaatagccgggtg

SEQ ID NO: 10766 - DNA, 1058 bp, Homo sapiens
gaaataagccagacggataaataatgcatgatctcacttacaagtggaatctagaaaaagttaaactcacagaaacccagtagaatcatggttacccaggctaggaggtcagggaagaaggaagataatggtcaaagggtacaaaccttcagctataagatgaataagcaccgagacctgatgtacaggatggtaactatagttaataataatgcatacctgaaatttgctaagagagtagatctcaagtgttctcaccacacacacaagtaactacgtgaggtaatggatacgtttattagcctaattgtaatcatttcacaatgtatacatatattaaaatatcacattgtatattctaaatatatataatttttatttgtcaaccatacctcaataaagctggaaaaaagatatatatatgtatatgtaaaaagtaacacatactgctttcttcagagattctgatatacctcccgcttttgccttcctgtaggaggacttaagagacttcctgaactgcgtcttttcttatcattactgagattttgaggcactgctattgacagaggtatatcttagaccttaagtttttgtttgggaaaaaaaatgtggacaatcaattttctagctcaactccccttaattatatttgatactacttgtcttgttataatgtgagcctgtattactcctcacttcctccattctgataacctcctaggcagtctgcttgccaatggcttttttagttctaattcagcttacatgttaaccccaaagtaatgtttgtgaaacaaagctctgctcatgttttttactctcctattaattgcctttaataattcttctttgcttataaagtccaaaatataatttcatcttcaactcagttttcccattgactcacaatgtgctttaacaaacttaagaactactagttgtttctttgtttctttctgttgtttttttttttttttttttttttttttttagacggagtctcactctgtcgcccaggctggagggcagtggcatgatctcggctcactgcaagc

SEQ ID NO: 10767 - DNA, 1554 bp, Homo sapiens
tctccactagttgagtgaaaggaaggaggtaatttaccaccatgtttggttcctgtttataagatgttttaagaaagatctgaaacagattttctgaagaaagcagaagctctcttcccattatgacttcggaaatcacttatgctgaagtgaggttcaaaaatgaattcaagtcctcaggcatcaacacagcctcttctgcaggtaaagatcattttctaggggtcagagtgaatgacgaggtgaaggatgaggagagggtttatgaataaggcataggtgttttcagttgctggttgtctgattgagtatgtctgggaaacacaagagtcccagaagattgagtggcctgcagatacgcattacggggtgtacatttgtattgtggagaagaaaagattttgtgccactctcttcagcctccactctgcttactgaaacagaggtgagagaaatccactccagttctgagctaaggcgagtgctctgatgcccctgtgttttctgaggctgagtggggctggggttaagagattgagtacagcttctgaaaccatcaatccagatgcagggggtcctgatgaatttgtgagatttgttttttgatcagttagagggaaagagtttgggtggacagtggtgagggtatatttgttggtaatggatggaaatgtaacaaaaggcctttgcaaatgaaagactagaaagtctacaaagaaagtctcttaaatctccaggaaactttttctgaaatcagagaacctattgcgtgttgcatctctgagacagactctgttacgtttgggagtagatgcaaggtgatttgggtgtcatgtgtgatatctcaagtatagagcaaaagagagaaaagaatgtatatagagtacaagaaactatgggggaaggggtcaggactatagttacgctttctaaaatacctctgtgaaggtgtggagagcacttagggaaattttttctccttaaaaactttatataatttctttattacacaagtattaatgttcattgtagaaaaaattaaccagaggtacacagatatttgaattataattactcttatcatctagagaaaatcataatttgcaatttagtgaatatccttccacatacaaatacatataatgtgcatatgtattttactaaaaatgtaatcatattatataatactgaatttttttcccccatcatttgacaaaatatcataactcgaagaaagtgattcctaaccatgagatggtaactaaaaagactgactttattctaaacatgtgatgaggaatgattataaagatttatttgctatagcattatttaaagttggaaaccattatttaaatatatgatgaaatactatgcaaccataataaggagtgttaaagaagaaaatataatggtatgaaaaatgttcatgatatagtgtaaaggaaaataataggtcagaaatcagtatttatggtatgtcaatcgtgggaaaatttgcatatgtgtatatatacattcaaaaaattgctagaaagatatataccaaaatat

SEQ ID NO: 10768 - DNA, 1052 bp, Homo sapiens
caaagtgctgggattacagatgtgagccaccgtgcccggccccatttttgttgtcttgattgtaggcatctattgattattatattttattaaatttgaaaacttactggttcttagcataatgacttattttctattgaactctggatatttttgcattatattctcagagtctggatcttatttaaacatgttttcgtaatagctgggcttttcagatggcacttcagcaggagaaaaggggccctgcctcattactgcctgattgaggtagacttggcttccttgacacctgaggggcaggggctcctggttgcatctgagtgtggaggggagttccagcttccatgtgctctctcttggctcttaattttaataatacacacacttttaagagtgattatttatattgcacgtatgtgcccctcttcccaatacagagacagcctggagctgttgcccaaagaattggaagtcatttagttccaactgctactttatttctactgaatcagcatcttggcaagacagtgagaaggactgtgctagaatggaggctcacctgctggtgataaacactcaagaagagcaggtactttctaatagataatggggctgtgagccctgcctgatctttgtatatctctcttggctaagaaggaggtttttgttactttgggatatttgcgctgtggcagaaggctttcaataaaataggtagaaagggctcctaagcctttatattccatacctccttcctgcttcagtaaaactaacctccccggaagaaattgtgacattaaaaatatatgagggttgaatggaaggatgaaaatgtttcagtctgaaatatcaatttgttatttcaatatgtaaatgttttatacatgattaactacttaacaaagaagaggtattaagttgaatagagaaaagaaataaagttaactcatgatgaatcacaatcaacactcaggaatgaaaataaagaatccctgaagttatgaaaggaaaatgactgaatctgccaaaattttctcatgtacaacttt

SEQ ID NO: 10769 - DNA, 1031 bp, Homo sapiens
ccctactatactgatatataattgtatatatatactgacatatatatatattatattttatatatatattataatatatatatatacactgacaaataaaattgtatatatttaaggtttacactgtggtgatttgacatacatatatattgtaaaatgattaccgtaatcaagttacttaacccacacccattatcttacatagttaacaatcttgtgtgtagtgagaacgtttaagatctactccattctgtccattggtatcaacaaacacaaagcaagatctactccccaaaaaatttcaagtgtgcaatgcatcattattaactatagtcaccatccagcacattagatctctagaacttcgtcatcttagaactgaaaatttgtaccctttgaccaacattgcctgattttctccactgccctccattccctcacaaccatcattttaccctctgtttctatggattgactttttaagattctacatataagtagaattgtacagtatttgtcattctctgtatgacttattatatttcacttagtataatgccctccagattcatccatgttgtgcaaatgacaggatttcctttttttatggctgaatactactccattttatatacatagtacattttctttatcctttcatccattggccaatacttaagttgtttccgtgtcttcactattgtgaataatgatccaataagcatggaagtgcagatatctgttctagataatgatttcattttcttttggtatatacccagaagtaggattgctggatcatatgatagttttatttatatttatttatttatttatttagagatggagtctcattctgtcggcaggctggagtaaaatggcatgatcttggctcactgcaacctctgcctcctgggttcaagcgattctcctgcctcagcctctcaagtagctgggatacaggtgaacgccaccatgcccagccaatttttgtatttttagtagagacggggtttcagcatgttggccag

SEQ ID NO: 10770 - DNA, 1028 bp, Homo sapiens
aactcagcctgtggggaacatggattttcacaacagcaaccacagagcgtggtttccatttctattccctgttcatgtgggaggcagagaaggaaatcaggtgctcagttccagggacatcacaggactaggacatgtgcagtgagggtggaaggcagaggcattgctttaggagaataaaattactgcatgcacacacatatgtatgtatatggatgtatgtacacaaacatgcatatttataggttctgttctccctctctctatataattttctttatttcacacttgatatgatttctaaatttaaatacctttgagacaaatgtgaattgtgaagggatttaaaaatgtcagtgaaaaatggaattaacaataaaaatataaatataaactttgtttctcaatataagctctactgaggtccagacactccattaagggatgatcccagccattcagtccattgctaaacaactgagggtaacgggaatttaaccttgtcaatgcagtcttctattagtaactaaagaaaaacgggtgccctttacagttattttaagattagggaaaaaaaggtcagaagaaaccaaatcaggactgtaatgttgatgcctaataatttcccatgaaaactcttgcaaaattacccatgtttgatgagaggaaggagcagaagtgttgttgtggtgcagagtgactctctagtgaagctttacagggcgcttttctgcaaaagtacttgctaattttctctaagaactctcctagtaagcagatgttatggtgctttgatcttacagaaagtcaaccagcaaaatgccttgagcatccccaaaacctccatggcttttgcttttgagaagtttgcttttgctttgactggaccacttctacctcttggtagccattgctcgaattgtgctttgtcttcaggatcttattgataaagccagtttcactccctgttataattcttcaaaataatgcttcaggatcttgattccgcttgctcaaaatagccacta

SEQ ID NO: 10771 - DNA, 1064 bp, Homo sapiens
agactttttgaaaaacatttttaaaaatactagttttttctcatttgtttcattaatttatattttgtatttataattttccctttatcttctttagggttattatgctgttttttttccaaaagcccccaaaatgcgtgcttagcccattaaattttagccatttttgtattgaaagtaatgttacccatttctgtgtggttacctgtaatataccgtgagcagcacttcttggtgtctttgctccttattaattcacttgtctgaagttcctttaactctgctttctggtcctcagtttcactttgcaaatcattttttattcataaccatataaaacataatttattttgaaaagtctctcatataattttcacttattctaggattataatttttccgtttgtctcttagaataaaactttcagatttgtcaacactcatttagcagtagctcctattgataggattccatccatctcttttgacctagtaagtgaatataacaatagatgccatagaaattcaatcctgtcagatctaactgcctacatataaatttccatgtcccgcaaaggcatctcattgaggtcatgttctgttgtatccttactttgtatcttgagatgcttggtggggcatggaaatttatatgcaggcagtttcatctgacaggattgaatttcagcagcatccattattatatccactcactaggtcaaaagacatggatggaatcttatcaacaggagctactgctaaatgagtctcttttctatttttccctattataatcctagtgaagctgtaaatattaggttcttgaacccacaggactgattctaggatcttgtctggccagggatatagccttctcatctgcagaaccttatagtaatcagctaccaacttacctggggataagagaattgaaaaaagaaggagaataaggagaagcacatggagtctcacggctgaagggccagcatcaatgtgggttgagcctggattctctgggcattgtgggtctgggcctttttatgatgctctctgagtctgtgatt

SEQ ID NO: 10772 - DNA, 1034 bp, Homo sapiens
tttactaccttttatttcaaaagtgtctatatcaagttgtgacaaaacagattcaaacttgttcctttcttaaatgcttttattctgtattcagcttcttacatttcttttttttccttctgatactagcttttggcttcacgttcctataaatttagaaataaggtctctaaagtggaatatagaattgctgtataagatcagaccatttcttactactgtgctttccaattttgaggagtatttgaatttttcatactttatcagaaaactgcattttgaaaagtcaggcagggttgcccaaatagcaaccttggaattcttccctgaggctttggagttctcagttgttagtttattcctttgacatgtgatttagttagccatatctgtaaagccttgggcttgagagtaaatgaatagctttctaactcctttttcaaagtaatatctgggaagaaaatttagacagaaggccagacatttatcatgttaaatatgaaacttggggactttgtactgtgcattaaacctaggaactgtcttctgtgccatgttccagaaataatttgatgtaagtttcttctattaagtgaaatcattagaaatgtttggaggctgggcatggtggctcacacctgtaatcccaacactttgtggggccaagatgggtggatcacctaaggccaggagtttgagaccagcctggccaacatggcgaaaacccatgtctactaaaaatacaaaaattagctgggtgtagtggcacgtgcctgtaatttcagctactcgggaggctgaggcaggagaattgcttgaacccaggaggcaggttgcagggagccaagatcgcaccactgcactccagcctgggcagcagagtgagactccctctcaaaaaaaagaaaaagaaaagaaaaagagaaatgttgtttggattccagaagaacttttttaaggcagggttttgctttgtcacccaggctgaagtacagtagtatgtgatcatagctcactgtagccttgaacttcta

SEQ ID NO: 10773 - DNA, 1310 bp, Homo sapiens
tctatcgtatgttacaatagaattctatacagattccactgtgtgttacagtagagttctatacagattccactgtgtgttacaatagagttctatacagattccattatgtgttacagtagagttctatacagattctattgtgtgttagagttttatacatattctattttatattagtgtatttttttcctttagctttatttttcttcagtatttgggattttgagctcatatgttaatggattttcttagtaagaggtaccttaatatcttcagatggtagattgtgattttttgctttttctgtactagaataaatacctttgggaagggtcctcacaagaaagatgagagggagagaaatgactttcattttaactttttttcttttattctgtgatgtaatagaaatcttttatgctctcatttgtcctctgtacagaataggttgacacatccttttggaagctttaaatatttgtaatgtattttgagattttgactctaaacattgaacttttcctttgtttattaaggaaatttgatccagtaagaaacaacactaagttttagatcccaggatgttgacttgaaaaacttttaaagtagaaaaattattcctcgggttggtctaataagggaactaaaagttgggagaaacaaagtggtactttctaaactattaccttagaaaaaatttaggaaatcttaagcagtgaaacaaatgtctgcttatttcctatttcagaagatgaatgaagcactttaagattcccatatactcagttttgcctgagtattccaagatgcagtgctgttttttattggtatgctgatccagaagtttgtgtgggaaaactctcaaaaataaactctctttgtagaatttctctttatttcaaaaaaggtacttttgtcagtagtatttattcagcatctgatatttatacattgtttttcttgatgcactggaggaaataaagagaggatgggattggttgacctgagcttacattctaagagaggaaatactatacggtactcatctatactatatgtggacatttgcaattgctgcgtttatgtttcgctactggagaatattttcttacagttatcttattgggtaaccaagtttactcctttaaactactaggaaaaaagtttgccattttattttatagaggactctactgtcttttaaaatagtgaatattgtctgaattttaagattctggatcattagcaggactgtcattttattggtgcacttttgagctcctgtactatttagatttactggaatc

SEQ ID NO: 10774 - DNA, 1049 bp, Homo sapiens
cagttctgtactttaaatggatgaattttacaatatgtgaattatatctcaaagccgtttaaaaaatgttacacgtcatttacacattatctgtgcaatgttttcacagtcaggttaaagagagggtatagttgtaaatgagtagaaggcatagaagttcttttccttttccttttttttttccctcattgcctctccctttgtgtcagtgtatgtaaaactgctctcttgaacttctcttacaaatctgttctagctccaatattagtcttttctattaatggtgtcctattcctagcctaagcttgaagaaatcatggagtcaactttcttcttcattctcccttacttccagatataatgtaaaaggcttgtctgttttgttcatagtatatctgacataatgtctgttcttactactgctaatgaaatcaaagttgcctgaactattacagtaacctctaaatttgtttccactttaaactcatcttctaacgtactgtagtcaaattaatctctcggaattatggctctagttatatttgcctttcccaaatcccctttatgtttttattgcctaatcctccaagttttttttgttgttgttgagtatcttcatcggttaaaaacttttgaaacattcaccccaatatacgcctattttaaaataacgaataatgtactgtgctgttgcctgttgtagcactgtccttgggctagcagaattgtattttccttgttcatctcttttactgacagtgtggccttggattttcagcctctgtgcctcaaattaaaaccatctcccggtagcaagtgtgctgatttttcacaactatcccactgtagtcaaactactgtgccagctattccatttcctctatggaaatggaatcagatctaggtaaaaaagaccatagatttccattgttgatacccagtgttctagcaggtttttgttgttgttgttttaaatgtgtcttaatttgtctgtctttgattaattaccagagctctgaaatagaattgacaaaaatatttccagtttt

SEQ ID NO: 10775 - DNA, 1051 bp, Homo sapiens
cctcccagagtccagtgattacaggtttgagccactgcacctgaccagatttatctaatctgacttcaaattcttctgtcagttatatgaattgtaagtacagtattttcatcccagtctgtggtatttcttcttcttttttttgattatagattttgatggacaaaaattgtcccttttaatgtcaagcatattcatctatttctttatattctctactatttttaaattgaagaaattcttctccaccctttggtcatgttcagttcttgaatagtcttctaaaagcttttccgtgtttaggactttaatctacctgaaattgattttgctgttcagcatcatgaaggagatcctgttttcttttttcgaaatgaataaccggttgtctgaacactacttattgaatagtctgtttattactactttgtaacgtgtttaatttccatatgtgcattggtctattgcaaggtcccttagtctattgtatcgtgctttttatgtatgaataccagtctttattcttttggtactatgggtagatatctgatagagcaagagcctctctaccttgtttgccagaattgaattgcaatttgtattcagtgttttactattgtgagcaataatactataaacatcctgtgaatatgctttgctttatatactggtgcctttgtcttgataagtctcatcaaggttggaattgatggaacaaaatacatatttaaaaaaatgtatggccaggcacagtggctcatgctgtaatcccagcactttgggaggctgaggtgggaggatcacttgaggtcaggagtttgagaccaaagggcaacatggtgaaaccccatctctactaaaaatacaaaaattagctgggcatggtggcagccacctgtagtcccagctactcaggaggctgagacaggagaatcacttgaacctgggaggtagaggttgcagtgagccaaggtcgtgtcactgcacttcagcctgggcaacagagcaagactccgtctctaaataatcaatcagattactttttaaaaag

SEQ ID NO: 10776 - DNA, 1067 bp, Homo sapiens
ttgatgggtttggatggtatgttaagaaatggagatgctgcagagcccaacgtaattttttaaacagcaagttttccatctccctacgaatcctctgaagcttttacccaagccctttcttgcctctccagtgctattttccttcagatggaccttaaacataatttcttggacactactagagagacttcgaggcaataataaaagatcagtattaaccagctataacagaggtttgatcatgcttacttgtacagtttttcccccgttttaaaaaggaatgtaataaaatttgttttttccatagaattaaataatattaaaattgagtgaaaggttgattgttgatgaatagaatagtacctctcatctgtgcagtgtctcatttcacctcagagaaaaggatacataagaggagtttgtaatttatcttaggatattctaattgcatttaaaagaacttatcttgcgcagggtaaatgggggactcacatacatatattaatacctctgactcattaacagaaagaaatacttggtacttctttcgctgaatgaccatactgtggaggatgcatactatttggtatagagaaataaatgaggaagaaagaactgcttaattaaattatcattcatatgttcatatagagaccatctggttgccatgtgtattatgacacatacactttgaatagttacatatcacaagtatgtagttcatgtttgtgttggtggggtaaggcatcaggaaaaatgtagttagtcttttcttaacttataccaaattaaccaactatattataggaaatatgtgaaattagttcattagctttattcactattatgcattcacatgatattaaaacgtacactcacatgttagaatgaaaagagcagtagttatcttagattttaaaaacatggatatcttcttgaattccttcaagattgaggtagagaataagagcaaatcattctggaagtaccttaaggaaacaaacagcagcagatatttaggttaaacttattttcataattgtttaataacttttgtataatcttca

SEQ ID NO: 10777 - DNA, 1044 bp, Homo sapiens
attccatgctcatgggtaggaagaatcaatatcgtgaaaatggccatactgcccaaggtaatttatagattcaatgccatccccatcaagctagcaatgactttcttcacagaattggaaaaaactactttgaaattcatatggaaccaaaaaagagtccacattgccaagtcaatcctaagccaaaagaacaaagctggaggcatcacgctacctgaattcaaactgtactacaaggctacagtaaccaaaacagcatggtactggtaccaaaacagagatatagaccaatggaacagaacagagccctcagagataatgccgcatatctacaactatctgatctttgacaaacctgagaaaaacaagcaatggggaaaggattccctatttaataaatggtgctgggaaaactggctagccatacatagaaagctgaaactggatcacttccttacaccttatacaaaaattaattcaagatggattaaagacttcaatgttagacctaaaaccataaaaaccctaggagacaacctaggcaataccattcaggacataggcatgggcaaggacttcatgtctaaaacaccaaaagcaatggcaacaaaagccaaaattgacaaatgggatctaattaaactaaagagcttctgcacagcaaaagaaactatcatcagagtgaacaggcaacctacagaatgggagaaaattttcacaacctactcatctgacaaagggctaatatccagaatctacaatgaactcaaacaaatttacaagaaaaaaacaaccccatcaaaaagtgggcaaaggatatgaacagacacttctcaaaagaaggcatttatgcagccaaaaaacacatgaaaaaatgctcatcgtcactggccaccagagaaatgcaaatcaaaaccacaatgagataccatctcacaccagttagaatggcaatcattaaaaagtcaggaaacaacaggtgctggagaggatgtggagaaataggaacacttttacactgttggtgggactgtaaactagttc

SEQ ID NO: 10778 - DNA, 1044 bp, Homo sapiens
tactcacacctctttctggaagttgccattgggtggctctgtgggctcccaggctgttgctcagtgcagtcagccgttcttgggagttctgggggaagagcccagtgtcatggatttgagggcattccagctctgaggttgcaggcttctccttggcagtgggctggctaccgtagcaggtgaaagtgtggaacttctggttgagctcttttattttagttaaaaaaaaaagtctcaaatcaatgatctaagctttcacattgaggaatgagaggaagaggaggaaattacacttaaagtaagcaaaaggaagaatctaataaagaggcacaagacatcaatggaatagaaaatagaaaaacaacagagaaaatgaagccaaaatctagttttttaaagtgatcaataaaattgataaaatgttgacaaaatgactagaggaaaggcacacatttccaatatcaggaatcagggaggtaaaatcactatagattctaagccatgaaaagcatactaagggctgggcatggtggggctcatgcctgtaatctcaacactttgggaggccaagacaggtggattgcttgagcccaggagtttgagaccagactgggcaacatggtgaaaccccatctctacaaaaaataccaaagttagccaggtatggtggtgcatgcctgtggtctcagctactctggaggctgaggtgggaggattgcctaagcctgggaggttgaggctgcagtgagctgtgattgtgccattctccaccagtctgggctacagagggagaccttgtctcaaaaaacaaaacaaaacaaagcaaaacaaccacgataataagtggtcagtaaaatctggcctgtgtgcctaatctggcttgccatttcttttgtgagtaaagttttattggaacacacacacaactatttacattgtatctatggctgcttttgtactatagtggcagaagtgagtagttgtgggagaccacattgccagaaaagcctgaaatatttactgtgtggcttcttacagaaaacg

SEQ ID NO: 10779 - DNA, 1050 bp, Homo sapiens
agtcacaagtctgggcctctggaacatctgaccaataagcttcaagttgggatttccacaacttcccctttgagttcagttaatttgctggagcagctcacagaactcagggaaacccttatgtttatcagtttattataaagtatattacaaaagatacagatgaagagaactgtagggcagggtatggggaaaggggtgtggagcttccatgccctctctgggaaggctgctctccaggaatctccacaggttcagtcatctggaagcattctgacacagttctcttgggtttttatggaagcttcaggacatcagcattcttgctgctgaccccctccccttgtcaccccagtaaagggcaggaccctctctggggaaggttttaagacccacaatcagaaaggcaggggaaaattagagtcctgccttgaggcagatgaaaggagggcagaagaaggccagaggccttccccttggggcctgacacactcaacattataagaaaggactgtaacagggaccataggagttaggagccagaaactgtggatgaaaaccaatatatacatatgtataataccaccctggggttatggattttggggaacaaaccttactggttaggtgcttttatcattgcatcatattagggggtacatgatatcaacaagactcatcactggtggttcacgcagtgaaccctgttcatgtggttgaggtggtatttgccaagattctttaatgaatagttactatttccttttatccatagtgtactctttggaagtgagtctcttatccctgactaccctcaaagggaggagagttaaattccacatcctgaatggggagtatctacatatattatttggtattttctgtaagcaagatttgtcacttctcacctatttatttatttaaatcagtatggatttatatagtttttccccttgtgttataattcaacactgtcatttattttgttgttcatattgttccattgggagcttttccaggttggtttctgtgtcctgatatgctcccatc

SEQ ID NO: 10780 - DNA, 1055 bp, Homo sapiens
ttgttgtagcaactcctattctcattctgatatagtgactctcaggatttgagctgactaaagtcagtagcagaagtgagccatgaacttgaaacattgagggcaaaactgataaacaggagtcgtgagtcatagcacaagacactgccacagaaaattgtggtgtagcagctgctataaatttcacagtgtgatcatgagaggtgaggagggaaaggatgaagggcacagaatatctgggaaaatggcaatatttctgtttctctgaggaacccagaggaagggcaggatcattagagggattttgtccttcctctgcttcctgacatgcccccattccttagactattgttgagtaaaaccagcagagttacattcactgcatttccaaattgagtttattttctcctaaggctccttggggccaagtcagtgctggagagggcggaatgtccctgctagatgtcataagttttacttttaacattcctgtggaatcttacttgattctctggtttaattctttttcttgctccggcttttgtcagattctgtagaaccaaattgattttacgtgccctgctgcgtctgttgttctagtgttattattcttttgttctcagggcaagatttacatactattttgaggtatgtacaatgtttctagtatcatactggggtctgagccactaccaaaaaagcaagaagtaaaaataaaaaagagagctctatggatctattaaaactgaagtttttcaaactgacattccattggtggagagtgctgctagagaattttgttgctatatgtagaatctacaggcctatggaaaatatccctcttatgctgttaaacggtcatctttcagtgagatgcttacgtagagttcacctcctatcttagatcacttacggcaaagtgtacaataataacagaggctaccatggattgagcacttgctttttgccagatgttttatgtatagtattctttttttttttctttttgagatggagttttgctcttgttgcccaggctgaagtgcagtggcaca

SEQ ID NO: 10781 - DNA, 1050 bp, Homo sapiens
atcttctagagttttacagtacatagagttttatagaatcatatagtatgtacttttttttctggcttctttcactcagcataattattctgagattcatccatgttgttgtttgcatcaatattttactcttttttattgctaatattctactgtgtggatttaccgcaattaatttatccatttactctttgatggacgtttaagttgtttccagcttttggctattaaaaataaagctgttatgaacatttggatacgaatctttgaatggacatagtctttcttttttcttggctaaatgcctaggaagtggcatggctggatcatatggtagatgtatagttatgtattagttgaaaacaaggatgccttctgagaaatgcatcgttaggcaaattcatcatcgtggcaacatcatagaatgtacttacacaaacctagatggaagagcctactacatacctgggctatatgggacagcctattgctcttaggctgcaaacctgcacagcaagttactgtactaaatactgtggacaattgtaacacaatggcaagtatttatgtatttaaacacatccaagcatagaaaaaatacagtaaaatacagtataaaagataaaaaatggtacacctgcatatgacacttaccatgaatggagcttgcagattacagtataaaagataaaaaacggtacaccggtatatgacacttaccatgaatggaacttgcagactggaagttgccctgaatgaccaatcggtaagttaatgtaaaggcctagggcattactccacattactatagactttataaatattgtacgtttaagctacagtaaatgaaataatgaaataaccttagcttactgtaacttgtttactttataaacttttacatttacatttttaaaaacttttttactctttttttttttttttgagacacagttttgctttgtcacctagactggagtgcagtggcatgatctcagctcactgtgacctccgcctcctgggttcaagcgattctcacgcctcagcctc

SEQ ID NO: 10782 - DNA, 1035 bp, Homo sapiens
gaatagtgccacaataaacatatgtgtgcatgtgtctttatagcagcatgatttataatcctttgggtatatacccagtaatgggatggctgggtcaaatgtatttctagttctagatccctgaggaatcgccacattgacttccacagtggttgaactagtttatagtcccaccaacagtgtaaaagtgttcctatttctccacatcctctccagcacctgttgtttcctgggacatggatgaagctggaaaccatcattctcagcaaactattgcaaggacagaaaaacaaacaccgcatgttctcactcataggtgggaattgaacaatgagaacacttggacacaggaaggggaacatcacacaccggggcctgttgtggggtgaggggatgggggagggatagcattaggagatatagctaatgtaaatgacgagttaatgggtgcagcacaccaacatggcacatgtatacatatgtaataaacctgcacattgtgcacatgtaccctagaacttaaagtataaaaaaaaaagaaatagaaacaattatctgcaacttagctaatattgtaaaataaaaaataaatagaaacaatcaaaaagaaaccaaatagaaatcctggaaataaagaatacaatgactaaaattaaaaattcaaagtaagctcaacagcagacttgatcaagcagaagaatcagtgagctcaaagatagagtatttggaattatccaggcagaagagcagaaagacaaaagaatgaagaaagcctatggaaattatgggacatcatcatgaaatcaaacctttgcattaaagaaagtccagaagaagaagaaagagactataaagcacatttaaagcaataatgaaaaaaaagagtatagaatcagaaaaaaaaaaaagcagtaagggctgaaaacttccctaattaggggatagatgctagcatccaagtacaggaggcacagaggtctccagtgaaattcaaatgaaagaactgctcactaagacacaataattaaactatca

SEQ ID NO: 10783 - DNA, 1051 bp, Homo sapiens
gagatgtactcagtgatcaaagagcagagtttttctcatttgtgctatcccactaacgtgtgtgtgtgtgtgtgtgtgtgtgtgtgtgtatttttttttttcagagacagggtcttgctctgttgcccaggctggagtacagtggttagatcatagctcagtgcagccttgaactcctaggctcaactgatcctcccatctcagcctcccaaatagctaagactacaggtgcactccaccacgccccgctaatttttttcttaagctttttatggagacagggtcctaccatgttgctcaggctagcctcaaagtcctggcctcacgggatcttcctatctcggccccgcaaagtgttagggttacaggcatgaaccatcatacccggactttctgctttttaatgagaaaaaatatttgaatatacaaagataaaagcacatcctcaggttgttttcattctaatatgcctccatcatttctcaaaattatcaaaaagcactttgggagactgaggcaggtggatcatgaggtcaagagattgagaccatcctggccaacatggtgaaaccccgtctctacttaaactacaaaaattagctgggtgtggtggcgtgcgcctgtagtcccagctgcacgggagactgatgcacgagaatcgcttaaacccgggaggcagaggttgcagtgagccgagatcacgccactgcactccagcctggcaacagagcgagcctctgtctcgaaacaaacaaacaaaaaaacaaaaacaaaaagaaagaaagaaagcgttttatctttttaatcaggatacacttggtcctttaggtttctaaagaggactgatttccacacataatccattttattagatcctatgtttgctacagaggaattagtgtttggactaaaacaatttactacaaacaatagaattcaatggctgtcctaacatatttatactttggggcatgccgaagtatttttgtataatgaatctgtccccattgtgaatttgctatgtatatacatttcaaatttatagatacta

SEQ ID NO: 10784 - DNA, 1060 bp, Homo sapiens
tgaacttgatttagtcctgtggtacgaaggtagggtaggttgatggaggaagaagcatagagcatactcaccaatctctccaatgttattttagttggactgatgaaagagaaaagtggtagagagagttcttttattgttcgtgatattttctgagaattgcagtatagactagaatataaaacttaactattgacctcatgtgacttttgtgatgctctctctggcaaatagagataaaaatagtttgaaaatgttattgcattttctgtttgttgtacctcttttctttctttttttttctctccaactgaatcagtccgtttttgttgttttgtaacctcttccagagttaactacttccattgtaggtgatgaaatgtataaggcaccacttcaaatgttggcactgctataagcatgttctttcctgctaattcaactcagaattaaaacttttgattcttgttttgttttttgttgttgttattgttgttgttgttgttgtttttgtactccatactcagaaatagtttccactgtagaagttatctcatggcagttgtgttctttctagtagtggtctacaaccagactctagtttctccaagaacactacaagatagattgagtttaaatatgtactaaactaaatgacactctttcaaatgagtttgaatgcattttgtttttagacaacctctatgacattttttccttaaaaacaatgcctctgctccaaataaatcatggtcaaaataaatgaagatctcaagatgacatcagttctacttgtctaagtcctggtgttgtatggatgacaagcagaagccagttatgacaggtgatacatccaaagtaactgccaaatttgttaacatttttccatttctaaaccatggaaaatcatctatggagtcacaccatcctcatggtagtccagcagaggcagcatgccatatgggttcatgttttcaccaataaagaactggtagtttttattgcttcttgaccttttggctaagatcaaatgaagaactggtagtttctgagattagaa

SEQ ID NO: 10785 - DNA, 1102 bp, Homo sapiens
gaaccgggctgaggctaagaattgacagaagtagacttcagaaagtggataacaataaactttgctgagctgtaacccaatgaaaagaagctgagaatcatgataaaacaatacaggagctggtagccagaatagccagtttagagaggaacataactgacctgatggagctgaaaaccgcatctcaagaacttcacaatgcaatcacaagtatcagtagcaggatagaccaagaggaggaaagaatctcagagcctgaagattatctatctgaaataagacaggcagactagaatagagaagaaagaatgaaaagaaatgaacaaaacctctgagaaatatgggattatgtaaaaagaccaaacctatgactgattgggatccttgaaagagacagggagaatggaaccaagttggaaaacatacttcaggatatcatccaggagaacttccccaacctagcaagacaggccaacattcaaattcaggaaatgcagagaaggccagtaagatactccacaagaacatcaacccaaagacacaaaatcatcagattctccaatgccaaaatgaaagaaaccatgttaaggacacctagagagaaaggccaagtcacctacaaaaggaaacatatcatactaacagtggacctctctgccaaaaccatggaagccagaagaaattgggggccaatattcaacattctaaaagaaaataatttccaacccagaattttatacctggccaaactaagcttcaaaagcaaaggagaaataagattcttttcaaacaagtgaatggttaggaaatttatcaacacaaggcctgccttgcaagagctcctgaagaaagcactacgtttggaaaagaaagaccattaccagccactacaaaaacacactgaagtacacaggccagaacactatgaagcaatcacataaacaagtctgcaaaaaagcatcatgatgacaggatctaattcacccataaaaatactaaccttaaatgtaaatgggctaaatgctctagttaaaagacacagaatggcaagctgaataaagagccaagacccatcatcagtatgctatcttcaagagactca

SEQ ID NO: 10786 - DNA, 1066 bp, Homo sapiens
gaaaattaaataggcaaataatttaggtaataataatttggacagtatgaagaatagtgtgaaaagagaacaatatgaggaagctcaacttggacaatttgaaaagttttaaaaagttgaatttagacaaattgtgaataaaatttgttcttttatcatagaggtgtaagtgcttttgataattctttggtgaagagtaaatcggtaattaataactattaaaatatgtggttaaaattgttttatgatgaaacaattatgatttaattagctatatagagaaattttttccaattgttgactcagctactttcaataaaattttgtggcatcttcacaaagtaaatgattaaataactagtcctcattttactatatagagattttcatacagactcttcctgttatgaataaaattcaaattggaatattataaaagaaaaaatcaaataaatgttttaaaacctttgattatttctgtgaatgtgatacatagaccagtattagaagaaaattattcaacaaaaattgaagaacaatgtacacagtggggtccattctccatatctaactacctctacactagtattgggaaaaaactgatattcaaaactggcagcagtttttaatgtttaattaaaataattattaattattagagtactgattaataatgcataaattttaactttctcaaaattgtttcaattttcaaaactgaaaaataaaaattaaaaattaatatttaatttttccagcttagcaggaagagaaactacataaatagaaaatattaggcatggagcaaatcctaatggttattaagtttagcttaggggtgtggtggaaattggtaaaatgtttcccttagtttaggttaattacaaaaatgttcacgggttctcttttcagtggtttaacctctagattatttgacttagaatagaaaacgatcttggttccccaggcctcaatttattcttgaagtgaatccaatttcgtatataaagtactcatggcctggcacaagaaaaaaaaatctatcacctttcttccttcccatttc

SEQ ID NO: 10787 - DNA, 1025 bp, Homo sapiens
tctagcagcatgatttataatcctttgggtatatatccagtaatgggatcgctgagtcaaatggtatttctagttctagatccttgaggaatcgccacactgtcttcacaatggttgaactagtttacagtcccaccaacagtgtaaaagcgttcctatttctccacatcctctccagcacctgttgtttcctgactttttaacgatcgccattctaactggtgtgagatggtatctgctgtttggcactatgcttcttggacacaccaatgtatctcaggatttacttgtctgtaaaggattttatttctccttcacttttgaggcttagtttggctggatatgaaattctgggttgaaaattcttttctttaagaatgttgaatattggcccccactgtcttctggcttttagggtttctgctgagagatccactgttagtctgatgggcttccctttgtgggtaactcaacctttttctctggctgaccttagcatttttgccttcatttcaaccttggcgaatctgacaattttgtgtcttggtgttgctcttcttgaggagtatctttgtggtgttctctgtatttcctgtatttgaatgtcggcctgccttgctaggttgggtaagttctcctgtataatatcctgaagagtattttccaacttggttccattctccccatcaccttcaggtataccaatcaaacgtagatttggtctttttacatagtcccatatttcttggaggctttgttcatttctttttactcttttttctctaaacttctcttcttgcttcatttcattcatttgatcttcagtcactgataccctttcttccacttgatcgaatcggctactgaagcttgtgcatgcatcacgtagttctcatgccatggttttcagctccatcaggtcatttaagatcttctctaccctgtttagtctagttagtcatttatctaatcttttttcaaggtttttaactcccttgcgatgggctcaaacatcctcctttagc

SEQ ID NO: 10788 - DNA, 1604 bp, Homo sapiens
ttatgctggatatctcttgcgactggatgagcttcactaaagcacagtcatttggatctggattcgaatccctggttttccactttttagctgtgagtttgagcaattatttaatttctgtaagcatcagtatccagtagctgtatccttatagtgttgtacagattaaatgagataataaaagcaaaagaccactgtagagtgtttaacacataggaggtactcaaaaatttgttaggtacctttcctcccctttccttcatgtgttaaagctttttcagtacatacccctctctcaggattgaattgtaagtcatattttttaattacccttcttgtaataattcctctacctctgtagtcatgtttttcttttttcattttttcttgtccccagaatgtctaacaaaacagccaaatatacctctgtaaagacagagggtaaaataatgctagttctgtgagttctctcttcttgtgcaaatccataaactgccaccaatctgtagtcattttaattgcccctaaaccgaagagcatcatggcaactacctttcccctcgtagagtgacactatcactagtcttactgaggccaaagttataaagatgggctctcgatctactaatattagtaaaatgggtttgggacttactaacatttgtgcttagaagagacagacctggcaaagagcttggagaagtgagttccaaagagagaggtgtgggaaccaggatggaagagtcaggcctccagatagcgtttacttctcctttcttccttgaatcactgtctcagagataattaggttcagaagaggaggaaaaaaaagatgacgtcaacatggagcagagtttttcttagaccttagcctagcaaggaaagagaaatgcctggtctcagtgctgggaagctgtttcagccagagccccgtggctgtgaagagagctctcctgtctggagccaaacagaaagctcataggtcttgaggccagaaaagttagtaggtggcggctctggtcggtgctggaaatggaggccaggatgaactaagaagcaaactaaagatacttgtaatataaggacgtgtaggctgggtgcggtggctcacgcctgtaatcccagcacttcgggaggccaaggcgggcggatcacgaggtcaggagatcgagaccatcctggctaacacggtgaaaccccgtctctaccaaaaaaaaaaaaaaaaaaaaattagccggccgtggtggcgggcgcctgtagtcccagctactcgggaggctgaggcaggagaatggtgtgaacccgggaggcgagcttgcagtgagccgagatcgcgccactgcactccagcctgggtgacagagtgagactctgtctgggaaaaaaaaaaaaaaaaaaaaaagataaggacgtgtatgttaacttgcgctatccaaacaagctgtgcttatggtcctctgcctgtgcgtcatgattttccaggacttcacaacgggataaagtgaagtagcttcggcttgtgaatgtgcattgcagagacgtgggagaagaaagctgcaaaagtcattatgagcaacacccttgatcttaggggtgctggtctt

SEQ ID NO: 10789 - DNA, 1039 bp, Homo sapiens
cctagggtccatgagtgccagtggcagtgaggacagtcaccggcctggcctgtgtcctctcagctgtcctcacagcagctcaggcagggcaggaacatttgtgtctgcaccttatacacaaggaggctgcagccccacaaggagagactccttggctgaggccacaagcctcggcagtggagagctgggctagaactcagccggcctggctctacatctcaggctctgaggcagctgactgcactgggtaacctttgaggtgccaaccgtcaaggcgtccttagcctgagctttccttctcccataaagcctctgttggtccagactcaaggtttccacttgatgagccatgagctgctgggtgacttagccctgagcaggccacccaggccatttcgggcccacaggatccctggtgacagccccgtttccattcacactggaacctcaccaccatccctgagtgtctgctctgagtatggcactgtccagatgctgtggacgtagaagggaagaagacatggaggggacagttaatagacatgaaaacaaatagcacctatgtgaagtcagcatgtttgcctacaaggaaaacaaaatggtgatgtggatggggtggggggctgcacctgatgatgagtcccgtgtgtcctgtgacatcctggccaccacatctgtgggagggtaactgcaagaccagagaccctccgtggatattcctgaaggttcatccccggccttcacggtctgtctgcagggcgccttctgacgccacctccagccgccatccaccagacgccagcttccccgctgccctgaacttcctccagcgcaccaggccttcctctgtcctgtctgaggatttgctcatgcaacgtgctgtggccaaacaccctgccctcctcccttggcagatgtcttcctctcctttaaggcctggctcaggtgtcgtcttggtggcttcgggtgtcagctgctctgttttgctcacgcacctgcttgtgcttctgttgttgcctcctctccctggctgggctcg

SEQ ID NO: 10790 - DNA, 1038 bp, Homo sapiens
gagtagttggattttaggctggccattgctgtatcaggacccaatcaattggcctagacgggatctctcagccttacaagccctctccaggtggtaggtacagagtggagagaggctgagttttgatcacagtcggagagggctgacggaaggggtagaacggagcagctggtgacatgggtgatgacccgggagttcctgacgtccacccactgggctcttgtctcccccccacgtgtgtggtgatggtgggcatgcccttccccaacatcaggtctgcagagctgcaggagaagatggcctacttggatcaaaccctcgtgagtgaccccagtgtcacagagggtgacagagtaggcagtgggtgggagtggcatcacccccagggctgatacagccaggccttccccactgcgctggtgtctcctgccccctccggaagcttggatgcccctccacaccctcttgatcttccctgtgatgtcacctggacccctgctgctggcattggccacaaagcctcctggtctggctccaaagcctggcagggtcttttccccgggggagctgcaggcagggaacagtcctgatgggtcatccccttcactcccagcccagagcccccggccaggcacccccagggaaggctctggtggagaacctgtgcatgaaggccgtcaaccagtccataggtgagcctggctgcctccagctgggtggacagatgggggctggagaaggggagaacaggaaagaggggttgcctgccctgtttcctatataagtctgaggaaggggagggggtcgccatgggaatgtgctgtaggggaggcaggtgttgctcggagccccagcctctgttcctatgcaggcagggccatcaggcaccagaaggattttgccagcatagtgctcctggaccagcgatacgcccggccccctgtcctggccaagctgccggcctggatccgagccagtgtggaggtcaaagctacctttggccccgccattgctgctgtgcagaaggtcagtcctacc

SEQ ID NO: 10791 - DNA, 1616 bp, Homo sapiens
atatttattaagctccattatgtgcctgtcactgtgtgaaatgcttgaattacatcagcaaacaaaatacacacaaaagaattcctgccctttggaacttatattccagcagaaaaacacaagtaaaaataaataagggtggaggtataacaggttgcaataggttgacaaaactaagccttcttaggaaggtgacatttcagcaaccttttgaaagagatggaggaaccatgtgaaggaacctattccaggcagagaacaagtagaccaaagcctgaaggaggactcttcctggcttatttgaggaagagcaaggaggctgctgtaggtgaagcaaagtgaagatggagaagaagagtgataccatggggaatcaggaacggaggaaccttgagggtcagttaaagactttggctttgaccttcagtgcaatagggagactagatgagggaagttgtacgagaggaatgtcttgatgtgactttcattgtagaataatcatttaattgctatattgagactaggtaggggagggtggtcagactctggatattttgaaagctgagccaacagtattttatgtcaaattggataaaacgtctcagaggaatgtcaaaggtaagcctgtcttcttttgagccttggcaagaatgcatttgccgtccattgatatgagaaaggctatgggtataggaattccgcttacggaactatttcctgacaagttcctctcagaattgtcattttttattaaaaataaagtaagatctctacttgaaatgttttcaggcaaatcacctggccttaagagctggtatcttctacttaagcagattgagaatgcacgaaagtacagagaactgtatacataaaaaaatcatctcttgtatagaggtaataggtcctcagcattgctttgtcaagagaaagaagggctaatatgagggaggatatggaaaaatcatccgtatgaccctgtgaaagtacagtactatggaagtcgatgctatagaaattgatttccttgaaactgttagtgtcagtgtaaatttcagaaagtcaagggtgcagatacccagctggaaaccaccggactgacgattgttgtgcttaggataaggcactttgtgatgagttaggaaaacaacaatcagatatgtacacttcaaaattgacctcaggaaggtaagcagaaaaatagataaaatgggtgagaaaatttctttattatgtttcattgtgattgtctcacttttagcaagaaaggaaaagccagtggtagagtcatctaaatacgctgcttgcccaaaaagctgaattagatttaggagtaaatgtttttatttttctgaaggcataagaaattagacattgagtcaaacgttctgtgtctcattagaagccagccttgctcagtttgcaactatggaggaactggtaagagatatttttggatcatgttttctgttaaatacttagccccctgaggcaggtcggctacatagggttaaagctgaaatactaagaaggatcccattccaggggcatgagatgtgttttcatgtctaacatttgttgagggtgtgttctctgcctggaaccctgtgagacatttt

SEQ ID NO: 10792 - DNA, 1045 bp, Homo sapiens
ttcctggtagttgaaaccacaatgtttgttcttaatggtcctcaggcatctagagtatgccaggcccttccagtgctctcagatacatgagataaaatccagttcctcaggtagcagccagaaaagctggggtgctagttatttggtctgtctcctttgcttttcagagagaagctggaagccaggctttatcactgcactgagccaaagtggggagcagggggaagtgcccacatgcttattaaaaaccgctctgaaaatatttgaagtaacagggctataacaattattattttaaaagcaactgctgttttggtttgtgtagccccagaggtttagcagatgctgggccctgtcagctcaccaaaacagggaaattagaaaccagtctatctggtagtatctagagaagttgtgataccagataggtggtccaaacccttcactcctcagggatagactaagagatgggagttccttcccgatcatatggcattgtattagggttgggggttatgatcacagtgtgtgcaagttttttcctatcagttttgatgtggatagtttcacactcacctagggtacaggagtggctcagtcagtttctggatttccaatgatgggaatttgcctctgtgttgctgttgaattgatggtggggaaggagagtttagggccttctattctgccatctgtgactctgacagtttcttttaatgttaaactatcatacagtctagttactacatttgtagacatttctctcgcacaaatgacaacttatatttacacaaaagcctgtatataaaatgtgcataacagctttattcataatagtcaaaacttgtaaacaactgtatgtctcacaatgggtgaaaaattaagtaaattctgttataggcatacagtggattactactcagcaataaaaaggaatgggctattgatacatataacaacttccttgaatctcaaagtacttaggctaagtaagaaaagccaattactgaagatcgcattctgtgtgatttaatttacgtaacat

SEQ ID NO: 10793 - DNA, 1030 bp, Homo sapiens
tttcctaaggtgtaaacttagatcattaattttagatctttatttttttctaatagatgcattcaatactatcaatttctctttaaacaatgcttttactgcatcccacaaattttgttaagctgtattttcattttcatttagttgaagtattttaaaacttctattgtgatttcttccttgacccatatgttgtttagaaacgtattgtttaatctccacatgtttgtggagattagtgggattttaaaattttctttctgttattgactctagtttatttacattgtggtctgagagcagacgctgtatgatttctattttgttaaatttgttaggatatgttttggcccagaaggtggtctattatggtgattattccatgtaatcttgagagtgtgtattctgctgttgtttgacaaagtagtctatagatgtcaattatattcggttaattgatgatgttgctgagttcacctaagttctactgattttctgcctgctggatctgggcatttctttctttctttttttttttttttttttttattttgttgtttttgagacagagtctcgctctgtcacccagactggagtgcagtaatgcaatctcatctcatttcaaccactgcttcccgagttcaagcaatcctcccacctcagtctcctgagtagctgggaataccggcaaataccaccacacttggctcatttttgtctttttgtagagacagattttaccacattgctcaggttggtcttgaactcctgagatcaaataatccagccttttgggcctcccaaagtgctgagattacagtcatgagccaatataccctgctggatctgtgcatttccaatagagtgttgttgaaatctccaactatgataatgaattcatcgatttctccttgcagttctgttaatttttgcctcacgtagttaaatactctcttgttaggtgcgtgcacatttaggtttgttatgcggaaacataacatagtttcttggaaagctaattcttatacca

SEQ ID NO: 10794 - DNA, 1044 bp, Homo sapiens
cacttacattagtttggtgtcttttctttctctttctttctttctttctttctctttctttcgttcgttcgttcgttcgtttctttttgagacagaatctcactctattgcccaggctggagtgcagtggcgtgatcttggctcactacaacttttgtctcccaggttcaaatgattctcatgcctcagcctcccaaatagctgggattacaggtgcatgccatcacgcccagctaatttttgtattttttttaatagagagggggcttcatcatgttggccaagcctagtctcaaactcttggcctcaggtgatccgcctgcctcggcctcccaaagtactgggattacaggtgcttggcctggtggtgtcatttcttaaagttgacaaaaagcatatcctggggcctaaaaattctattctaggacaggtgccaagaatgtcatagtagcatacattccaaacttgataaaaccctggtgtcaaccgatagtataatagataaattggagaagagtcatacaaaggagtacaatacagaaacaaaagtaaccaaattatcaacaatttctctcagttttaaattatcttcttttgatatgtatgataatatagcacacctattctgtatgtattactaaacaatacaaaatcaaaaggaagaaaattatgagtagttaagaatatagcatagcagcaacatttctgggagaggatgggttatgttagattaatgaatatcatctctgtgttttctgaaagaatttcctgttgagatataaaggcccatctgatcactggattgggctgagcagagaacaaggccaaccatggaaatggataaatggtactgaatggacaagacagtaagttctaaaaatctggcagtaatatttgtatttgaatttactttgcattaaatctgaagtgttctctagttacatgctttaaaaaattctcattttaaggttagtcatgaaagaagatggtgccaacttgtatgttgcaaaggtttcacaagttcctcgaatgaatccaagacct

SEQ ID NO: 10795 - DNA, 1050 bp, Homo sapiens
gcttttttttttttttttttttttttttcagcgatggggtctcactatgttgcctgggctgatcttgaactcctgagctcaagcaatcctcccacctcggcctcccaaaatgttggaattacaggtgtgagccaccatgcctggcctctcaaaatattttaaggatcaaatatattattaactaaccagtttttggaaactgctcatcacttaaagaaatgtaaaatattatatgattaaggtctaacaagtttcaacaattagcaaattatatcatagatgatagtgattccaatgagcaaagaggaaaaatttataatccaaatgctgacctaaaatatctgtgccaagccatctaaactcagctaaatagcactgcagtttcagtactaaaaccaccagggaagtaggaggaataaaatcaagcatggtttttagaaatagctgctgagtcttcagttatttaaggaagcaaaatattgggaaactgtgtaaagaaaacgtgtcagacttctcccatcagccagctaaggctttggatgtacttgaaagaatattatgcttacagacatgaaataggtttgattcaggactttgcagtattcctatagttgatttataacatctcctgctaagcaaagcccactgactaattagtcaccactacacaaggaaaaacagcattatttttagaggctgaattaatgttagttttctcattttctcatcttcattctctctgctgttgaagaaatgttcagtggccaactgattctgcttcttctcttgcaggtttcctatcctgggagcaggagagtgtgcctatttgaatgacaaaggtgccagtagtgccaggcactacacagagaggaagtggatttgttccaaatcagatatacatgtctagatgttacagcaaagccccaactaatctttagaagcatattggaactgataactccattttaaaatgagcaaagaatttatttcttataccaacaggtatatgaaaatatgctcaatatcactaataactgggaaaatacaaat

SEQ ID NO: 10796 - DNA, 1075 bp, Homo sapiens
agtgagaaataaattcagtgttcaatttagaatttgatactgtgttttgtggaaaaataaaacattttcttcagatatatgcaattttacttggtaaggaaatgaaaataaaatttcaaatctaatacatacatacacacattcacaagtgtgtataagtgtgtgtgtgtgtgtgtgtgcatatgtttaggcattccatgtggagatttctatatctatatatgtgttttactctggcatctttaatcttttggagttatatgattaataatgatactttgttttctttcataagagatgggaaatagaaagctcaagaaagagtgaggatgtcacttcaatgtaaaattgacaaaaaaataaaaagattatggtctgatgctatccctatttaaaaagacgatgtaatgatctctgttctgtaactgaacaatcggccactgtagggagaaaactattcttaaagagtttttgttttgttgtttgtttgtttttagacagaatcttgctccgctgccaaggctggagtgcactggttcaatctcggctcactgcaaactctgcctcccaagttcaagtgattctcctgtgtcagtttcgtaagtagctgggattacaggcatgtgccaccacatccggctaatttttttatttttagtagagatggtgtttcactacgttgccaggctggttataaactcctgacctaaagcaatacacccacctcggcctcccaaagtgctgggattacaggtgtgagccactgcacccggccccagctgagattttttaataactgctcttactaggttcagtctacattagagtctcgttctttttttctttctttcctctctctcttttttttttttttgacagtgttttgctcttgtcagccaggctggagtgcagtggcgcaatctcggctcactgcaacctccacctcctgggttcaagcaattctgctgcccctcagcctcaggagtagctggggttacaggcacttgccaccacatctggctaatttttgtatttttagtaaagatgagctttcaccatgttggccaagctggac

SEQ ID NO: 10797 - DNA, 1075 bp, Homo sapiens
tcaccatctccatggctttcaacaccaagcatatggacttagccactgtaaaatagtggcatgcatcaatgaacaataaagagaaatggagatcattcatattattagtgagggaagttgggtacaacttttcatcagccaaaaagagggagaaaaaaatcacaccaccaaataatgaaatactgtaactaagatcattggcagagaattagagattatgttcagcagattaaaaaaaaaaagaaaacagctgtgatcatgccactgcactccagccagggctgcagagcaagaccctgtctcaaaaaaacaaaaagccaaaaatacgagatgcttaaaaaaagaactgttgttcaagagatcattttcactttttaattggtttttgaaaactgtgaaagtatctcaaactgaagtctaaaaggaaaataatagaagcttcaaagttcaggggccaggttatatctatataaaagggaagctaacttatttccagaactgattcatttattaaacatggggctaaggaatagaggtggcaatatacaagtcaggataatgcctttgtcttctgaagctgcatctacattggtgcccctcaaaatagctaaaattgaaaatagtttatctgtcacctgggatttcttctacaaataaccttcccaaaaaaatattgcctaacatttttctgaatttatcaagccaaccatctgatcagttttctaaatgaagatttattcttggcaataatctagctcagggcctaggtcttgtacacagcattaagcaatgtaacagatgagtgcactggaagtatggatttgcagatggcctccttgtttctgtattttaattaaggaagtctctagctcaaaggacatgagattaagggcagcagcaaaccatgtgaactatcagagattcaacagagacaatcacgccctctgaaatatgtattgatccatgcatattttcactaggatgttttctttgagtaaagctaaggacaacatggcttgcgcacccaaaatatcttctcatcttaagttctaggcctaaggcagggctcaggcat

SEQ ID NO: 10798 - DNA, 1005 bp, Homo sapiens
atcaccagctgggatagtggcggcccaagccaccatcatgtctcacctagattattgtagaagcttccctactggcctcctgctgctgagctagcccctacagagtggtcccattcatatgcaggtcatatcatgtcagcaccctgcccaaaaccctccaagtggttccttgtatcactcagagtgaaatccaaagctctcattgctgtttgcaagatccagcatgatctgtccaccaccctctacctcagcccccatctgacctcctcaccaagcactctccccttcacccacccctcccctgccccactgcactccatgctgtttcccaagcattcagggcccctccagcctcagggccttggagggatcttccctctgactgaaatccatatagtcccaatctcagtgactctccaaacccaaggtctggagagctggattcagaaacaagatagcagtatacaaaactaagaaggctgtcatagcagattgtttttggctgagtctgcagagagaccagctggtgtgaagctctgtgaggactgcagagaacaaaaatcaataggtaatcgcttcttgtagcaattcagaataacaagttgtgggtcaggagtgccacctactgacaatatttttaagttgcagaaaaggattttaggaaaattaaactttccaaggatgaatctataaagctaaataagtgacaagataaactacctcaagtattaagaagccataagacaatttctcgtttaaaactataattggagccaggtacggtggctcatgcctgtaatcccagcactttgggaggccgaagcaggaggagcacttgaggccaggagttcaagaccagcctggccaacatggagaaaccccatctctacaaaaaatacaaaaattagctgggtgtgctgacacatgcctgtaatcccagctactcaggaggctgagtcacaaaaatctcttgaatccaggaggcataggttgcattgagctgag

SEQ ID NO: 10799 - DNA, 1036 bp, Homo sapiens
agcaagaccttttgcatattactttcttttttatcttccacagaaaccccaatgcttgactaagaggctgatatttgcagctgagtatattgaattctttcctcctacctggggaacaggcgccctctgtgtcctaaatgccacattcccattgtgctttgtgtcagatctaatagaccaatccctgcacaatcaggcaagccagagtcagtgaactggatttctactctgtgcctccagatcttgatgtctgctggcactttgctttgttcactcctttgggaaaagaataaaagggtagggcaggatgttgaataccatggaaagcagtgggtggtgcctggaagtgagaacagcttctttactacctatttctctgaaccttagcttcttcccttacgataaataaatgcatttagtacttaacagcttactagtggcttttatgggcagttttcttaaaatggagcataaaattcttaggtcacaaaattacatattaagaaacatagattatgtaaaaatgattgtaaacttttaaactatgtacaaatattagttatattaacagtcattaacacccaggtccaagaccaggaattaagtaataattatttctatcttctgtgagatcattggagcagaagtggttacaaattgataccttgcatttaaagattaagaacctatcagataaaacaaaacaccctattggactccttactttcccatcatcaaaagccagaagactagtacagacagactgctaatcactatttgggctcataagtaaaacataaagagtaacatgaaataatcctgtgttttttttttactctattaaaatgacagcaaattcttaggcaaactctacagtttccattcgttgaaattagaagaacctgcttggaagtaatgcaaaacttgggtttctaagtgaagaagcacatatgagccaaaaagctaaggggacatttagaacttggtaagaaatctctgtggctctagtgagagaccttcatggccttactacaag

SEQ ID NO: 10800 - DNA, 1043 bp, Homo sapiens
tccttacacttggaaagagggagggaaagaataactttacaatgaaaaagactttcaaacactgtctcctctgggtgatgaaggacaacatagaaagggacaagttatgttgatagtatatactcctgatgtgacatgatgaaaatggcacattaactttgcctctgaggtctttctaatcaaaaatcccataactccagtctaatcaagagaaaattatcagacacatcttcacaaagagacatgctgcaaaatacctgaccagtattctttaaaccatcaaggtcatcaaaagcaaggaaagtctgagaaactgtcacagccaagaggaacctaaggagacccaacatctaaataaaataaataaatccccatccaggatggggtcctgggacagaaaaatacatgaggcacgactaaaggaacctgaataagatatgaactttaattaataataatgtgacaattggttcattaattgtaacaaatataccatggtattgtaggataggagaaactgagtgcaagacacatgggaactccatgtgctagctccacaatttttctataaatttaaaattgttctaaaaataaagcttgtttaagaaaataaaaacagggggatggcagctagatgctaggctacagattatcaatgcataagattttaatccctaaatcattagtccctgcatcgttaggacttaacctgcatcagtttccagggcgaaggaaactcgatgaaaggaaacttcttacattcatatgccttgtcacactgtgagtcacactcaccaaatggtctctccaatttactgattatattaatactcctaaattactcatctataccttcacccacttaaaataattgggttttttattaaatacagtatgtatgttattttcttgggctgaaacaactcaattaaattaccactaactcaaaaggaaatcagaaatataaaaagtttcattctcggaatactgtctctgggagaaaaaggcgggttttctgtttttgctttattttagtttgtttt

SEQ ID NO: 10801 - DNA, 1126 bp, Homo sapiens
ttgaaattatatcaaatactctgtcagaccagagtggaataaaactggaaatcaactccaaagggaaccttcaaaaccacgcaattatgtggaaattaaataacctgctccagaatgatcattgggtcaacaatgaaatcaagatgtaagttaaaaattcttcaaaatgaatgacagtagtgacacaacctatcgaaacctctgggatacagcaaaggtgttgctaagaggaaagttcatagccctgaatgcctacatcaaaaagtctggaaaactttctaagtctttctaaacaatctaaggtcacaccacaaggaactagagaaacaagaacaaaccaaatccaaacccagcagaagaaaggaaataaccaagatcagagcagaactatatcaaattgaaaccaaaaaaaaaaagataaaagaaacaaaaagctggttctttgaaaagataaataaaattgatagaccattcacaagattaaccaagacaagaagagagaaaatccaaataacctcactaagaaacaaaacaagagatattacaactgacaccacagaaatacaaaagatcatttagggctactataacatctttatgcacataaactaggaaacttagaggagatgaataaattcctggaaacatacaaccctcctagcttaaatcaggaagaattagataccctgaacagaccaataacaagaagcaagattgaaatggtagtttcaaaattaccaacaacaaaaaaagtccaggaccagacagattcacagcagaattctaccagacattcaaagaagaattggtaccaattctattgatattattctacaagataaagaaagaggtaattttccctaaattattctctgaagccagtatcatcctaatactaggaaaggacataaccaaaaatgaaaacataggtgctaaaatccttaacaaaatactagctaactaaatccaacaacatatcaaaaagataacccaccatgatcaagtggtttcataccagggatgcagggatggtttaacttacacaagtcaatatgtaatacaccacacaaacagaattaaaaacaaaatcgaaagatcatcttgatagatacagaaaaggcatttg

SEQ ID NO: 10802 - DNA, 1416 bp, Homo sapiens
ttctagtgctctttatagttcctgtagtgatagagtttctgatatttattctgttatggtacattgacaacttctattccttcccattattttaacatgttgggaaaagtgcctgagttaaatgatacttttacaatggacgtaaaaacatcagtattaaaaaagaaacctgcacattgaggttgctgacttcaggtagaaaaagaaaattcggatttcatctagctctttgtctaacttgaaatgttataaaatgatgagaatctgcctaggcgaatctctacaatggcacagagcctgttcatgagcatctctggaaaagattgacaaccctcatgttcctcaagggactgaggaacatttcttcagagtctgattatgttcagttccaatggtctagtcactgtactttggttagttaatgctaaggttgattttatttccaacattaatcaataatgttgattttattttctaacgtactggctcacacttctactgtaactcatattgaactagcaatgaactgaaacagattttgcttaaactattactagtgtaatttttaaatctaatacaaaatttcaaacatggttgattatagttttgaactgagaggtttcaaatcctgattttgatatctaccaaatttaatagaactttcagctttatgtcctcaaattgataaattcattctctattttcaaaatcagttatgtgtctaatttaattttggcaagtcttaatgaaattatcataaaccttagtgattattttttttgctaaggtaccaaatcatttatttaataaataactctaaaatattatatgaatcacagcaacttatttatttaaacatttatgctttatgctttcacttatcacctagtatatatcaagaattgtacatgctgctaacagacaaaattgatgtgtcttctgtgttcaatgactcagtctattggtggaaaaaatgacccacattcacagtgtgatgtattctatagtagatacttgtatgtagtgtcattaaatagttatcaaaaatttatctatgttaattttaggctttttataaatctgaagtgtcaactgtgtgtatttcttcctcttacaaaagatttcatattacagaaaatgtaacatatttgtatttgatctcctgaatttgataattatgttagacttatataacagaatattcttgttcttaggaaatactgagatgttaaaagctaaagacatgatatatgcagctcacactcaaattgattagaaagatagtgtatgtatgagagagataggaaaagagagaaagagaaatttaaaaagcaaatgtgccaaattattaaaaatttgagtgaagtataaaaattgagagttctttgactattattgcaacttttctgcaagttt

SEQ ID NO: 10803 - DNA, 1020 bp, Homo sapiens
gcagatgactaacaaccaggcccaccccagccccactaatgcttgatagaattgtatgctacctcaggaagaaggcaggatggacgtaggagtgggagggctctgaaattactgggtttaccttgagttgactagactttaacataatacagcaagaaaaattgactaagatcagataaagaaaagtaaagaaagtgatatttttccacacacttggactcatggtctttggatttcatatccactgaataatcaaacaaataatggcaacaggtaaggtagaggtggacagggggctgaggaaccacagaacagtgagatctaggaggtattgcagggcaggcagaagagtggacacagactggaaggacagattttaaacaataaaattaatggaaagattttcatattggatgaacggaatatacaaagtattgaagttgagacaaagcacagaacccttgaagaatagaaagatttttttaatgtgggtggaacatggagtgagatgacggagtggtgagagatagattcaagtattaaaccagagttttgaattctaaagcctttacaaccaacttccagtttccaggaaatacaggggatggagtgtgaagttaactgacacacacacaaataaacaccaagcaaatctagaatgtgtgatagttctgaggacatgtcatccacttaatcagtaagttcattgcatgggaagaaaggagggtgaatgtcctttgccgaatataaaacataacaactaagtgtagggaaggttccaggtttgggggagactaaagttgatgtaatttcaattgttctgtttaagaaaaataatacaaaattaggaacagaaatttgctaaggcccttgcagggtcatggaaagggcctttgcaaatgaaagaatccaaaagttaagcttcaattgctgtgtagaaaattcaaaactgatcaaatgcaacatgtcaaccttgtgtggatcctaatttaaataatttgcattcattctacaaaagtg

SEQ ID NO: 10804 - DNA, 1047 bp, Homo sapiens
cacaattaaaagagctagagaagcaagagcaaataaattcaaaagctagcagaagacaagaaataactaagatcagagcagaactgaaggagatagagacacgaaaaactcttcaaaaaatcaatgaatccaggagctggttttttgaaaagattaacaaaataaatagagcactagccagactaataaagaagaaaagagagaagaatcaaatagacacaaaaaaagataaaggggatattaccactgtcccactgaaatacaaactatcatcagagaataccataaacacctctacacaaataaactagaaaatctagaagaaatggataaattcctggacacattcaccctcccaggactaagccaggaagaagtcaaatccctgaatagaccaatagcaagttctgaaattgaaggagtaattaataacatacaaacaaacaaaaaaaaaagcccaggaccagatggattcacagccgaattataccagaggtacaaagagctgctggtaccattccttctgaaactattccaaacaatagaaaaagaagtactccttcctaactcattttatgaggccagcatcatcctaataccaaaacctagaagagacacaacaaaaaaagaaaattttaggccaatatccctgatgaacatcagtgcaaaaatcctcaataaaatactggcaaactgaatccagcagcacatcaaaaagcttatccaccatgatcaagtcaacttcatccctgggatgcaaggctggtgcaacaaacagaaatcaataaacaacccatcacataaacagaacaaatgacaaaaaccaaatgattatctcaatagatgcagaaaaggcctttgatgaaattcaacacctcttcattctaaaaatactcaataaactaagtattgatggaacacatctcaaaatattaagaattacttatgaaaaacgcatagcaaatatcatacagaatgggcaaaactggtagcattctctttgaaaactggcacaagacaagaataccctttctctccactcctctt

SEQ ID NO: 10805 - DNA, 1048 bp, Homo sapiens
aggaaacaaattagggttgtaatgtgcaagcctaatgattttccatcagaactctcatataattgccctgtttgataagataaatgagcaggagcaaggttgtggtgaaggactctgctgaagctttcccagggattcctatactaaagctttggctttctcaaagtattctcagaataagcagttattgtcattctccagaaagtcaaccagcaaaatgacttgagctttccaataaactcttgccatgacctttgtgctctcctcatccacttttgttttgactggacttttccacttcttggtagccattgcattgattgtatttgttttcaggattttactggtaaagccatgcgttatctcctcttataattccttgaagaaatgcttacagtcttcattgctcctatttaaattttttagggaaacttctgctcttgtctgtacttcatcttggtgacacagtttgggcatccatcaagtgaaaagtttactaaactttaatcattcagttagaatcatgtaaactgaaccaactgagaagtctgcaatgttggctattgtgtgaactgctaatcatcacacatcttctcctgggtataaagaagatgaatttattccttgcaatatgatgtgaatcatctgtcactgtagactttaggttcaacattgcctcattccttcctgaaatgaggaactcctcattgaatttgtgaactgctgacttcttcaaccaatgtcaacttaccatgtgccaagtaggacaactttttggacaccatcaatgatttcatcttcttccacccaagcttcaccataaatttgatgtttttactcactttacttttagaagaattcatgttgctcttctaggagctcttttgaaactgctctcttatttttcttgatgcctcaaactagctcgtgttcagacatgttatagcaaaacattatgatttcattttggtgccaaaaaacttggaatccattcatggtatttcttaatagaatatacattttccattaacattttaacaacccactg

SEQ ID NO: 10806 - DNA, 1047 bp, Homo sapiens
aaacagaggttaccaaagaactgaaggagacagtgtcacttaggatgaggtcaaagcaaggagcaggactgcaacaggagcttaggcacttgtccatgagtcaaggacctcagtaatccacttgccatttaaaacaaatgtaaatttaccatgtgccaagcaggactcttgatttctactcctaaaacctgctctcccctgaatttcttcatcatagccgtcaaaacaaaatatcacagactaggtattcttaagcaatagaaattactttccaacacttctggatgctcaagttccatgaggaaggtgtcagcaggtttagttcttctgggctgtgtctgcttggcatctaggtatctgccttcttgctgtgtccttccatggatgtgtatgtacttcctgtgtctctctctacaaatttccagttcttataaggaatttccacttcttataaggacagcaatcttattggatttagttccactgaaactccatcatttcagcttgataacctcttcctagggctgttttctaaacacaatcatattctaagggacaagaagttggttgtggatttttgtatacctatgcctatcatattttgctaaatatttgattatatagagattatttctttggaactttgagctgtgtgaagacaacacaaacctggccattcatggctgacagaaggttggccctcagcctggtcagacccacacagattgtctaatattctttgatctggctctagtcagaaaagtcttggtgttgtagaatacaggtgtcttcacgcattgtattattaatattcatggggaggttaaaacaaagttggccccgaaaactaccaaggggttctagaatgaacagaatgaatacacagttcttaaaggggacatcctattttgtctttaaatttttttccttgctctacccctttgttagaatgtttgatcagattcagtttgggatttacatcttttaggaaattttgttttttaatatagattctcgctctgtcacccaggctggagtgtggtgtca

SEQ ID NO: 10807 - DNA, 1073 bp, Homo sapiens
gtccttattgtggaatgagggcacaacaggtctcctgatcctaggcatgaaaactctgcagccccatctgtgttttcattctcctctcttccccataattaccactgtcacctcctaagtcccaagcagtcaccgcatcttttcccccttctgttttaccttcacttgaactctcagctgagctcagggccagcagggccactgacagcagaatcagcagcatctcgctggaggctctggagtcactcccaactctgtgctgggaggaacgtggcaactccctttataaagaggagcaaaacaatggcacctttgagccctgggtgggcctcaccacctcagagactgggttctgctttccttactgcaggtcaggtgtatcccttatttctctttgggactctagcccagagggatggggtgggttggatgttgtttgtgccttatttctaaaaggtacgactatgacttgaataaaggttctaaaggaactgtgtccaagctatcagcactgtgtcataattgaacttcagacatcattagagtttcaatccttttggtaagactatgtctgctttccactctactatttatttctgtgtaatatttgtgggggcagtgaagctacagccagcagtgaagatggtcaatttctctggctctttatagagcctatttccatctcttgtgatgtgtgtgtacagatagtatcacaattggctaaagttttgatgcgatagagatggtttctgttacctgtgtgatggtgtgaagacaacacactcctgggcacacatagatgacagaaagctgccccacagcctgctcgggctacaactattgttcaagcttctgtggatctgactcagctcaggcaaggcttgttgttgtgccacacaggaaggccaaaattgtgtattttaaagtacctttaggggttattaatgcaaaatgtacacagaaaccataaggaaatttctagatctgagaaaactgaatacataattccttgcgggagccatgcgatatcatgttgccaaaacttccttcatgctcttccctttgtccagaat

SEQ ID NO: 10808 - DNA, 1050 bp, Homo sapiens
agctattcaggaggctgaggtgggaggatggcttgagcacaggagtttgaggctacggtgagccatgattgggccactgcactccagtttgggtaacagagcaagactatgtctttttattaaaaaaaaaaagaaaagaaaaaaacaacaaacagttaagggcagcagacagtcaagtgaggtatccaagtaagctaaagaagaatgtattcacgagcccattttctctttatctctctttgatttaagagtctttgattgtaggtgtgtggtcttatttctgggctctctattctgttctagtggtttatttgtctgtttttgtatcagtaccgtgctgttttggttactgtagccctgtagcatagtttgaagttgggtagtgtgatgcctccagctttgttctttttgcttaggattgccttggctattcaggcccttctttggttccacatgaattgtaaaagtttttttctagttctgtgaagaatgtcaatggtagtttaaaaggaagagcatcaaatctataaattgctctggacagtataactactttaacaatatttattcttcctatccacgagcatggaatgtttttccatttgtgtcctctctgatttcctttagcagtgttttgtagttctccttgtagagatctttcacttccctggttagctgtattcctaagtgttttattatttttgtggcaattgtgaatgggattgcattcctgatttggctcttggtttgactgttgttgatgtataagaatgctagtgatttttgcgcattgattttgtatcctgagactttgctgaagttgttcacagcttaagaagcttttgggctgagactatggaattttctagatataggatcatgttatctgcagacaggaatagtttgatttcctcccttcctatttggatatgctttatttctttctcttgcctgattgccctggccaggacttccaatattacattgaataggtgtaatgacagagggcatccttgtcttgtgctggttttcaagaggaacacttctagt

SEQ ID NO: 10809 - DNA, 1050 bp, Homo sapiens
tgactcccaaagcactgggattacaggcgtgagccaccttgcccagccatgttcattatcttgattgtgtcagttgcctctttggtgtaaaataggtcgaaatttactatgttgtacactttaaaaatctattaataggttaaataacatgaaataattgttttttaattcctaatatttgcctagggaatacaaccaacctcttcatcacatgaagacatttttttcatgcttttccatgttcctgaaatgccctcccctaggagcttcctccaatttatctactctttcacattcaagaaggtaatggagttccatcttcctccattaactcccccatactgaaatctgctatatctttcattcatttgaatcttattgttacagtacatacgatggaaatctataatatttttattgctatagttatcatttcagttgttatgttttctgcttatttttgtatcagagttgaatcaagatgtttaagtctctggagagttaagtattttgtaggaggaagaatatcaaggttgtggaaaaaaaaaaaaaaaaaccttgttgtggctgagaaactgggctggagtcaggaggctggtgatggccccagttctaccactaactagccatgtgcctacgatgcttcatttcacctcttgagatctaaatttccccgtacgtcaaagcaaaggtgaggtcaatgtcatctatgaaatgttcttgactttcaaattatttgagtagtggccgctagatggaacccgtgaacccatatccatacatgagcatttcaaggagaggtggtgctgaagcaggaagccaaaaagccagggtgacagattatcctgtgcttcgtgcaacaaggatagtctgtaggaacaacaacaagagaagttgtctctctcagacaatggtgtcctagcctagacatgtgggctaggaaattagtgatcagaggaaatcagaccaaagccaaagtcagagacattttctgttctcctcttcactaaaccccaaggctctttagcatgaagtatgcagaccctgtgt

SEQ ID NO: 10810 - DNA, 1074 bp, Homo sapiens
tggcagatccctgatctgtgattcagaaagagtcattcagacaggcattgcccagagtctgggttctctctctcctgaagttgttgaggctgtgcagaatgtatgtgtttagtgtttcatccagtctgttagggtaatcagtgtgatttctctggcatctccaggactggaagcagaccagatttaatcaaagctgttgaagctgcccagggactggctaagctgccaccctgttagtgaggccgctggggagagggaaactgaagcctgcaccacggggagccgtatactggagtctggaatccatttgctccacgcaggaggcctgcatctcaagtcaggaggcactgcctggaaatctagcatcatgttgatactctttggtgaaggaaatgtggtccttgccccaagttatctcacagtccctttgggcaatctcatgcatattaaaaataccgacaaacatagacccacgaaagatcctgatcttttaggtctgtcatgtgatagagacagtaagtgctctgtatagacatcaggagattttcttccctgaaggacaagctcttgtagcattttcctgcactgagatgcagtcatgctagcctgtctttcactcaccagggatggcaaggaaggaccagctgacaagtaataaagcaaaccagtttgtaattttacagggctctgaataaagatgcatttatctctggccaacaccaagaggcctcgatgtctctcacagggaggaacttgatgggctgtggcgtcttttgggggtgctagggcagagtcaggcttgaatctgagaaaggcaagtctgtgcattaaaatccagcacgggggtgggtctggggcaagggacaagagagaagcgggaatggaaggcagggatgaggactggtaacagaccctctgcctccttccttcctcttccctcacactggctctttcagccacttccctcactgagataggaagcggtcctgtggtgacgccaagggcacaggcttctgctgtctgggctccggcacagtcattggctctgagtcatccgggaaggaaaggcatctt

SEQ ID NO: 10811 - DNA, 1042 bp, Homo sapiens
ctctagggtggcctgcccacacatttccttgggatgccattgggtaaatatctccaggtcttttgtctttggctgcttagattcccaagagatggttgactcttctagtagccatcctggagggtagattctagctgccaacctcctaggagcacagtgggagaagaaggggtagggggcacagtgagcacagtggtcaacatatgcatgttcttttaatctttcatataatttccgttaattccacctagtcattttggtaccagaggataaacttttttttttttttttttttgagacagagtatctgttgcccatgctggagggcagtaacataatcttggctcactgcaaccttcacctcctggattcaagcgattctcctgcctcagcctccctagtagctgggatcacaggcgcgcgccaccacacccggctaatttttgtatttttagtagagacgggctttcaccatgttggccagcatgtgggtctggaacccctgacctcaagtgatctgcccaccttggcctcccaaagtgctgggattgcagctgtgagccattgcgcccggccagagcttaagcttctaatctgccatggtaggggaggagccgtgactcgactgtccagattttcacatgtaactagtgacaccagtccccaatcctttcacggattctgccatgtgaatttggttatatcacatctttccttactatgagtttagaattccgctttcttgggtttgctaagtaaattaccaccggttcttctgctttcaagtttctggtttgtttttctttctttttctcccctccctccacccccttatctcttctggtgtctttgtccttgtagatttgtgccttcttaaaaatctcttcactgttactttagaggatttgggggaacgagaacagagctaaaattaacttcctcctctgatgaatgttgacagtcttcctgccatagggatgttgtccaaaatacgtgttcatgtgtatgtcaaactagagcttctcaggaggaaagctctttg

SEQ ID NO: 10812 - DNA, 1072 bp, Homo sapiens
cctgcggagaggacttgattaaacaaggtataatgtacttctctttcccatccacagatggatctgtctgtagaaactctgttcagcttcatgcaggagcgccagaaaagatacgccaagtatgccgagcagatccagaaagtgaacgagatgtccgccatcctccgccgcatacagatgggcatcgaccagactgtgcccctgctggacaggctcaacagcatgctgcccgagggcgagcggctggagcccttcagcatgaagcccgaccgcgagctcaggctgtagctgctgcccggcctgcctggggctgggagccccagacaccgacaccctgaggacgtgtggagctaaggtcatatcatctgaccaggtctggaggctggcgggaggctccctgaaagtgggtgcgaaggagtccggctggcatgaaaatctgactttgcccagctcttttccttgatgcagtttcccggtgtggaaggaacctaaccagttctcggtgataactgaagctggaacgtgtgaattattaggaattctttgaagaactctgcattgagaattatttttatttagtttttttttttttttaattgagagtatatagtccagtccaggtaccggaataaaaatatggagacaaggggaaaatattttacgaagctctgtgttctcaacgccctcatgaacttttcagtaggctgtctggtttatgtgtggtcaacttgaaaaactaattgaatctaggtctctgtattgttcctgtttctaccctgactgtttccgtcacaccaagcccttatctggggcgcgtcttcctgcccaggtggaacactggcattttgttgactgtcaggttaggtgtcccttagtcgtcatcagaagctgaagccttcctttccacaccctcatcagattcatctccactgataaccggtttccttgatgcagacatagtttagctttctttgactgcagagatgtctcattccacagacatttcttgaacccatttgatgtgtccaatattgtgccagggatacaaatatggccgtatagcctcaggcct

SEQ ID NO: 10813 - DNA, 1047 bp, Homo sapiens
tgtgagggctgccagtgcgctgtcacctctcactaatttccccttagtttattttttgtttaaaatggagtttcgctcttgttgcccaggctggagtgcaatggcgaaatcttggctcactgtaacctccacctcctaggttcaagcaattctcgtgcctcagcctcccaagtagctgggatgacaggcacccacacctggctaatttttgtatttttagtagagaagggatttcaccaggtaggcccggttggtctcaaactcctgacctcaggtaatccacctgccttggcctcccaaagtgctgggattacaagcgtgagccaccgcccccagcctcccctcttagtttaattcctggtctaattgtagttgtcacatccaaaccagtcctccaacaatagcctgctgaggctggtcatgaaggggctccgagcactgtcagcaactggcctgaacttcaggctctcccaagatctgcatcttctcattggaagcctctcactgaaacaactgttcctcctgttaccctctatctctggaggctgatttattctaattccctttattcctctatctcacttccacctctttttctgcagggtcctggccaagatagctcttctagtctagctcacccggcccaatctttcttataaattttcttaaatgtaacttcaactcaaccaacttcaaggtcacctgtgattctttctgtagtcaatattccatctgtttgcactgaagctttattccttcaatgcctaatttttatgaaactgatgagactaagtttctagtctcataagtcatcaaatctagtgtcatgagcagagaggttgttgagatgtatgtggcaaggacaaaggacagctcttcaacaattgcccttcctgtttttcctgtaggaatcgtaacatcatttacatgttatatcgaaatgggccatgtgtgtgtagctggccttttttttcctaccatgtacttgtgtgttctggaatcagtcagctagaaaatatttaccaagtgtcttaggctttttcactg

SEQ ID NO: 10814 - DNA, 1027 bp, Homo sapiens
gagcctcactgcgactcttcaggagataggaagaaagtggggagacagagcagtatgctcattctaagattgggtctctagcagaagcctgcacaatgaaaaagtataccatattcttggatgggaacacccaacatgacaaagatggcagtcctccctaattcatctgcacctctttacactaaattctgataataggttctgatcatcctgtttcgttcctttgttgtagcagtctgtccactcaggaccataatataattactgtaaatttggaatatgtttgaattgctggtgggccgagtcctccacatctcgatgggtccctttactcctttttttcccccagaatgttcctgttttcttttgcttgccattttccccatgtggatttaaaatgaatttgtctagttttaaatataattctgtcggcattaaaaaaaaaaataaagtgggattcttatctcacacatcaggataaattcctgaagaattaaagaggatgaagtagaaagaaatgaaaccatagacatgcaaggagaaacctcaaaggatttttaaaaaaatctcagagttggggaaagactttctgagtacgacaataaacatagaattcataagatgtaatttttttttctttttggtagagacaggatctctctacgttgcctaggctggtcttgaacgcctggcctcaagtgatactcctgccttggtctccaaaagtgttgagattacagttgtgagccactgtgctcagctgggaggagctcttgcggccaggattttaagaccagcttggacaacgtagcaagacctgtttctaaaaaataaaaataaatagttaagctattctggaggctgaggcaaggggattgctctatcccaggagttcagggccgcagctcaggctacagtgagctatgattttactactgcactccagcctggcagctctaaaaaaataaaataataataataataatataaaaataatttaaaaagcaatggtttaaatggtaatttg

SEQ ID NO: 10815 - DNA, 1034 bp, Homo sapiens
actttgagaggctgaggagggaacatcgcttgaggccagcagtttgagaccagcctgggaaacatagtgagacctttgtctctcaaaaaaaaaaaaaaaaaaaaattagccaagcatggtggcacacacctgtggtcctagctactcgggaggctgaggtgggaggatcgtttgagcccaggagttcaaggctgcagtgagccatgatcagccactgcactccagtctgggcgacagagtgaggccctctctcaaaaaaacaaaaaatgaagttattgttattaaaacagtgtgatataagtgcaagaatagataattagacatttggaacagaatagggagctcagaaacagactcactcatatatgaaaactttatttgtataaaatcaacactccatacctgtaggaaaaagatacattagtctatcagtagtgctgggacaattcgttatatataatgagatccctagctcacttcatataacaaaaacaaatttcacagaaggattcaaaatgaacagcaatttttagcaaaaaaaaaggataatatttttatggtcttgcgtagggcaaaaggaagccctatacccaaaccgtaaaggaaaagattgataatttcagttatattaagatgaaaaaatgtctgcttattaaaaggcatcataaaaagtgagaagttacaatctgaaagaagatattggtaacaaatataacccacaataattagtatccagattatatgaagaactccaaactgcaacatcagctgggcgtggtggctcacccttgtaatcccagcactttccaaggccaaggcaggtggattgcttaagctcaggagttcaggaccagcctggacaacatggagaaacttcatctctaccaaaaatacaaaaaattagctggacgtggtggcacatgcctgtgtctcagctactccagaggctgagatgggaggatcacttgaggccaagaggtggaggttgcagtgagccgaaattgcgccactgcgctctaaccagggcaaaagag

SEQ ID NO: 10816 - DNA, 1090 bp, Homo sapiens
gcatatatgaattgccagagtcactattcttgtactttggggccattaggaagtaaaatagggtgacttgaatacaagcactgtgatatcgtcacagccaatctgataaccaagaaggttactaagtgactaatgggcagggagcgcctacagtgtggttcagctggacaaaaggaggactcacatcctgtgcgggagggagcaggatggcacgagatttcatcacgctactcaaatggcatgcaatttaaaacttatgaattgtttatttctggaattgtccatttaatattttcagactgtggttgaccgaatgtaactgaaacaacgaaaagggaaaccatagagaaaggggagctgctatagttgttttttttaaaccattatgaacacatggatttaaatatctttgaagggtttcattctatcgtaattattatccttaatgaagctcaagttgtcccatcttggccaaaattgcctcttgtgtccccttggcagaactgtagttgtctttgttagcttccttgctatcttgtatgacaagatgctataaagtatatcactgacttttggtaggatgtgatattgacttaggaatagacaaatatgttgatggaaataaggaatgggataattcataaggttatgcaatagatatctgtttttgttgttgttgttgttgctgctgccggcatttatcgcacttcctacaaggacagtttcacaaaatttatttgagatattactcttcattcatttagccttattgaagtgtgttgaagggactgaccccgtctgcagctcgggctgccttgacgtcagtatatccagttaccctgttgggagtgactagtttataaatgggcatggccagagccaacgggagatgagaagacattcactgggacttctaggaaagacattaggataattggccttccatttggaggaagatgctaaatttctacttcttaccattggcaaatattaatagaagtgaaattaaaaccctagaagagtctatgattattagaagaggcagaaaggcaaaaagccatattgatagattgataatttgattacatga

SEQ ID NO: 10817 - DNA, 1032 bp, Homo sapiens
ttgcatcactgtactccagcctaggtgacagaccgtgtctgttaaataaataaatgaaaagtaggagaaaagattataaaaatcagaggagaaatcaatgaaattaaaaataggaaatcaaaatctggttctttgaaatgattaataaaatcaatgaacctcttcccgacttaatacttcctataaagctacaataatcaagacagtgtggtattggtgaaagactagaaaaacagaccgatagaatagaatggagagccccaaagtgaacccacataaatatagacaattgacctttgacaaaggagcaaaagcaagacaatggcgcaaagatagtctttcaacaaatggtgctggaaacctgacatccacatgcagaaaaaaatgagtctagacacagatcttacactcttcacaaaaatcaacctaaaatgggtcacagacctaagagtaaaacataaaactataaaattcctagaagataacaggaaaaaaatctagatgaccctggacttggtgattacttttcagatacaacatcaaaggcacaatccatgaaagaaagaattggtaaactggactttattaaaattaaaaaatgttactctgcaaaagacactgtgaattgaatgaaaaggcaagccacagactggaagaaaatatttgcaaaagacatatttgataaaggactgttatccaaaatatacaaagaactcttaaaactcaacaataagaagaaaaagaacctggacgggtgtggtggctcatacctgtaatcctagcactttgggaggccgaagagggtgaatcactttgggtcaggagtttgagaccagcctggccaacatggtgaaaccccgtctctaccaaaaactacaaaaattatctgggtatggtggtgtgtgcttgtaatcccagctactcgggaggctgaggcaggagaatggcttgaacccagaaggcagaggttgcagtgagctaagatcacactgctgcactctggcctgggtgacacagcgagactctaactcc

SEQ ID NO: 10818 - DNA, 1024 bp, Homo sapiens
agtgctgggattacaggagccagccagtgtgcctagctcctacccctttaatgttgggttggccacaacttgattggccaatagaatgccagtggatgtgatggctaccctgtctgagcagccttaggaatgattagtcaattttgcttccaaaacatattctgtactttatccactccattgcatcctaccaacattagccaaatctgagataatctctgtcaactacttcaataaccttctaactgtctcctggctttagttgtgtacctctgagaaccatccttcacacaactgtcacacaacaatgtcaaattaaccttgtaaggccacagatgaaagccttcaatggctccctctttcccacatggcactggaaagctgtcatgacttgtcttctacctaccccttaagcctcatcctttggccttccctgcttcccactttatgttcagcaacactaaacaccctggacactcctccattcctttgtccattctgttcctttgtccagactgccctcctctctctcctaatttttgtccaaataacttctgtttgactctcaagattcagctcaatatcagtgctcccagaaagtcttccctagtacttcctgggcatgtatttgccctgtgctttcttggtaccagcacacaccccggcacttccccaccttaaatttaaatgatatattctgtctttttctcttccaatagatttgccgtctcctggagggcagggactatatcttatttagcttttggtccccagactctagcctgatgtctggcacacagtaggtgttcaatacacattagtggagctgaaatcgaacaaattaaacattaatataagcaaattctgaaagccttctgcctctattcttacaaaagctggtggcattataaatgggttcttctggaaagcaatatagcactatataacaaaaacgatgaagatggtcattctccttgacttggtattttcccgtttgtgaatactcctcaaagaaataatccaa

SEQ ID NO: 10819 - DNA, 1090 bp, Homo sapiens
acctttatttctcagataggtagatgctgttgcaattcattgttacctaccctgccactgggaacattaaaataagtagatgagtgagacattttatccctggattgtcatttgtctgtaatctttaaaaaaatcagtccattggctgggcgtggtggctcacgcctgtaatcctagcattttgggaggccgaggcgggtggatcacgaggtcaggagatcgagaccatcccagctaacacggtgaaaccccgtctctactaaaaatacaaaaaattagcagggcgtggtgacgggcacctgtagtcccagctactcgggaggctgaggcaggggaatggcatgaacccaggaggcggagcttgcagtgagccgagatctcgccactgcaccccagcctgggtgacagagcaagactctgtctaaaaaaaaaaaaaatcagtcccattgtctggtttgacttgtatttcacatctgtgcatatgcttttgaatggaaaacactgatgttaatgaaaagaaggctaaagaatagaattcactaggatacactgtatgttagtcctttttcacactgctgatacagacacacccgagactgggaagaaaaagaggtttaattggacttacagttctgtgtgtggctgtggaggccccagaatcatggcaggaggcgaaaggcacttattacgtggtggcggcaagagaaaatgagagacatgcaaaagcagaaacccctgataaaaccatcagatctcatgagatttattcactaccatgagaacagtattggggaaaccacctccatgattcaaattatctcccactgggtccttcccacaacatgtggaaattatgggagtacgactcaagatgagattgggtggggacacagccaaaccatatcacactgttgtctgatctggcatggcagatcctggtttaactgattaatgtttaagaggtggatcttacaggtctgttctacttgatcagtgacattgaacgccactgatcactcttctttcttgaagctgccttcctccttaatttcaagacagcattttcttctgtctttctagctgttctttc

SEQ ID NO: 10820 - DNA, 1084 bp, Homo sapiens
cgagcagctctgaagaatcctgtgaaatgtgccgtttcctctaaataccagacagttgaaaaattacagcaatattatatttttattccctctaaattcaaggtaaaatgtttactttgatcattcctgcctctccctcttcttttcaccaaagcatctgaaaatgtgtcaactcttgattaggtaagagctgtaatgcagattggcatcctgtctgtttgctttagagtgcatatcgtgcttatattatcaccgataagccagacatgccaggaattcacaacacattaaatcacaatactgaggtcatgatgtaatcatataattccttcccatccccatccttgaggtaatttttcctttgtctgcttattatgtggcttttatttaggatgaagcccctggttttgtgctttgatataaggacttctcctgtttgctgagtacagatctcctgcctgccttaaggctaagtggggaatatgtggttcacagagatgataatgctggttaaggaatgcaaagctggcagctggaggtctggataattgaaaagcgactataggcttagtctttaccttatgtatatgccaggtctccaatcctgtctcccaggttcaatgacatatattgttttgggtttgtaacttaggatacctacctggtttatattctaaatgaattggctggaaactcctttatgatattctgcagcacctgtaataatacccagagaacagctttgctactgcgaaatcttggcttcactgccatccccctccatggacaaatgagtcaggtaaggattcatcatcatcatcagccatgcactggtggcgtgagcgagataaacctcctaacagtaggtttgtacaataaggccatagggcaccgatgcctgtttccataattgttgtaattttatgggctttgaagtgttgctctagatacttactttctcctttcagggtagcgagaggctcccattagaatatttcatatgtacctgtctggtttgcaagctgttgagttgatttattcagccctagtggtaataatgactctggcctctaaaaacattaat

SEQ ID NO: 10821 - DNA, 1034 bp, Homo sapiens
gcatggagaaaagaagaaacgctcgcgagaggatgctggagataatgatgacacagagggtgctattggtgtcaggaacaaggtggctggaggaaaaatgaagaagcggaaaggccgttaatcacttttatgaaggctcgagttctgctgttctgtaaaagagaattggagaatgaaacctgctccaacagagatcatgagactgaaattggtcagaattgtgtccagaatgtgctcagctaattcagtattcttccccattctgggttggagtttactgcagagtaattcttacagtgctgatgtcaagactgttactgttcttcgactttgattccttgctcatgacatgagtagggtgtgctcttctgtcacttcacacagaccttttgccttttttagctgcaagtcaaggactaggttgatgatgcccatgacctgtaattgtaaagaagcttggacatctgcaaatgatatttaaaccatcttggcttgtgctttattcaaactaatgtgaaacaataaatttaaatattatttttaaaagattctaactccttaaagaccttggtgttaaagggccttatagatttaagtaagatcttgttaataggtaagaacctgacagtgttgattacatggcaaattcattggttgtcctaattaagataaatatttattacttaaaaaaatcaacaaggaaacgagatgatggatggctttgaaagggaagccccagccgggtgtggtggctcacgcctgtaatcccagcactttgggaggccaagatgggcagatcaggaggtcaggagattgagaccatccttggtaacaccgtgaaaccctgtctctactaaaaatacacacacaaaaaaaacattagcctggcgtggtggcgggcgcctgtagtcccagctactcgggaggctgaggcaggggaatggtgtgaacccgggaggcagagcttgcagtgaacctagatcgcgccattgcacactccagcctgggcaacagcgagactctgtctcaaaaaa

SEQ ID NO: 10822 - DNA, 1047 bp, Homo sapiens
gcccgatctcgtctgatctcggaagctaagcagggtcgggcctggttagtacttggatgggagaaaatgttcacttgcgtttttccttgtctccttcttgccctttcttcttccctccacccaaaatactatttttagtttttgcattaggtacaagttgtttttatatagctctttttggctcccctgtaattggggtcctgagactgctgtcctgtttgggctactgtgttatgttcctgtagttaacatccccactgttttctttgtttgtttttttgtttgtttgtttgtttttttgagacggagttttgctcttcttgcccaggctggagtgcaattgtgtgatctcggctcaccgcaacctccgcctcctgggttcaagcaattctcctgcctcaacctcccgagtagctgggattacaggcatgcaccacaatgcccagctaattttgtatttttagtagagacagggtttctccatgttggtcaggctggtctggaactcccgacctcaggtgatcgcctgccttggcctcccaaagtgctgggattacaggcatgagccactgcgtctggccccaacatccccactgttttcatgtgtgaggaagtcaggttggagtggtggctgagagcatgagacaggctcgggttcaaatccagtctttacctaattagttacttaatctctttaagctttagtttcctcatctgtaacaataacattattatggaacattcactctatgccacacattctactacatatttacctcctagggttatctgaaatagtaaaggagatggatgtacttaggaggtctagtaacctctgacatatgttaattagtcagtaagtgttagctgttgtcatcagcagtgtgctcatttatgaatgtgatacctgaaggaaggcttgatgtaatagtgagctattgacagatctcagcagtcttgttatgaaagagcagtttcgctaagctcaagaaggaaagatgtttggctcacatgcataaaatgaggttaattagtagcagaaggcca

SEQ ID NO: 10823 - DNA, 1052 bp, Homo sapiens
tgttaagtcgtgaagaatgtggagcccaaagagggctaggtgatttctttctgggtttcacattcttctgtgtctcttctcttggcaactttgtgaacttcagttttaatcggaccttatttccgcccacagataagctgcatagccatagttatagctaaatagaatgtctttattaaaatctgatcccgatgcaagctgatttgttattttatttttaaatcagagggccagctttcaattaacattttctttccttctggtttcaggtctggttggtttccaatacggtagatgcatcagtaggtctttggaaaaactgtaccaacattagctgcagtgacagcctgtcatatgccagtgaaggtatatataaagatattgacccagtgctgacaataggtgtggtcagggaatgttcagcccctggagtgacctcatgcccttgttctcctcgtcctgtgtctacagatgccctcaagacagtgcaggccttcatgattctctctatcatcttctgtgtcattgccctcctggtcttcgtgttccagctcttcaccatggagaagggaaaccggttcttcctctcaggggccaccacactggtgtgctgtgagtatctcatgggtagactccagtttacacttttaagtccatcttaccatgggtgtttctggcaacttgaacagattagcacatggttcagtgaaacttccttgtgcaattttctcctctggttatttgttctcttgtggagaaccttggattgctgcttaggttaagaaccctcatctgcttcattgttcaaaaccagtgctcctgggtagctaccaagtggcagtgcatatctgttagtagcacgtgtgtacaagacacttcaagaaggcagaaaggtaggagttctcagaaagatgaaaccactgccacaatgcacatcattattgtgattctcacttaattgttgttctttcccaatatactcggtttggtggaaggacatgctcttttgcatccctgagtagctttcctagacccacaagggccagacagga

SEQ ID NO: 10824 - DNA, 1014 bp, Homo sapiens
gactctagtgtttaaaaatatgtgtatttcaaaacattttatataatgtcgaaaaactgtccatgttgaaattattgagcagtttatgctggtcttgagtgggatcttagggaaattttaataacccagtctttttgccttctattgctaactgtaatatttgccgctaccctctacaagattattacctgtacatgaggaaatactaatgccctatggttactcaggatattattgctaattctttccctgctgtgttgcatttttgcaactgtaagcataaattaccccttaatgagatgattgcttttgggattggtgatagttctcaaattttctgttccaagttccagttagctattatgctgggtaattgagggcataataaatctgggagctgaataattgaagttttatgatgttattttgtcacttttaaaaattctccccttttgtttaccctttttcatgaacaatttcatctgcataagcctctaagagaaatgttagggtggtggcactggccaagggtccaaacctgaatttgaatactgtttttgctacctttttctgacattgacgagcttattccattttctttctttcctttcattctttcttttttttttttttttgagacggagtttcactcttatggcacaggctggagtgcgatgatgcttcctcggctcactgcaccctctgcctcctgggttcaagccattctcctgtctcagcctgcctcctgggttcaagccattctcctgtctcagcctcccgagtagctgggattacaggcatgtgccaccatgcctggctaatttttatatttttagtagaggtgaagtttcttcctgttggttaggctggtctcgaactcctgacctcaggtgatctgcccgccttggcctcccaaattgctgggattacaggcgtgagccactgtgccctgctaattttttttttttcaagacggagtctcactctgtcgctgaggctggagtgtagtggtga

SEQ ID NO: 10825 - DNA, 1025 bp, Homo sapiens
ctgtagaattccacagtgaaaataacttttcccatgaattttgaggatattgttttttttttagctttcagtattgctgatgacaagtctgatgccagtttaattctttctcttctgtagttaaatgatattctaagttattaatatttccctataatgattttctgaaatcttattgcagtatgcctaggtgtcaaaaaattttattttgcttattttaatttagtttgttttgggattcaatagacctttattattggaaaacttgtatattttttcagctttgctgattttttttaattttcttattttttccctcctttttttcttgtttctttttttttagaaacttgacttaattgaaagttgttgcttctgggtatatttcttatgtgtttgtttgttcttgtgagtgtaatatcttctcatacacttagaggattttttaatatactattttaaaatgtcttctgtttattctcctactaattagctagtgttttttgtgggatttggcacctgaccttttgtttgaattcttgaatgtattcatttttgtatttgagatttcctgttttactttggctggatgctgatggttcaggtgattgtgagtggtggggaagtggtacttgctacacatgggatatgctgataatttgtctttgggatggtagcctccatgtctctccggggacatagtgtctatataagttactaccctagctgcattcacaaatgtgactgctgccctggtttagcactagcatggaagagagaatgtctgatgaacttaactgttcaaataccaattacatgagtgaattttcatgtgatgattcacactggcgtatcaggtctaaattgaaagtctgtatttgtatcgccttgtctctgtgtaagtgaggtacttttaactagtttgacatttatccttttagtctttaaaatatcacttgcatgcctgtatacatgtttagatttttgtgtgttttaaaatataatggcataaaacaggaaacatt

SEQ ID NO: 10826 - DNA, 1079 bp, Homo sapiens
aggcctcctccacgtgcttttttttcttaaacataagatttttgaagagaaaaatctgttttagagtgaactagattttttttgcattaaacactgacatagtttccttgcagattttatttcagattaaaataaaaatctgtggttgatattttcctccccttgttcattggatctttaaggtaaataaaataaacataaactgatgctaatgaggataattacattagactagaatttgagacttccttctatttttgctgtaggttagtattgatagaattggcatgatttagtcaatttactgttaatttgttgtcactgtttattgtgttcagttaaaattctttatcatctcaatccatttatatttagctgttacttatgtacttggcttctctttgtggagcttcttagttctattcactagtgtgcaagttgcagatttttcttttcagagttgaggaagaccaaagatgaagtagattttggaaggaggtgtataggaggaagatcatttttcaaatgagtactgttgtccaagttagatgtgtaagtctggatttcagatcagagacttgacttgtattagaaaaatatagtaggtagcatgtagctattaggtgacaagatgaaatcacctcagagtaagtatacatggagaaaagatccaagaattgtgcttttggcatttcagtgtttagggttggggagataaggaagaaccaacaaaggagctgagaaagagcagcccctgaggtaggaagaaaatggagagattttggtgtttcagagattttggtgtttcagaagccaagtaaaaacactgttttgaggagggaataaggtaaccgtttactatatcaaatgctgctgtgtgtgctcataagatggaagagaagtatttaacaatctggagatcattggtgacttttaccaaggggcagttttggtgaatggtggagtggaaaacctgatttgggtttcagagagaatgggaggggaagaattggagataatacaatgggactttccccgctaggttttgcttttaaagagagcacaaaaattcacatagg

SEQ ID NO: 10827 - DNA, 1028 bp, Homo sapiens
tgtccttaggtttatggaaagatcattggactagaagtcaggaaagctgggttcagtaactttcctgtcatgctgctatccatatatgaccatgggtaagttaagattgtaagagaaattgtagaatagagtggatttacaagtaggcatatagatacagacacatacagagggataggcatggtcacataagagcatttgcgtttaaaaagtgtgaagatattagtgttttaatttttttagatattgaagaagccagatacaaatttgcttatgatctcatgaatattaacagcacgtgaaacagattttctaagtgaagtcttctagtctatattctttataaatgtacttttaatgacattaattttatttttatttgaaattcattaggatatgttaagaataactattactgtgctagttttgtaaggctgatgattaagaattttttcctatacttacggaggaaaaagaataaataattaaagctgtgcatagttaaaaatctgacatgagaatgaatactatattttgtcagaggattcatgtgcactgtgacatttagttacaggaatgaatatgagatgatttcatctaccttcttcatgacacaattgtgaggcagttcttagtatgaagatttcaaggaaattctgtgttcacagtgtgcattgcttgaccattagggagttcttatttagtatattgaaagtcatttgaagtttaaagctaaaagctatataccttctaagatctccaaaacagtttacaaaatagttggttgagaaggctattatgatagaaataatattttgctaaggatggataatatgcattaagagctataagaaaaacacctgagtgtgatcattgtggttttccttctcagatgaattttctagacgaaaacgttctaaatcagaagacatggacaatgtacagtctaaacgtcgtcgatatatggaagaagaatatgaggcagaatttcaagtaaagattacagccaaaggagacattaaccagaa

SEQ ID NO: 10828 - DNA, 1026 bp, Homo sapiens
aaagaataattttattcattgtttctcatcacacccacgggtgcaactatgaaattgtgtttttaaaacctaagtttttggctgggcatagtggctcacgcctgtgagctcagcactttaggaggctgaggaaggtgaatctcttgagtctagcagttagagaccagcctggccaatatggtgaaaccctgtctctactaaaaatacaaaaaaattagccgagtgtggtagtgcatgcctgtagtcccagctactttggaggttgaggcatgagaattgcttgaacctgggaggtggaggttgcagtgagctgagatcgggctactgcattccagcctgggcaacagagtgagactctgtctccaaaataaatccatccatccatccatccatccatccatccatccatccatccatcctaaaacagttttcgacacctatcatctcacacataaggtgcaatccagatttcttaacatttaaatttgtacttaaatgttgcttgtagtctcagaatttgaatctttctaacaccaagccaatcatcttctctgcaaatgttcctgttactgacaatttctgaattcttggaaaactcttgaaggaaaatcttcccgttgttcctcttattggcagctcttgaattcttggaaaccgatccctctcaatcatttcatatacacagtgagttgccaagttacaacttgattatttcctagaaaaaataaatctcaattcttttcacttttcattaggccatcattacccaattccttgattatagtaacaccttttatatgagcactctggtactagtttttaagttctttctggtccttccaaagcattgtactaatttttctaaaatactgattacttcagtctctttatagtccaagttcctcaattgtgtaccggtaaaaccagtattcatttttaaaatttttaaattttaatctcttaattttcaatccactttttctaatatccaccagttgcttcactgtcctacagggtactattaat

SEQ ID NO: 10829 - DNA, 1047 bp, Homo sapiens
tccgcctcctgggttcaagcgattctccagcctcagcctcctgagtggctggggttacaggtgcccaccatcacgctcggctaatttttgtatgtttagtagatacaagctttcaccattttggctaggctgctcttgaactcctgacctcaggtgatctgcccgcctcggcctcccaaagtgctgggattacaggcacgagccaccaggcctggccagagtgtcttaatgatagttattttgaattcattggcagataattcatagctctctgttactttagggttggtttttggagatttattttatttatttgattggaccatgtttctctgtttatttgtatgcttgttgaaattttagcatttgaaaaaacagccacatctcccagtctttgtggactcttgtacacaggaagggcttcaccagtcagccttgttagagagtctgtgggcctctaacacctttttttggctatgtgtcttctctgggcttttgcttgtactcttccatctgaagaggtttgcctctctactctgaagctccctctggtacctgtctttgctatagcagcctctggtactttggcaagctgttgtattagtgcttcccctgctgtctgtctgtgttactgcaatttctctggtgctctatcaagttgagggtcctgcctttggtctctgaggctcacaggcatccgaagtgccatagtcacagttcttgctccagattagtcctccatgttgggtaagacaaaatctaatgcgttgggcatctttcttaaacagttggattcaagctccaactttctctttcctttctgatgtagaagctgtgttgggaggttgatggggtatagtgagtaaatgcaatgtattttcctaactgttccagtgtgcctctttttggccttgtgctcacctgggatggcataccctctcaactaatttgtggaaatctcatgcaggcaatatgatgcttatcttgttaagtcatctccatatgggaagcagaggggacttcctgttctgacatgttgctgatcat

SEQ ID NO: 10830 - DNA, 1058 bp, Homo sapiens
tatttgtgtaggtattgccttattggaaattctggaaacctgatactgcaacctgcaatgtaggatgtttgtatggcatttaaaggtaatggtgatgtttattattctatactttgcattctgtgagagtaattttcactctgtcttaagtgtgagtaagcctcttctaaaaatcttgttcttgccaagaaatttataaatcacatacgaagacgtctgttgctaacagttaactttatgaggtaactatatccttctatttctctggactcatttttaaaaaatatgccgaatactgcatactgtttaaggtagtatataagtttatgagagaagtggagagctttcttccttgaaaagtcggtatttgttgagataccatttgcctcacagagaggtgttccccactcccatccccattgccagataataaatattttgagaaaagtgacctaaaacagctgaaatcttaggtgcatctgtctgcagacctccttaagcaggctgtatcttacaattcccttactgcactgggtaagtgttaacttagtttttgttgtttgctcttttgctttaaatattctccaaattaccatttatgcaacatggttagggttaatactgcatggtattcatttatcttgtttcatgaactttccagtactgtacaaggtcaacaaagtaatgcctgtggtatcctcatctctcacttttttactctgtgattttagcacagtaaggtactgcaaagaccttccttccaaatgttctccttgactttatttcttgggccaattcagtatcctcaacatcctaagattttgttgttttatcactgacctgtggttggcctgttttattctaatttccagaaaagtcaagtcccagtatttgcaatatcaaataactctaaaaccgatgtgtgattctaccttccttactatttttactgggcaaatgccctatttttttaattattattatttttaacttttgggacacacaaaaatcagcaattctcatgaagcgtttgttagtgtggcagacttgtctaattc

SEQ ID NO: 10831 - DNA, 1098 bp, Homo sapiens
gtctatatcttcccaccttcctctccaacagtcaagtttctagacccaaggctcttgtttctccaaaactgcttgcagaaatagctatgccttctttgccatttattttaggtcaccacttattagtgacatctgatattagattcttgtgagatgaagattggagactggcttaagtatctgtcaggaagcttctctattttcagattatattgcatacaaaaaccttgcaagccaaatctgtttcagaattaaaataacatgagcaacctcaagaaaaattattccatgtgtgcacacgtatcaagaaaaacactgcttccatcatgccaccccacttcattgcttgcagggatcattgaaattcatttactcagtgatcagaatctcctgaaccctgcctccagacctcatttccaaacatacaccctaacctccaaaacaaatttggtctttagccttgtccaataaaaatagttattgttaaaagtccaaactctttaacatgctattttttaaaagcccggggttggggaggggggtgggtaagggatctccttactccacagaacttctaatttcccagacaatcagttgttcaagaacacaatgccattcctcatgctttctttgcctataagctgttctcacccacttggtgaaatctacttcccccttcataggtcaacccctcagtgaagtcctccttgatgtcttcagcagcatttaatggtttttcctctatgtccccttagtactttcttcatatctctacttgtctctcccactagactgtaaattcacttttgtcaggaccatgccatctgagtaccccagtgtctaaaacataacctggtactatatatttctgctgaataaatgaattaaaaaacaaatgagtgcaagttatttaaatcagaggaatcatgatagaaacattaatattttaatatgtaacagaccacaagaatgttaaaagagtggtcttcaaactcaaaagtgtatcttcccaatgacaccagccttagaagaacagtttctgtgttactattgtcatgctggaattcaaagggtttttcttggttcttatagagacta

SEQ ID NO: 10832 - DNA, 1034 bp, Homo sapiens
gttgcacccaggtcacatttatctggagctatctatttactaatacaggttgagtatccctaacctgaaaatctgaaatttgaaacgctctgaaatctgagactttgagtgccgacttgatgcttaaaggaaatgctcattggagcattttgaatttcctattttcaggttaggaattctcagttggtaagtgtctaatgcaaatattccaaaatccgaaaaagtttgaaatccaacttttttctggtcccaagtattttcaattaagggatgctcaccttgtgtatacagacagcaaaattcagaagaaaattaaattgctgataccttataagcaggtgtttttaacctgggtctgtgggcagaatggttaaagggagggaccatgaagcctctgaaattctatacaaaatcttgtgtgctgacacctgatgtatatttctttggaaagatgtgtagctattactagattcacaaaaacagagtgtaagaaccactatttatagcaatgctgaaattgactagattagaacttgtcttaataatgtagttttgccaaattgggaagtgtatgtaggtattaaagttgattttacttacaagctatcatgcataatttgacattgtatatagaaacccagaattttttttaatcatctgtaatttgtgacttggaatgaatgttgtttttctgtaattgtgattgttctttcgttggctaatctgcagatgtaattagaatttataaacttttttcttacatgagtaaacatcatatttttatctttattttgcagactttgggatcatgctactatgacagaagtgaaatctctaaattttaatatgtctgttagtagtatggaatatattcctgagggagagattttggttataacttatggacgatctattgcttttcatagtgcagtaaggtatgtccaagaaatactttcattttcttttttaggtaacaaaagacattttggctacttaaaaatgggaaggtatttactttttttaaaagtaaagag

SEQ ID NO: 10833 - DNA, 1023 bp, Homo sapiens
ccatttgatttttttttttttttttttgctaacagctttttttacatcagtgtttatgtttgagtaaatgagtatttaattgttccttgggtttcagaatttaagaacagttcaaatgtaactcgttatttataccatattcaagatttgtaaatactacttaaattttttttcagtttggacccaattaaatcctttgaagctcctgcaaccatcaattctgcatctcttcatcctgagaaagaatttcttgttgcaggcggtgaagattttaaactttataagtatgattataatagtggagaagaattaggtgagttgtccccttacagtgatgtggttacctttatcatatgttaagtcccagtaattaacacctcatttatatatatatatatgttacatatatatgttgaaagtaaatttttcagctaacttaagcttggtgcttacaagtgaaaaagtaaaggagttttaaccatttgggtcagatgcttttatagatctgtaaacaaagtatgcagaaatttatccttttaactaaagttcatcattatgctgatgttatgtattatggtacagtgagttttaggctttattggctgggagggaggggggaatcttatgtcaaagtcatatgctaaacacatgcaaggagatccgttctttctgaactatgttgtgggtgtataaccccatctacttggcccgtcttcctttttgccaacttaggaattcctaagactccgtaaagaacagtgtgtgggggaaaaatcagtatagcatattacagggatacctttaggaatctgaattggatagttatttttatcagctttttatttattctgttttggagtttgagttttgctttcattttcatgataacagtccttagtaagggaaagggaaaggcatggggattaatttgaagttaatgtatatttatctgatggaccaggtatttcacatagttacatgtggttctcagtatctacttttagcctttccaaatagtttttg

SEQ ID NO: 10834 - DNA, 1033 bp, Homo sapiens
aaaccagttaaaagacttttactgatatttcctgtgagaattgataagggtctaaactgaaacaagtgagagtgcagtggaaagagtgcatgtgagggggtaaggaaggtaaggaggtagaattgtcaggacttaaatattgattgggtgtggtgtggccagggaatggtggagtttggattaaactataaggtttcctgcttgggttgataatagaatatattcatttaatgtctcccttctctagcattctgttagcagtcatctgctggtgcaaccagtcatagccctgagtgataaaacgtgagagatttagtactcaggctctgaggtgttgttttgaccactaccatctacagattcccaactctactggatagtcaggttcctgaaacatgtaaatccagataatcagagttttattgtatatggaacatatctttcatttcctaatggatccagggacatcatttacgaatatcagatattggctgaattcagctgtgttatgatcaaccttaaagactactggactatgaggagcccctcacggtgtttttctactgcccttatgtaactggtctgccagctttttagaactgtgtgtgcctgcaacttagaaaaaaaatcccacagttaaattggttaaaacaactgtcaactttccttgcttttttgctgccagtttggttagggtaaccttgcagccttgctgattctgtcctttgattttaaatgcacgtgtcttttgaacctcaagatgaaggctgagaagtgactctacaggcttacttgtggaaatgtagaatgagtgggctttgcttttgtgatctgttttcctatttattgacaccttccttgtttattccaggttcacagctatagtctagatggtggaggtttatgactttccaataagtgaaatgttaatgagggttattaaccctcactagtgtctgtttggaagtagtgacattcttccaaaaatcttggaaaagttgttttgtagtgtgaatgagcatgagtcactgat

SEQ ID NO: 10835 - DNA, 1050 bp, Homo sapiens
tgttcctctctgtgtttatgtgttctcattgttcagctcccactcataagtgagaatatgtggtgtttggttttctgtttctgcattggtttgctgagaataatggcttccagttccacccatgtccctgcaaaggacatgatctcattcctttttatggctgcatagtattccatggtgtatatgtaccacatttgctttatccagtctatcattgatgggcatttgggttgattccgtgtctttgctattgcgaatagtgctgcaatgagcatatgtatgcatgtatctttatagtaaaatgatttatactcctttgggtatatactcagtaatgggattgctgggtcaaatgctatttctggttctaggtctttgaggaatcaccacactgttttccacaatgtttgaactaattgacattaccaccaacagtgtaaaaacgtccctgtttctccacagccttgccagaaatcataattttaatgtttatgaaagttaattgtttttctctgtagcttcaatttgtgtttttctgatttgcaataagtattcttccatatacacagggccatttttttgcctttgctataaaatgttcattcacacttttacttatttttctattgggttgtcttattttattgattctacatataaatcctatgtcaaaaaaatatgtatagcaaaattttttcattctgtggcttgtctttttaactcctcatgtcttgtgatgaacataaatttttagtcttaatgtagtgatataccatttactttaccatgtgcaagttttactattgtttaggaaatttttctgcatttgcagttgtaaagatatcctatattttattctataatttctagagttttaccttttatatttgccttaaatatacaactagtggccacgtgcagtgactcacgcctataatcccaacactttggaagatgaggtgggaggatcacttgagcctgggaagtcaaggctgcaatgaactatgatcacatcactgtactccagcctgggcgacagagcaagacact

SEQ ID NO: 10836 - DNA, 1066 bp, Homo sapiens
ctaggctcacgcaatcctcctgccttggtccccgaaaatgggggattataggcatgagccatggtgcctggccaaaaatctttatctttaaagatatttaatactttttttctgaataatttttctatgtgccctaagctagccagcctcttaattatgttactatgtgtttgtgtgtgtaaatacattacacagagtttgagtttgattattgaattttcatattgtttttataacttaatttatgctgttatctttatgaagaatgctgaaaataagtgaattttataacttgtaaagtgtggctttaaatattccgtattcttatgagaacgcaaataacttagcccataaagcacagaagaaaatcttatacgtttgagttataaagctttctgcttgctccttgaaaatattgcttaatgattctgtaatgacaggccatggtaacttaaaatggatgtgtcatttactattcctttgtgcttcaaagctttaagatggttaacttagagtgccaagtaaatcttaaggctctctgaatagtgagaaactttattctgattatttaaaggtcattgcaggactgggtatcaaaacaatatttgcgggggtaaaatagtatgcaaattttttaaggttatgttttcatactgctttttttaacttaaaattctaagttctgaaaattgaactttttcttacataggcaaatagagtatgaggttttgtttcaatatctgcaatagctggatctaatgtatgctaattccaaacttaccaaaactagcgttgcaagtaaggagaaaaatctgtttcttcagattttcacaattcaaaatatgaatgaagatggggaatctaacaagtgccataaaaaacattagaatatattaactatgtatttgatatttaaagttgttttatactttactttttttttttctttgagacggagtttcactcttgttgcccaggctggcatgatctcagctcacgcaacgtccacctcccgggttcaagcagttctcctgcctcagtctcccaagtagttgagattacaggt

SEQ ID NO: 10837 - DNA, 1081 bp, Homo sapiens
agttctatctatgttgtcacaaaaggcaaggtctcattttttataagaatatgatgaataatattccatcatattttctttatccattcatctcttgatggacatgtgggttatttccttattttggctattgtcagtaatgctgcagtgaacatgggagcacagatgttcctatgaggtggcaattcatttcttttgggtatacacccagaggtgggattgtagatcatatatggtagttctatttttaatttcttgaggaacctccatactgttttccataatggctgcactaatttattttcctaccaacaatgtgcaaggatttccttttttctgcaccttgcaggcacttgcttgatggcatttttttaaagttagtaaagaaataccacagaatgattccaaatcaaataataaaagtgtacgtttagtgtatatgcttctttttaacctgttttataatgttaagtgtttttttcttatagaagcaattcatttttattgtagaacatttggaaaatactaaggagtataaagatggagaaaataaaaatcattcacagtcctgttgtgcagagagaatttctactaatataattattgtgtacaattatatgcatatattatgcatatataacacataattatatatgcagcatagatgcatgtattatatgtaattatatgtgcaattatgcacaattatgtatgcggcacatatgcatatattatgcatttataatgtttcacattgacagttaatatgtatatatatttttaaagatttgagtcttattgctattgataatactgtgtcaaatcctattttcattagctgtattagtatccttatatcgttatatatttattcagtagaaggtttttaataactatgatgttctgtcttatgaatatatggtatttattcctctacttccaggtaactttgttgtttgtgagtttttgctgtgagaaaaatgtttatatgaatactcttgtatgcatgtctgttttttgtagaattggaattgagaaaatacatgagctttttagatggttcatcacttaacatttgcca

SEQ ID NO: 10838 - DNA, 1047 bp, Homo sapiens
gtctttcaagtagatgacctcccctgttctgcccacacccaaaacccactgaccaagcacttgctgtcatgttaccctgttttgttttccctgtggcacttatcactggttaaaattcttattcacttacgtgttttctttttctgccttgtgatatgagcctcacaagagtggggacctcctctgaccctctttgctgctaaattctcacagttaagaatagtgcctttctgttcttaggaaatgctcaataaatatctgttgaacatttgtaataaatattttgtaataaacaagtcagcagtttgttaaaatacagtgtgtttaaatgctatgtcactggtgcattgcagacacttgttgggtatttatggaatcttgagggagggccgtggtcagtaggagctcaaggagaatgaaagcttgaagccacaaagggtttttctagattaatccagtgaaagacagatgagcaggagagttagggtatgatagatttgttgaaatgttgaactgttagacttcaggctgggaaggagggaagtagagcaaaaagtgatctgatagattgggatagagattcttccaagaccagagaactcccacagggaagtagttaaacatgtatactgcaaggttggagatttggtgttgcagtgtgatcattgaagtcatgattttagatgtgccaggttatgggtatgacaaggttctgggattaagagaatggatggctcaggtagttgaaggaccttgggggaatggggaataaatatctgttctttgagagaatgcagtaggacagctgatgggagaaagtccttaacagccaaggtactgaggtaatgctttgaaaagaggttgagggtatagaggagtttgctaattatggagcaccatttccataggtagttaaatttgtaagatagaaggtggactgtagactaggtcagggatggaaaaaacaaagccttgtagggttaatgccaggtcagtagatggattgagagaggaattggagataaagttaatttgggcattgagagg

SEQ ID NO: 10839 - DNA, 1077 bp, Homo sapiens
caaaatttctctaatatctaccattttgtaggtctggtgctagatggtagagataacatactgcatgctaataagtgggtttttttttttagattttaagaaaagttatttaaatccgaaactatttttactggttttaaatttttgtccacttgttttgtgtattatcttctgtttatggaacacttaactatatgttccaagcactctgctgggtcttttatatgcatatgtcatttattgcatacaccataccaatctacccgtcagttattgagcatttatgtacctgtcactgtgcaaccatttaatcttgcaaatgaggaccctaaaccttacagggctggcagagctgggattcaagtttgaatcaggtgggtcagcattctacccaaaaagattttttatcaattgtgctttatgataaaactgccatgtacaatataaacaataggtcatcagattattaaaaattcaccagattgaaaaagaggcaatggaagatttaagtgatgccgaactctggaataattagtcatcattttgtgtaacatatatggtatctattatgacagctttttaaaaaacctctactcatgtcaactaatacagctattgccataaacttggatcaagtttataatcaagttttaaaaatttaagtttggcgggtgctgggattacaggattactcatgcctgtaatgctagcactttgggaggccgaggtggatggatcacgaggtcaggagatcgagaccattctagctaacacagtgaaacccccatctctactgaaaatacaaaaaattagccgggcgtggtggcgggtgcctgtggtcccagctactcaggaggctgaggtaggagaatgacgtgaacccaggaggtggagcttgcagtgagccgagatcgcaccactgcactccagcctgggcgacagagtgagactccgactcaaaaaaaaaaatttaagtttataaacttagatttaaacttagactatgtcctacaatcaagcgtcctgtgtaaaggtggctgtggtatgctggtggcattgaaaactggtagcttgaag

SEQ ID NO: 10840 - DNA, 1051 bp, Homo sapiens
gctaattaaagtttaaaaaccactagtgaaaataaacaccaaaacatggttaacttaaaggagattaaaaggagagtgggggaaacagcaaggatgaattcaatgtgcaagtttgtttaaaattatatacaacttaaggagtcatgaaaaggaaatattattgtattttacatagatagatagatgagtataaatagtatctcccttgtatagattaaagaaagctgttatcattatcagctgactctggaaagaggtgtcagcttagtgaagccagcaaaccttagtttcctctgagtgccagagagccactgttatcatattctctttcatgagcaccaaatgtgctttaggtacttttcctacatgttcacttattatcaacaaccctgtgggataattattagtattatcattttacaggtgagaaaatgtagaatattaagtagtatgtttagtgtcacagaaaccgataataatgaatttctcaaaccaaaattcagattgtaacgacactttaatgttaagaggcatgtcactgagaagcaagtggtttgggtttcaatgattgagttagttgttctcagtctgctctgccccaaaaggccatctcttggtgtttcaaggaacagcagctggattgcttgatacttacaagggaaaatttttttattttctttctttttttattttttgagatggagtcttgctctattgcccaggctggagcacagtggcgtgatcttggctcaccgcaccctctgcctgccaggttcaaacgattctcctgcctcagcctcccgagtaggtgggactacaggtgtgcaccaccacgcccagctaatttttgtgtttttttgtagagacagggtttcaccatgttggccaggctggtctcgaactcctgacctcagattatccacctgccttagcctcccaaagtgctgggattacaggcatgagccactgtgcctggtcttataaggaaaaatttgttaaggcctctacagaaaccacgtctggtgcctatggatggactgttgtttttagt

SEQ ID NO: 10841 - DNA, 1033 bp, Homo sapiens
aagaatatcctttgtgaaatatttggattgcatttcatttgttatctgtctctctaggcttataaatatacttgccaaccacatacatgtcttaggactcagaccataaacccatagatacaacgtaatttgccagaggtcccataaaatactaataataaggctagttgtccctggctctagcttagttaggtaacttgaagaaaaaaggaaaatggctgtgctaattttgttaggagtaagctttcagttcagtagaaaatgacgatatatagaaatataattcaataaactgtttgatgggtggtaccattaaaaataacagagcagttgggaagtacttgatatataataaaatatcaaaggacattgtcacatctgcagtcagataatagttctaagttaggttggccacagtgagggtgattgtttctttctggtcactgcacttggcagtagatgtagctcctggcaggttcacaatgatgttcgttttgatgaaatagaacaagaaagttggatggtaataacgtgaataactgaaaataagctcgaatttagtataccaaatttactttcttctatagaataatgccaactactttctaattagtagctagaagaaatggagtaagagtaaaaagtttagattgaaattgagtccagtctacattccctctggtcatgtttttttgaaactgacccaaagctctcaacctcttgttttttgctttcttccttttttagaataccatttatggttcgtatccaccccttgaagtcctatattctaactgagctttcatctataagcttttttgggcattgtatgcagaatttaatagcttcctatttattaagaaacattcctttctctttgggcagaatttatattttattccttctaaatgctttgttaaatcagaaggtcgaggaataacaatatgctgtttctgccctctggtggttgaaagagatgttgtaaataagtaattacaaagatgtgtgtcctatgactctaaccacctatggc

SEQ ID NO: 10842 - DNA, 1047 bp, Homo sapiens
aaagtataagttcaaaatctactttgtaaaggtaacaaagactgtaaatccagaacagaggacctgtgacttattaatacaaatggaacttttcccattagttgtcatttaacatgaatgatttccggtggaagagttctggattttaggaattggaatcttctcccattcttcttgatgtctggtgtacagcttgtctgctgtctagcacacatctttgggttattttccattccagatgagctatgattttttatgcataattttttggagctatacattttccttgagaataaatatctgaaattatagtttaagtcaataagaaagtatgatttttaagtatatatcagaaacatattttccctttgaggtcacattgtcagaggcaggaaaggaagaagtgcagcagttaatatctagccagcaaaatttatctgggagatggattactaaggttaataagaagtagaaattatagagcaaaggatgtgaatgttgggagacttaatcagtgtatatgtttcctgattggtcagagacattgtcattttcactgccttttctccactttctaaagagttgataaggaaacaatttttttttttatatttgaagagttgatctatttataaattttaacaatgacattcaatagagttactgctgtaaatctagacattaacatgaaacttagccgtgtattttaaggcttaaggaggtattgtctagggtttatggaggactattacattatattctttttcttgtttttaatacttaaaaattatgaaataattaatgtaaaaaattacagatataccaaagatatgaataagatagagagttgcccctacactttgttctttggttttataacacataccctgcccccaccaagttgaataatactcccccacttcagagtgtgtactgataatattctgatcccagaacctgtgaaggctactttctgtggcaaatacttagcagatgtgattaaattaaggactttgagatgaggttttccttgatcttggtggggag

SEQ ID NO: 10843 - DNA, 1049 bp, Homo sapiens
gccaggcgtggtagcaggcacttgtagtcccatctactttggaggctgaggcaagagaattgcttgaacctgggaggtggaggttgcagtgagcccagatcacaccactgcactccagcctgggtgacagagcgagaatccatctcaaaaaaaaaaaaaaaagttctgttaagggcagagcctagactacctaagggattcactgcctggatggctgtgggctaagaaccgttattaggacagggagaaaatgaaggtgagacataggtttttcctatcatgttttcttgtaaatgtgattactatcttccagatctactactgattgtctgcctgctactgttacctcttaatatgttaaatataacctgggatgcttctaatccttctttccttgactctctctccagaaaaagtcctccatgacttcttttctcaatactgtaattactgatgtagttattttgattgtgttttatagtcatagcagtgagactgccttacaacaatattgtctaaattaagtaaatgcaatagccaatattagactggttttgaccttcagaatggcaacgccaaggattcatccccatgttgtaattatgatttttaaacgtattataatcaaaaacacagtattaaaagggatacatggggtttttcagtcatgcaacaaatattttactctgtgctccataaacacctactatgtgttaagcattattctctatgccagggagatgattgatatgatagtaaacaagagaattacacgtgtggaatgcagtttactcccagaaagggaaagattgaataaagcagtaggttacccagaattgcagaaatatttaggcaccaaggagtaatggaaaggctaaatatgtacaggatgatatatgtgataggagcttggcatacggcctgagcacataaatgcttaataaattttaattgtgccagttgcttttgttgctgtcactatgccaattgtgggataaggtagggatgcaaatcagaataaaaatgttcaacaggtatgaataaaaata

SEQ ID NO: 10844 - DNA, 1064 bp, Homo sapiens
tttgtgattcatgttgtagcatgtatcagtacatcattcctttttatggctgaataatattccatcatttgtaaatgctacgttttgtttttccattcatttgttgattggacatgtgggttctttccaccttttggctattatgaatagtattgctgtgaacatgtatgtacaagtatttgtttgaatacctgtttttaattatttgggtatatatacctgggagttgaattgctaggtcatatggcaattttgtgtccaactttttgagctaaactgttttccatagcacctgcaccatttacattcctgtcaacactaaatatttatgctgagatcctgaactgactcttggacttccaaattaaattgtgaacaatctggaattttttgttatagttaggtaacactagcatatattgttatgaaatttttcaaagaaaagctgtgaaactggtccatttttaaagtttgtgtttggatagtcgtaattttttatgtctgatcttcagtcatctgaacatactttttaagaacagtgtttaagaactgaatgtgctctgttatttaaattattatgccttattcctttcttgttttgtcttttatatctaatatgtaggtaacatttttgaaatatttagccaatttaggaatcaaagagttatacagattatttagaattggagaatctttctggatagcaatttttaagtttttttttacttgattgacagtaattttactgtataaggaagtcggttatatccttccagttcccagttccatacctcttttgtgatgttttctattatgcagaacttaaagttttggcagcttaatcttttgttgctcattgttaatgttttcagtttcttaatacacagaactggctttttcattttaaattacatttccattgattaaatgtacttttttgggggtcacagaatgtgatagaccattcttggtgcctaccaaattgctatccactcttccttccaactttcttcctattggaaagaatcccaattttgttctagtgatttctttttttttttttt

SEQ ID NO: 10845 - DNA, 1029 bp, Homo sapiens
cgtcggggaggcttgggccgtgcaggaacccatggcggaggggaggctcgggcatggcgggctgcaggtccagagccctgccctgtggggaagcagctgaggcccggcgagaatttgagcacggtgcgggtaggctggcagtgctggggcacccggcgccccctccacagctgctggcctgggtgctaagcccctcactgcctggggccagcaatgccggccggccactctgagtgcggcccgcggagcctgtgcccacctgaaacttgcgctggcccacaagcgctacgtgcaccccggttcccaccggcacctctccctccacccctccctgcaagcagagggagccggctccagccttggccagcccagagaggggctcccacagtgcagtggcaagctgatgggctcctcaggcacggccagagtgggcgccgaggccaaggaggcgctgagagcacgcgagggctgccaccacactgtcacctctcaatatcatggtgagtaaaggacaacttatgaagtcagttactttttcaggacctttcattgagtttgttgcagagatagaattgtcttttaggtcctaaggctgtgtcttaatcatgagtctccataacacagtctgtcctgtactgtggttttttttaaaacatgggtattttcttccttccctacaaaagggtaaacaggagtttcttaataagtaaatcaagctaacacacaaagcaaccattgtaagagtttctttgaggcctgtttttttgatgataatgaaactggtaacactatcatatgtttaattctattcctacatcaaaaacataccatgtatcttccaagcagatggtacaagtgtagaattgactgttagtacttgaataatagatattgttagtaaatcagactctgtagaaaacgagttagattttatttcctttagaatgaaaatcattttatatacagttagagtgtaagtcacaaactaccattcacaagtgtacattcacataaatatgtgcaattttt

SEQ ID NO: 10846 - DNA, 1047 bp, Homo sapiens
ggtagtggatgaaaaatatctgaactattatgtcagtatcaaatgaggatgactagactgacattgtgtttagaagttgttggccccatacccatgtcgattgtcttccttggtggcatagagtttattcttatactctacttcagtttatatagttgttacctgtgccataagttcatgggatatttgaaacctacctcaggtaatcattaggtgtgagagtttaatttctgtaagctgatttaccccttacctgattaccaacttttagcagaagataatgaggatatgagagagagaaagacactatattttcaaattattttaaaatttacttttgtaattagtgttactttggtttttctttttttaagtcatgaacaaatggtatgtgctataccaaaataaatgaatttggaaatttgggaaaaagtgagaaaggaggttttcattatccttaatttttgcctctgtttaaacttgggatttaatgtgcagttgtgcttttctcgtactagtatttttctgatctgaacaatttgtattaaatgacctaggcaataaaaatcagtagtcaactgatgaaacatttgcatgcatcatgtcgtacagcactgttaggtactgtatggaaaagagattggtaggagatctgtttcttaaccgttaaaagaactactttaaatatgtgtgatgagtaaattggtaccaatttacggtattcagaacacctcaatgctggatttagttgtttgaacataagcctgtttactagagtgaatgctgggaaactaggttaagtcaaggtcaaggctggcactttgaagaagagagtggtcaaagttttaaatggcactgagaagtaaagtaacataagggctgaaaaattacaaatatcacaattagatctttagtcattatcacaaatattgctgaggaatgtgctgaaacgttatttggtggagagtactttggaggccctcactggattttttctgtggctttttaatgaagcattgttcttcacctatagtatagagataacgt

SEQ ID NO: 10847 - DNA, 1055 bp, Homo sapiens
ttaaataattgaccaaatactaatataatgatgacatatactgaatgtcctgcagttcataataattgtaaataacatttatcaagtgcttattattttctacagcttctattataaagtaagttccatgagggcaaggattttttatgtttttctcactgctttatgatacattttaatttataaattaggcacagtgggacaggcatgctgattcatgcctgtaatcccagcagtttgggaaaccaaagtaggaagatcacttgagcccaggagtttgaggccagactgggcaacccagcaagaccccatctctgttttttaaaaaattaggcacagtaaaagattaactacaataactaataaaagtgtaacagcatgccagcatcactagtcttgtactttagggggtggggtggggtcattattaagtaaagtaaaggttgtttgaacacaaaaactgcaatacctcaacagttaatctgagaaccaagccaactactaagtaactaacggggcaggttgcatcgacagtttagagacactggacaaagggatgattcacatcatagatgggatggagcaggatggagagagatttcatcacactactcagaacagctcacaatttaaaacttaagaattgtttatttctgggattttctatttaatatttttgggcggcaattgactgagggtaactgaaaccatagaaagcaaaaccacagataagggaggactactgtatataaatatatgtctatatagatgttatatttttgaaaatatttgtgtgtatatacatgtatatgctgactaaatgaaggaataacctgtgacatagctgcctttattcagttgagacacagagaggtaaagtaagttgccaaagatcacctagctattaagtggaggagctgggattcaaacctatgtagtctgatttcagaaactgtgctctcaactgccattgttttctgctacctctgttgtgtttacagaaatacaggaacacgaatagtaaatattgcttttcttattcagtcgagtcagtt

SEQ ID NO: 10848 - DNA, 1080 bp, Homo sapiens
tgtactccactgcactccagcctgggtgacagagtgagaatccatctcaaaaaaaaaaaaaaaagtatgtttgtatttagaatttgaattatacctacacctctgtatctaaaggaaatggaggccaggcgctcactcctgtaatcctggcactttaggaggctgaggcaggcagattgcctgagctcaggagtttgagatcgccctgggcaacatggcaaaaccccatctctacaaaagtacaaaaaattagctgggcatggtggctggtgcctgtagtcccagctactcaggggcctgaggcaggagaatcactcgaacctgagaggcggaggttgcagtgagctgagattgtgccaatgcacttcagcctgggcaacagagcaaaacactatctccaaaaaaaaaaaaagataatagggaaacacaaatgctaactttacgtagagtttttaattgattcttttttttctggctcacttctcccctaacttttaaaaatcttttttatatcatgaatttcacctagtatgaagttggcactgtgatagttttataaactcaaaagagtatgtttatcaaagtggtttttgttgttgttgttgttgttgttgttgttttgagatggagtctcactctgtcgcccaggctggagtgcactggcgcgatcttgtctcgctgcaagctcggcttcctggggtcacgccattctcctgcctcagcctcccaagtagctgggactacaggcacctgccaccacgcccggctaatttttttgtatttttcgaagagacggggtttcactgtgttagccaggatggtctcgatctcctgacctcttgatccgcctgcctccgcctcccaaagtgctgggattacaggcgtgagccactgcgcccggcccaaagtggtttttttaaaaatagtaaactgaaattgtattctttcatttttggaaatggtagtattctgtgcttagtaatatgcaattacatatccaattcccaaaattaacattttaaaagaattatactttgcatgcataatgtacatgaagcatttttagattgctttaagaag

SEQ ID NO: 10849 - DNA, 1030 bp, Homo sapiens
ttctaagctgggcacggtggctcatgcttgtaatcccagcactttgggaggccgaagtgggtggattacctgaggtcaggaattcaagatcagccgggcatggtggtggatgcctgtaatcccagctacccaggaggctgaggcaggagaatcgcttgagcccaggaggcggaggttgcagtgagccgagatcacgccattgcactccagcttgggcaacagagcgagactcttgtctcccaaaaaaaaaaaaaaaaaaaaaaaattctaatgtatattttacttactggaacaaaagaaatgtactctaatttagaatttggaaaataaccctccttcatgtttacattttaattatttttttattttagagtaatttcttaccaaacattaccaagaaatatgccaagtcacagagcccagattatggcccgctaccctgaaggttatagaacactcccaagaaacagcaagacaaggcctgaaagtatctgcagtgtaaccccttccactcatgacaagacattaggacccggagcggaggagaaacggaggtccatgagagatgacacaatgtggcagctctacgaatggcagcagcgtcagttttataacaaacagagcaccctccctcgacacagtactttgagtagtcccaaaaccatggtaaatatttctgaccagacaatgcactctattcccacatcaccttcccacgggtcaatagctgcttatcagggatactcccctcaacgaacttacagatcggaagtgtcttcaccaattcagagaggagatgtgacaatagaccgcagacacagggcccatcaccctaaggtaaaatagctgctgattttgtgttaactcactaccttataaatgctgtgttttctttctagtatactattttaaatgtgagagacaaaagaatggggataaagtaagcaaggcagctcttttttgttttaaaaaataaataaaaatattttacaacattaagatctcatgtataaaaaatacctaattgcaa

SEQ ID NO: 10850 - DNA, 1033 bp, Homo sapiens
cttgttactgccagtagcgtaacattttagagtaccaggtccgttgcttttgtagggattattggttccctggatttatgaattgattcatcagttttatgtaaccacaaatttgagagtaaattataaaatctgaaagaggaaaaggctctggtcacattttatactatatatcataacaaatgaacatgtactaatctattctcactctaacacttactctgcctcccctaataaatcatcagaataacccaagaccagcaacaaaatgtagttttcctcctgccccttgtgaggtattacaataatcaaaagcaaaactgtaatttctttaaattctgttaatcactgtcagtattcacaaaacacatagacccaaagagtattctcatagttacttcagaggtcaactcatttctgatgctactggaatgtttaataacaaataaaaaataaaatagccttatctgaaagtctgcagatttacatattaagcaggcaatccaaaaatcttgacttctggtgcctgtaacttcagcaatataatttgattctcactgtcaccgtttatgaggatgaatcatgtattaaagtggtttaaaaataacaatagatatactaattacatggtagaattttcttcagttttttgtttcatcattaagtacactattacagtttgtttatgcttccatagcccagttagtgtattattcaaagtccacatttatataagactagccctggtttatttgtcatttttgtgaattttaagatagcataggcccaaagtagaacctgtatacatacagtaatcccaactatatattttatgtacctcatccatgctctatgtagagaatgaataaatgcataatatatcagtaactcattttcttctcatccagcttagttgttgctgaatattggagacacttttggttacagtttaagtgaaacttgccagcttcatcctaaaatgcatgtactgaatggatttaacatttattagctttttccatgtttatttttc

SEQ ID NO: 10851 - DNA, 1050 bp, Homo sapiens
attaacctttatccccattaaatcagattccatgacttgcccaaaatcataagctagagtgaaaaccttgtattaatggattttctttcatcttttaaaaattctattttaacttctttcaaagttaatggatcattctgttcttagagtttggctgcagtctttgttacctgaggaatatcagcttctagctatggctctaacaagacagcaaagtgaaaacaaaatgtccctacctattctaaaatgcataatagttatacaattctatttttatttacaaaatattataaatactattttacagttacaaaattataaaagtagctcattataccaggctttgcttctgtcttaattttacagtaggttttgcctctgtcttaattttatgtacatttttcagcaagtttattcattctgcaaagatttatggaactcaggatgcaaagataagccatgatgctaatgcccacaatgtagaattcttgttcaaaacttggaaggaaatgaggttgagtataaatgccaaaaacatttctaaaattgacctaaaggtgtcattatgttgttgaaacataagctgataaatctttgaattaatggtaggaattcagctactcagtgccatttgtaactttgtaagaacacagttaaccattgataaaatccagatccttctatctagaagttattttaattttgatttaaaatttggacgggtgcggtggctcacacctgtaatcctagcactttgggaggccgaggtgggcggatcacctgaggttgggagttcaagaccagcctgaccaacatggagaaaccccatctctactaaaaaaaaaaaaaaaaaaaaatacaaaattagcctggtgtggtggcacatacctgtaatcccagctactcaggatcctgaggcaggagaatctcttttacccaggaggcggaggtcatggtgagccgagatcgcgccattgcattccagcctgggcaacaagagcgaaactccgtctcaaaaataaaataaaattcaagtatattttagaatag

SEQ ID NO: 10852 - DNA, 1029 bp, Homo sapiens
tgtttaactgatgtgttgttccaaatacctttacatgtaattattaagtttgacaaaattaatttattaattaatcaggttggtggtaaagtaacatgagggaactacctgggtagatggaaacattctgtatgttttgattgttacatatgtgaatacttttgtcaaaagtcgttgatgtataactaaaatttgtcaatttattcttcagtgaagttttttttttaatatcctcacttccaaaaagcagttgtaggcacagagatttaaaaataaatggtctagtctgaatgaaatttttaattgggatattgttaaaagacaaacatgtgtttcattatcacttaactgactaaaaagtagattaaaccagtcacaggaggtttctaatttgataactaaacaaattttattggcaattagactgaaaatataattgtctagaaaaagagttttaagatttagttttttcttacattatattaataaatttattaattttgagattaatgaacttttgttgtagacttagctgaaccagtaaagtagcatttgtcaaccacgatagaaatgcttattttctgtatatgaaagatgaaaattaagcgttacaaattaccattataaacagacctgtcgacttacaaatggtaaagctttcttggccttttactatatacatcatgatggtcttttgagtgctttaactcaagtacagagcctgctaaaacaaatatttttctagaggcagtaattaagtacaacatagctggaaatgttaagcttggtttcagactacctttttagaagctaaggagacataccaagtctttgctgaataagtcttagtttgcatatccttgagtaattctacatgtggtattatactgtgagaaaatccaaaatagagtctctataaatgtcaagattacctttaataaaatatgtgattaagtgacacattcagtatattatattttaatacttgtagagaactaattttttataaccttacacagaactgaatat

SEQ ID NO: 10853 - DNA, 1041 bp, Homo sapiens
tagtaatgtttcaacatgagagtcatgattttaaatgataatatttaaagtcatgcattggagaggtctcggaaggaatgagtattatttttcttactaaagcttgttagaagtaactggagagtgacaaaaatgcgcattttttcagaacatttaaaaagtgtgatagtgtatgtttcaattgtcttatcattacttttgatctgtttgggttagttggtttttaatgtacttttaaaaaaacgagaatcacatgcatattatgccacttctaaagtgtattagcgtttattttgaccatctatgttttgacaatcacattttttttaaacatgctctccagaaaagtatagcaatggaaattttagtggtcgatagtgattttcatttaagagtttaatattctaaagttctaggaattctgattaattgattaaaaacgaacaccttagtatttaatgctacaagtaatacagagtcctggatattttgaaaatctggcattagattctgtttgacattaacgtctagttaagaaaatatcttcgggtaaagtagactgtataaaccttagaaaaattgtgttgaactgtgtaggcatgggtaggaaggagaatgtcttcaagaaaattaaaaattgatgtaaactgcacaatgaagcatgtgctatttttaccattttatgctcctctgataccattacatatctgaaagttgacattagtttataaaatcagcgtttttcatttactcagtatacacgtattatgcttgcctaccactgtacaaattagatgtcttccatttcattcccacaactatggtgcaagataggtattattttgacttctgtttaacagatgaagaagcaagttgagtatcttactcaggacagtaaatacagcatggaaatggtgggctggatatgagcaaaggttctcaagtcccctattatttccactgaagagttaaaataattcgccttaaataagttgaggccgggcgcggtggctcaggcctgttaaccccaggactttggga

SEQ ID NO: 10854 - DNA, 1031 bp, Homo sapiens
atttgtgtttatttcctctaggctataacattttaaaagtaaagatcaggccggacatggtggctcacatccgtagtaaaaatacaaaaattaggcgcatgcctgtaatcccagctacttgggaggctgaggcaggagaatagcttgaacccgggaggtggaggttgcagtgatctgagatcgtgccattgtgctccagcctgggcaacagagcaagactccatctcaaaaaaaaaaaaaagtaaagatcaggtctcatatatacttgcagaacttgccttctgcactcactcagtatgtcgtagcctgtattcattctcagtaattggttgaattcaacttaatgtggaaatacctgattgcatatttctttctcagtttcattagtgtggctgattaaagaaaaagagaacagtttttttttgttttgtttgtacttcgagacagggtcttgctctgtcactcaggctggagtgcagtggtaccgtcacagctcactgcagcctcaaactcctggacccaagtgactgtcctgcctcagccttccaaatagctggagctacaggcatgcactaccatgcccagctgcttttttcattttttgtagagatggggtctccgtgtgttgcccaggctggtctcgaacccctgagctcaagcagtcctcccaccttggcctcccaaagtgcagggattacaggtgtgagccaccacacctggccatcattacttttcataaatattttttaaagtacaaagagtagatgaattggcaatagattttttagtgttttaaattaatcttggaaattgttatatcaacatgtgttttgaggtgttcagtcaagaatgacagtagtcattcttgtcagaaatgcatactgaaatcatctgatatttttcctcaaaatttccttaggaaagatctttttatgatttaatactaattaaaccttcagatgcaattgcttctttattaaatggggggtgttcttcatagtggatttctttttttaaacataccatctttg

SEQ ID NO: 10855 - DNA, 1032 bp, Homo sapiens
atttattcttggtttggatacattactggggttatagaaccctgttttgtcatattaccagaattacttttctggttccttctcatttgtttagactatttcggtggaaaagactggatctcagggcctgctgtctcccacttcctctagggatggggcttcctgagagctggactgcagtgattgttattgctcttctgagtgtagccatccagcagcagggctactaggctctgggatggtgctggggaatgcctacaaggagtcctgtgatgtgattcatcttcaggtctccgagctgtggataccagcacctgctctgctggaggtggcaggggagtgaagtggactctttggtggtgttcggttgtagatatgttgagtgtacttgctttcttgaatactggttatgctagcaatgaacttgtaatgtggacacactcaggacctctggttggccaggatgtcgcaggcagtggaattagctgttgttttccgcttcctgggatctgggttattctgtcatgagttgctctaatggcctgaattggttggcctccaaccaggaggtgacactttgaagagtgcaccagttgcagtagtagttaagtagggagattgcttgccctaagttggcctgggcaagtattttggcttctggcgagatgggtggggctatgtttcctgttctgctaaaggggcaggtagagaaataccatcaggtgggagcagggttaggcggaactgggctcagactcactttcattaggcggggcttgccacagccactgtgggagatagggcgttggttttcaggccagtggggttatgttccataggggattttggctgcctctgctgtgtcatatagttcaccagggaagtggggggttgtgagagtcctggttgcgagagacctcattcagctcccatgcagtgggtgaagccactctcactcccttggtgtactgctcagaccttgccccaggcttccctgctgagaaagcaaggccttcagacctcgcccctccc

SEQ ID NO: 10856 - DNA, 1021 bp, Homo sapiens
gtaatactggacatagataagtatttgaactaaagtcttgaatcatttctacctcttttttaacttagtgtgcaccatagagtaagtaaacatttttcatagagacgctgagggccataaggagcccccaaaatatattttgtatgtcaaaatagagtaattattaatggataccatataagaagaatgtgtgatttttttttttatcagcatcagtaaacatataactgttctgctaatatacttagtaatatctatgatttgcaagatgcttctgggaatataaatattcataaatatacatctctgtgttcaaaatggaaagtgtgagttgacatagatatgcagtgaagtgtgaggacagcctcaagggagaattagctcttgtccatttgtggcagatttagagagactttatgaggaaagttatgatttttacaaataaagggctgtgttgtgattttagcagcttacaattggtagaggtacctcgattgaaggaaagagcctgaggcatgtgatttttttaaatgctattatctagatgaacttttacaagatgaaccgcctggggataacaagatgaatatatttggtttttaacatgacacatttatatgcttagagtttggtaagtcaaaaactaagtaaattggttaaatgactaatggaaaagtcattatccatccaactgtggatattttctgttttgttttgttttaattaccacgattcatttgttagaagacctgcaaatttttttcccccaagatataattagaaatcacacacttataccgcagttaatttgtatatattaattctggtgctacctgaacattctgcattctttgttaaaatagcacatctgtcaggtgactcgggtagttaaccttttgatttcttaacattgcaagtacagaaggctaaagaggcagtatttaatggatattgtagagggcggcatatgaccaacactgagcatgtcttttctaagagagaggctagatctaattgttta

SEQ ID NO: 10857 - DNA, 1077 bp, Homo sapiens
acttcagtcagcagaactcctcaaaagtttctagccagccaaaggccaaagaagaatctccttctaaagctggaatgaacaaaaggaggaaattaaagaacaaaagacgacgctcattacgtaagtgttacactgagaaaatctggtgtatttcatggttttaaaagatatcttagacttttatgcaaatccactttgaacttcaactcctcttctattaaaagtaacaaacaggtaggatgcctgtctgtcagtgagagtgagaattcagtggcacatgtttgtagtagctaagggagtatatgtggccttcaaatataaactgtataaaattagatttgggggctactctgattctcttccaaaataacatttaaaatatagtaacattggtatttctagaaatattttagaaaatttgaacatgttaaaagtaaatatcaagtgaaagttaagtaatctatctactccaaagtagtgtgtgtacctgagctgggaggtagaggctgcagtgagccgtgatcgcgccaccacacttgaacctgggagacagagtgagaccctgtctcaaaaaaccaacaacaaaaaaaaccaccacaaagcaatgtgtgtggataacaaagcagtgttgctttttttttttttttttttttgagatggagtctcgctctgtcagccaggccggagtgcaatggcgtgagacagggtttcactgtgttggacgggctggtctcaaactcccgacctcaggtgattgcctgtctcggcctcccaaaatgctgggattacaggtgtgagccaccacacccagccgatagcaaaacaatttgaatgtaatgggtgtcatagtacctagtctattgtaacatatgtataatgtttatgtgtttacttaccaaaatgtatccttgatgtttaggatagaaaataagtagatgataaggcttgtaaatgctgggagtaggaacagactttgcaacctcagagtgtagctggtcactgcttctttgtgtcagctggttagtttgtggctttattttattattattattatttttttgatggggtctcacactg

SEQ ID NO: 10858 - DNA, 1030 bp, Homo sapiens
aaagcaatggcagtacggtgtaatacatgctaatgtagagtaagcactcagcattttgaagacatggactagagacttttcacccattattggagttgtgggggaggggcaacgcagaaaaggtgataatgcatgtgtcctatgtataattgtgtatgcgcatgggcagacacggcatatgccaggcaggaaagtgttgggatggtgggagtaaaaatttgatgtgaattttatttgacttaactgagacctatagttgcctaggttaattgcctgagttaaaatgagtaatcaaaaaatgaagcgtacgtaacttaaacatttttgctgaatatgtaaatgaatgtttagtaatttgttttatatagagccaaagtcatactttggagtctagatatgttaattggggtttctggtcacatttcttgaataaaacacatttaaatgtgtacataatctaatggtttgcagcttttatttattaaagcggagccagaacttgtagacaattgaaaagctattagagataccctaatgagacatgttacagtttttgttctcaatttttactgtaattctgcagtacatcgctttttaaggtagtgactttttttttttttttttgaggtggggcctctgttgctcagcctggagtgcagtggcgcagtcacagctcctgggcaggtgatcctgtcacctcagcctcccaagtagctgggactacaggcaagcaccaccataacctggctaattttttgtattgagacaggatctccctatgttgcctaggctggtctagaactcctgggctcaggtgatcctcccaccttggcctcccaaggtactggtattgcaggcgtgagctactgaggaaatgacctttagtaagccttccaaaagctatgaactccagttttcatataaataagtctttagttttagtagagtgggatttgttttgttttactgttgtgtgcccagcactctaaaatggtatctgaatatgataactgttcttctgtaaaacatt

SEQ ID NO: 10859 - DNA, 1016 bp, Homo sapiens
aaatattagacaaaaatatagaattaaaacctttggttccaaaatgggaaaggttccacgatacataaatcatttctcatttgctttaaaaaatttaaaagtgtaaaaattatgagagactttattcgttaacaatgggggtaaagagctatatacatgaaaatgagtcttataaaattaagtgaagtgcaaataaaagcactgctactataagacattctggaatggttgtttaataagggtattatccatttgatctatagcaatgtgattttatttttaaaaagaaaagcagtgtgttttctttttttgttgttttcttttgcttaagcacttcatcaattgctttattctgtatctgcgaagtaatctgcaatctcttttgttctttttaaaatttgatttgttataaaattgccaaatagaagtgtttcagatacatagtttgtacctgtatttttattttattgcctcatgttcttgtaagtcattcttaattgaccaatgattgtagaccttgcttgagtattttttctaataaaacaaagcaaatcacatttagcttcaaattgtaacaattcaattgaattttaaaatgacacctgaaaagatacatctgatattttctatatagagcacagtaaataagttttttcattgtgtagaaatacttagatgtcaaaaccagatttcgtgatccttgattaacttctgagtactcaatcaatcataatccttttgctgcttatctgatgttggtttgatactgttaacacaccaaaaagaatatggaattgaaatgagctagctttataacttgtatgtatacatatatacacataacatccaattatgactgggtaataagtgtgaaaattttaatttgtggttttcatttattaatgtctgcccatctgtattgttgctcctaccttcaaatatgacacctgaaataataagtctgttgtccagaatttatgtattgttcagcatcaagcaaactacagctcacaagc

SEQ ID NO: 10860 - DNA, 1067 bp, Homo sapiens
tggaaacctgcccttgatcattcatccttctgatcttgacttgagcgtcacttcaaaacggcctttcttggtgcccttttgtctaggttagtccctcctgttttaggttaatgtcctgtggcacccaagtacctatcatgtttgtttctatctatgtcaacagtctgagcggaagagaaagcccccctgggcagaaatgtacaaccatggctctttccgggcaatgtggaggacgatgggctttgggccaacatcctggcatggcacagtgagcacagcctcttccctagactgtaggttccatgaagccaagggcctgtttctcttgccctccccattcccctttccattgtttgtgttgtctggcactcagttggcataaaacaaactgaagtgaagttgcaaataaatgttattttcactggtattcttgccttttattatggagaccttcaaaactcagttttcagttaccacaatagcagatattttttgactcataagacaaagctggagataggtgtgacctggcccttgttcataagcctgggatgtgatttgattcttaactcattgcatgtggaaagttcattgatgaggtaattggagctcaactcctgatcacttgagcaaagataataacactgttgagaatctgttattagttgctgtggtgagaaaaaccaattgtatctaactggtgtttaggttttactagggtagaatatattttggtgtatcttgagtatctaaagaactggtctatttctggttaatgggataatctaggaatttagtcaaagtatgctcagcatggtctgggagcttattagaaatgcagaatctcagaccccacctcagacttattgaccccagaatatgcattttgtttgtttgtttttggttttagacagggcctcactctgttgcctaggctggagtgcagtggcacgatcatagcttacttcagcctcaatctcccaggctcaagcgatactcccacctcagcctcctgaatagcggggactacaggtgtgctctactgtggccagtgagttttttaaaaa

SEQ ID NO: 10861 - DNA, 1026 bp, Homo sapiens
tatttttaatgactgaagattaaggtcctactgaacatggagacacgtaaaaagtgttgggtaaatggaatgaatgagagaacaaacctgccatcctcatacagtttgattattgcctctcttgtggaggtagtcatgtctaataacccatgggacatttagacaaacattagcagactccatgaccaatataggaaaaaactcatactaaagctgctcctgcaatgcacagattgcctcaggaagtgctagtgagttttccatcatttaaggccattcaagcagaatatggatggcctattgttccttcagcggggatttctgcacagggaaggaagtttagattgtctggaagagtctatgatgcaaaaggcagatggggaatctatatcatcagagaggagagaggacaatttcggtgggaatgcttaagtaaggcctgagagcatttagctatgattttcggcacatcgactttggaagagagtatgacctttgctgggcttatagacaaaaatgaatgagtgctgtgatatatcttcaaaaaagtaacactggttaatcttacatggaaaggataccataggaaggccgtgtgtgtgagtgagatacagtatgagtggtctctttcccaccctatacccaggacagttcacatagtcaaattccactgggactctaattgagagagcagagctgtttttcttaatgaaattcaagttttccccctagagatgagctcagaacaaaaatgggactatgttttcttatagaacagctcaatacaggtcacagtgggataaatttcacatacttaattgaatctttttgtgaatggcattctttaatgaatttttaatagaagatacagtgttttcatttagtagcaataaaaagaattgcttcctaaacattttaatagagaatttatatattgaaagctgtaatgcttactcaagaggttataccatgtttattccccaaaagcagatagtgtatcagtacgtggcctccaggtattgtcct

SEQ ID NO: 10862 - DNA, 1048 bp, Homo sapiens
tgtataaatatatatttgttatatagtagcaatatatatgcttagtttactccctgttttccaaatattcaacattattaatttgcaaatataataggcaatagtagtatcttgtcattgtttatattgaatttcttttacttccaataaagttaaatgtctttccatagatctatttattttgtaagttgttctcactcttccctcagttttttactagggttgggattctttcaaatttgtaagaacccttgatatcttgaagatattattctttacctaagtttactacagatattttaccaatgtgacatttgtgcaaatactctaaagttttatatagccagatcaatttgtcctcttttgtaataaaaaaaaaaagtctttaaaaaaagatttacggacaggattgacagattgatagctctttctcgattccgtgggtggtggtgcatggccgttcttagttggtggagcgatttgtctggttaattccgataacgaacgagactctggcatgctaactagttacgcgacccccgagcgggtctgcgcctgccacctgtgcgggggccggcaggaccccgacaagcagctcatgtgcgatgagtgcgacatggccttccacatctactgcctggacccgcccctcagcagtgttcccagcgaggacgagtggtactgccctgagtgccggaatgatgccagcgaggtggtactggcgggagagcggctgagagagagcaagaagaaggcgaagatggcctcggccacatcgtcctcacagcgggactgggacaagggcatggcctgtgtgggccgcaccaaggaatgtaccatcatcccgtccaaccactacggacccatcccggggatccccgtgggcaccatgtggcggttccgagtccaggtcagcgagtcgggtgtccatcggccccacgtggctggcatccatggccggagcaacgacggagcgtactccctagtcctggcggggggctacgaggatgacgtggaccatgggaattttttcacatacacgggtagt

SEQ ID NO: 10863 - DNA, 1115 bp, Homo sapiens
gtgaaaagaaagaataattgatttggtcaaataattgggaatgtggtaagttaatagtgcctcctgccgaaattctgaagtactgtaaatgtaatgacctaaaaggaaaggaaaatcaggagaggcattgctataaaggcagcttgggataaagcataaagggggacttttgttatattaattgagaggatgtaccctgatacagtgggaaagtgagattcatttttttcctttacaaattcaataaaatatttacatttttagaatattatcgaagcctcatatttcagattattgcccactattacaaaatactacctcattattttctttttaacataggaatttcagaaacagcttactaaagctaaaagaataatgatcatagggaacggtggtattgcacttgagttagtgtaagtatatatttttaaatatgataacatttaaattgtttaaaaataatttgtttttaaattaaacaattgctttgtgattcttgtgatttgttggcagactggaaaatgttttttattctgaaaatcaaagataaatataattttcatatgttttcaaggggaaaaatccaccatatttttttagctcttgtggaatccgtaattgtagaaattttattataaaatatatatgttttgggaatgctttaggtctcaaggtgattggccaaatttggcccataaatgtgttttataagtatattttatgtttaaaaataattcaaatatttacaccttttgagatttctagtgatagccctcaccactttttattgcttatatgataaatcctgctacactcatttatgttacctgtctggccagtgtcacccaaaatgtttgtgactcctgttttaggatatgtggttcttgcagctctttttttggtagcttgggaaatgtgaacacattaattaattttcatcttaagacgatattacaagttcaaaaaccattgagaaatatcctgctgtgtcctgcagaagattgattcacttcatgattttatcctctagcagatgattgacatgaaatagtctggatctttttcaggccataaagttgagtcaaaccacaaagaggacaaatttgaatcaa

SEQ ID NO: 10864 - DNA, 1032 bp, Homo sapiens
gaggtaacttagtgaattgtgctttataacattaatagaagagtacatctgtcaccttagaagttaagacttttcatactaaaaaaataagacctagagaatgcacagtcaataaaagtattaattttatatacaagataaacatagactttaaagcttacacctcgtctaccactgtatattcagtacctggaacagttccttgcatctggcagttgatcaacaattctttgttttttaatgaaactaatgaaacatgaaaaacctagaatattaatattaggtaaaacagtattctttgaaacttcggagaggtgattttaggactctagaccaaatatttaagtagatttatagtttaggtaaatttgtagataagtccataataagtaatcaagaaattaaaagtgatgcctgaccttctgaaaatttggttttgagaatactggtaccatgattttcgaaatatttcttgttgccattgtgacaagcagtatataattggataaaggatattgattgtgcggacctaccataacatttctaatgcagtaaagaaggaatcaattttaagaggaagaaagaactacagatattgtgcatttaaataataattatagaatgtgaaaggagataagtaattaaggaaacctatacatttatgtctgatgcgagagagcttttcaggaggaaaaaaacaaattacatattaaaaccaaaggtttagaatcccgatttatcttttttattatagctatgtctgagaaatgctatctcccatataaggcttagaaattttcattcatgttttaaattttgaaataatttgctgataattaatttgttataagagctaaataaatgtcattatgaagttaacctgcaatgttgggtacctgttttcttatacctatgaaaggaaaactggaaaattttcttagtttacagggatgttaatgtgactttaatttttctctacccttaaccatataccttatattgcagaaattggaatgggattaacaggatttg

SEQ ID NO: 10865 - DNA, 1035 bp, Homo sapiens
gctttcccagttatgtgggggttttagtaatgaaggttaaaagccaaagctgatctttgagatgaataaaaaatgggaagtcttagtatcatcgacaagcttggagtaatacacaggtttcgtggtttagagagctttgtggtataaatactagtttttgttgttgggttttgttgtgttctgagatattctgagctggagatttagtgccaagggtctttgatgttgtttttctagatatttataaccctaaataatggcatttgaaatcacacatttttatgttttaaaacaatacttaaaacaaaataaatgatcttttgaattcattactactagaaaatgattgtgattttctttgaaacacgcacatacaccatcaacataaatacttgtctaatttaaaaattctgctttctgtttaattctttattttgacttctgcagatccataacagaatcttattgcttaacttctgaattgtattcattgtagtattttcatccctatctaactctgtgaagaaaacagctttttttctgtactcgtcttaccacaatcaacacagaagactgctgtgaccaaatgggtggggggttttcccgatatcgcaatcagttagttgtctgcaacagacaacagctgggtgtcctcccaatatagttctgatactgtctacatggagatagctccagatcacacaggttgagggctcagtcccacaactgtcctccactcccaatgatgccagccacaagccccaggttgttttacccatgcttctgactgatcagctctaagttggggttcccacgatcccctgtttggatcagactaatttactagagaggctcacagagctcaaggaaacactgatgtttactagtttattataaaggatattacaaaggatacaaataaagagatgcatagggcaaggaaaggggggagggtcgcagatccccccccaccctccccaacccaccatcctccaagaacatccttgtgttcagctatccggaagctccctgaac

SEQ ID NO: 10866 - DNA, 1021 bp, Homo sapiens
catctgtatttaactcctttgtagacatgaatttctatcaaaatgttctttgcactgtaacagagattccttttttcaataatcttaattcaaaagcattattagacttgaaagggtttgataatctcccagtccttagtaaagattgagagaggctggagcagttttcagttttaaatgagtctgcagttaatatcaaatgtgagtttgggactgcctggcaacatttatatttcttattcagaacccttgatgagactatttttaaacatactagtctgctgatagaaagcactatacatcctattgtttctttctttccaaaatcagccttctgtctgtaacaaaaatgtactttatagagatggaggaaaaggtctaatactacatagccttaagtgtttctgtcattgttcaagtgtattttctgtaacagaaacatatttggaatgtttttcttttccccttataaattgtaattcctgaaatactgctgctttaaaaagtcccactgtcagattatattatctaacaattgaatattgtaaatatacttgtcttacctctcaataaaagggtacttttctattaattggtggtcaagtatatctgtgttatgaagttctaaaagctaatttagcattgcaaaataacctcatttttaaaaaattagccttatatgcagtgttctatttatcaaatgatcttcacatctttcatttccaaattgttgaaatgtactaatgaatacaaatagacttcaagtaagcaaaaatgttcttaattttgaaaactgtaaaataaagtcacttaccttgggcaatatgctattttttaaaaatcagactcccagtttgtatattatgttattcaatagacattttctgagtaccccttgaatactaaaagtcctgtgttgaatgtgggagacccaggagaacaagatatgtgccatctgctcattaagtgcttagaatgttaacattgcttttaaattcttagccgtatttccacataactt

SEQ ID NO: 10867 - DNA, 1750 bp, Homo sapiens
aatgcaattcacattggactcttttccctgttgcagtagtaacagaatacaatctgtccttaacactttagtcaccgattttgtgtgtctttgatagcagtcctcatattcttacaggtttaaatgtaagtcagaaggagtgctctcctcgaagctcgaagtttcattgtgcctcattgggtaccctgctcattcttcaaccagtcactatggcaagaggaacatagtgcttgtattgctacagtatagcttcatcttccactcttgaaaccagcgatggagcccccgctgaaaaacatgacaggttcatcaagaggaaaattggagtacaattaccaaaagtgagggggaatagattctgttggtcagaacccaacaaccaaccattacagcaggcattggggattttgctatgaaatgattggaaaatatgtatatatattgaccaatgattttcccatttccacattttagcatttgtacaaaacttcttttaaaaaaagactctagtatcaaccttttctgtaccaagtagttttatttaatacttctagactagagtgtaaactcattgaccacagggataatgttttatacttcttcaagccacctgtggtatctgtcactatatcaatggtggcgattagaagaaataaaattggctgggctcacacttgtaatcccagcactttaggaggccgaaggcaggcggaggccaggagttgaagaccagcctggccaacatggcgaaaccccatctctaccaaaaatacaaaaattagccagttgtggtggtgcatgcctgtaatcccagctactcaggaggctgaggcaggggaatcacctgaacccgggaggtggaggttgcagtgagccgagactggaccactgcactctagcctgggcaacagagcaagactctgtctcaaaaaaaaaaaaaaaattttttttctaaactagcaaaatgaatgtatttctaacttaacagtatcatgtaacaatgtgaatttactctgttcaagttttgtggctatgtgctatttgtcatcctttccaggcatctggagagattaggtcaaaaggtaatagaagggaccagcacttcttcctccatgaagcctttactgatcccctcagtgaaaagtaattgtgcctttgttttcccatacatagctacgtcgtttgtaccttcatttagtgcatgccctatgcagggagataagatcacagactctgaaatcaaactgtggatttgaattccagcatcaccatgtgttaactgtgcaaacttgggtaaatcgcttaacctctctgtgcctcagtctcttcatctacaaaatgtactgaagtgtgtgcctcacaggcttgtggagggaattaagtgagataatgtacgtgcagcccttagaatagtgcctggcacatagtatgtaatctgttattgacattttcctcttgtttagaaggtttttactatcttccatgcttgtaaaatgggaaactctcccattgcttgtaaaacgggaaagttgtaatgatctttaaaattatttctggtgctaacattctttgactttgaagagttagtggaaagatgtctttattctctttttcagtttcagtggccagcagactttttctgtaaagggccagatagtaaatattttaggttttgtaagccagatcgtctttgttgcaatcactcagctctactgttgtgtatgttgtgaaggtggccatgacaatacat

SEQ ID NO: 10868 - DNA, 1081 bp, Homo sapiens
gatgagtagaattaggaatttgttaatcagcaaataatatttcttgtttattcagtaaatataaacataactacttttaaatgggagctatctaatgtttcccaaaggatcttgcagcaagaaagattccctagataataggtgtaccattttagaaaaggacgatatcctgtggatttttaaaatctagcttattcttatgaatgacatttttgattcaaaataacttaacgtttaagtgtatttttttaaatgaaagctagctaagataattataatttaccagaaatcctaaatatgtattgctaagcagcacaagagagaggttatagactttcctctggataaattgaattataggagaatcttagagtagtatcagacaatatatgttgtaatttttacctgtagatagaatcctttctattgtagaaaataaaatactgtgtctcacctttattgggctatgagaaataaaatgagctttgttttaaagcatcatgattttaattcgacagtcagttttcttacttggaccttcagaaagtcaaaagatgactcgtttgtgatttggactgtctacaaggtcaattattatgaaagatttctgttttcttcactttttaatttttcccttcttcctccaatcctttttttttttttttttaaggtgaggctaatctcagaaagggcctgttcaaagcagacgctgtcttctttaaaactggattgcaaaatggaagtcagtgtatcagacaagctagcagttgtagatgaatggagaaaagaaatgggcctgtgctggaaagaagtggcatatcttggttggtatctttttattcacccatagtaaaatggaccaggaattaattatttacttatttttaaagaaatgacaaagcacatcctccaaatgggtatgattgtagggaaataggaactcttttaacaaacactgctgatcaaactgttaaactgggacagtctttctggaggttagtttgataataggtatcaaatgtagaatgattattagcacaagctgtgaagtcagactgtaccactgattagccagttgtga

SEQ ID NO: 10869 - DNA, 1064 bp, Homo sapiens
ccctgtagaacagacataagttggagaaaaaaaaaaaaccaccaatttattttaaaaactttaaattaatggtttattttaaattaaaccattaaacaaaaattaatggtttatttattttaaagctattaaaataaattaatggcttattaattttctttacatcttgtcctagttttactctcatccttccggttttcctgctattaagtttattttttcccactcctttgcatttacacatccacaaaggttctaaccccacttcttgttctttcccaggtatcacatctctattcaaggtttcagcgacaatctccatgcagacgaaactcaaatataatcttcaaccccaatactctgttgtgagttctagtcacatctcaaattcttcatattataggccaggctcctggacttcatccctcaagttgctgattttatcattattaaaatcttacagcttttcagtttctcctttttatctctattcagataccaaagcttgagtttgatactactaacccagtgtcctttcaatttattcagtactgtcaccagattacttgttcagatttttgctagttgttaacctttttgaaatcttttagtgactccatgctgatgaccacagaataaaacatacttcaaacgaaacactgtagcctggtcacaacctaatatttccagccgtcgttcctacaagttattgtgggcctcttcaccccagtcatagcttattctcaagtcctacctttatcagcatgaacaattcattcctcaaaaaacttctgctaaaatacctccaaaatcaatttctctgtatgagtataaaccatattggagtccttgtttcgtttcaatgactccaagccaagtacaaggagataattcagttctcactgttacaactacttcctgtgttcctagcagtaggaaatcttactcaagaaaatatcacatgttcagctccaatatgtaaggaacttagaagttgccattcccatccttacatccagaaaaactggacaaactggattttgtcccatccttacatccagaaa

SEQ ID NO: 10870 - DNA, 1029 bp, Homo sapiens
atgcatcgctaggtcggttcttaggcagcaccacacacattgttttgtttgagtcgatatttctgaattattaaagtcgtcttactgaaattaatacctgatactagaaggagcagtggcttgtgactgtttccttttcatgagacaccgtgttgatagagaaaaaattgggaggaaaaaaatccctgagactctaggagttttctaataagttggaagttatgatttccactacgtgattttttttgaatactaatctgtttttagctttagtttcaggaactagatacaaaaatagatctctttttctccttttcccttgcaaacaaaaaaaaacagtaattttcaagattgggatatttgggatttgttctaaatctgagcaataatgtaagaacattcatttgaattagccaaatcatctgcctcgttttgatgactaatttattcaccaatatttgttgatttatttgctaaattcttcgctaaactagccagccacccacacaaagatgaataaaacatgagcagtgcctagggcccagaacagttcctgacacttgggttttcatgtgttagtttcagttcttattacctagaagagtttttaagcagattattttaaaggacccgtatgttttggagaagaaacttgttagacaacaaattttgaaatttaagggagtatttgttagccgagaatataggaaatagtgaatccaaagtgatttttatgtcatttaaaaaatatatttcctttaaaggaaatgtgtcttccaaattgaaattcagtacttgtttagtttatcaatttgtttgtattttattatataagactctaaaatttattaagatgatttgttttctggcagtcacttatacataaaacattattaattaaaaagtgctacttcctggtaaactctagtgttggcagatcagttacttttaagcagtgactttaaagtttaaagctttgaagactggaatttcctttgatgtatttgtctgtagaatagtaataatagc

SEQ ID NO: 10871 - DNA, 1024 bp, Homo sapiens
tacacaaactgcgtcacatctttttggggactgagcataatgtggaaagaggatggtttttgaatattatttccagccatttataacctttggcaagttttaaagtctctataaaatggtattaccttggaaagtagtcatgagaattcaatgaaatacctacaattacgcatcgcatgttttggtactacgttcttccacctctcatttccaattctcccatcccaactgagagaattgtgagctcctaaaattcagtaattctgacatgtgttttttgtactagctgtaatgctagttttcagtaagagtccttgtacaactaactgtagcacaaggtaggcatagaagaacgtaggacagaaggcttcatagaggtgggggtacctgagctaagctttgaagggtagatgagatcagattgaaaagggaaacatttctgagcaaggaaaactatctcacaaaggcaatgaagctagactttgagtagcttactcatcatttaggacatcatgggaagccactggatatttttctttttgtattttattttattttattttattttttttgagacagagtctcgctgtagcccaggctggagtgcagtggtgtgatctcagctcactgcaacctccgtttcccaggttcaagtgattctcgtgcctcagccacccaagtagcttggattacagatgtgcgccaccatgctcagctaatttttgtatttttagtagagtcggggtttcaccatgttggccaggctggtctcgaatgcctgacctcaagtgatccacccacctcggcctcccaaaatactgggattacaggcatgagccaccgcacctggcctggatatttttaagcaggtaaattatatcatgtattagagaagtgacaggcaacaatgtagagaagggttgtttgagggaaatgttttaaattgggaaataatgatcactcaggacattggttttgaaactagtggttaccatacattaataggatgccaaatcaatatagt

SEQ ID NO: 10872 - DNA, 1054 bp, Homo sapiens
aatgagttgatgcatatttaattttttaaaaaaattgttataaaaacataaaaatttattatcttaaccggttttatttggtgtgtgtgttattgctatctagctcatatccactgtagtttgagatgatactctaagtgattttcatcctttgatatttgttgaggcttgctttataatgaagcccatagtcaattttggtaatgttttgtgtagtcttgaaaagaatgtatgttcttggccaggcacagcccagcactttgggagcctgaggtgggcagactgtttgattccaggaattcaagattagtctggccaaccctgtctctacaaaaaaaatgcaaaaagttagtggtgatgcatgccttagtcccagctactcgggtggctgaggtgggaggattgcttcagcctgggaggttgaggctgcagtgagctgtgattgtgtcactgcactgcagcctgggtgaacagagtgggaccctctctcaaaaaaaggtaagaaaaagaatattctgttgttgagtgtagtgttctgtgtatgtcagttaagttgaatttttaattttgttgtttagagctcttactacataatgatttttctctgctaaaaaaaaatgaggtcttggaaaaaaatagtgtcatctataagcattaaaaaaattaaaaatgaggtcctgaatggtgtgctcaaatttccaacatttattatgggatttgtttaattctgtaagtttttgctctatatcttttgaagctgtattgttggatacatgcacatttagaatttttatatcttcttggtggatcaatcccttagtcattataaaatgtccctccttatctttagtaatatttcattaaggtctattttatttgatatgagatagctacctcagcttccttctctatgtcttttgtaagcagcatatagagttgtcctttcatatccatgacttctgcatccatggattcaagcaactgcagattgaaaatattaagagaaaaaaaagatggttgtttctgtactgaacatgtgcagatattttttctt

SEQ ID NO: 10873 - DNA, 1028 bp, Homo sapiens
tctttgtgtatttcagtataaatttgtaaacataaaaagttattttttttgcgtgatcacagcaccattagaacactgagcaaaattagcagtaatgtctaagtactgtttaatagtcagttcataataaaattttacctcaaaaagtatttttatacgtatttgtttgagttaggaaacaaactagatccatgcgtttgtatgtttcataagcctctttaaactagactgtatgctattgactatttattggtggggcgtttgtgtagaaagacctacattctggatttgtatattttttgttgttcttctttgtggtgttttttaatttttaattaattaatttatttttttagagaagtggggttttaccacgttggccagggttgtcttgaactcctgaccccaagtgatcctcctggctcccaaagggttgggattataggcatgagccaccatggccagccatgtggtgtttctttaacccctatattttcttaagaataggaagatctggccgggcgctgtggctcacacatgtaatcctagcactttgggaggccgaggcgggtggatcacctgagatcaggagctctagaccagcctggccaacatggcgaaaccccatctctactaaaaatacaaaaattagccagacatagtggcaggcacctgtaatcccagctacttgggaggctgaggcaggagagtcacttgaacctggggggcggaggttgcagtgagccgagatcgtgccacttcactccaacctgggcaaaagactgagactctcaaaaaaaaaaagaggaagatctagaaccttgattagatttcaaatcataggtagtgcagtgtatttcatattgcatcacatcagaaggtataacatgtcaggttgtttcgtgaaatcaggaggtgacagatgactcctaccattataaaattacctatcaatctttcatctaatggttttattcattgaagattgtttcctgaatactttttctgttgtatcctccacatttgtc

SEQ ID NO: 10874 - DNA, 1027 bp, Homo sapiens
ggcagactgtgagaaatggcaggtatcaagaaagttatatagaaatattgaagacagaatgtataattaacactttggatcaaggaaggcatgttatatgaattaagggcaacatgttaacattagtggttctctttgtttaaatatagaattaaaattatagatgttagataaaattgtattcaaagatggttcttttatgtgaagaagttggtgttttctttaattagtatttaactcatgattttcaatttatctcctgttctctaaagatagataattgctttttttcccatttttaaaaaaaatttttggcagctcttcacagatggaatcacaaataaacttattggctgttacgtgggaaacaccatggaggatgtagtcctggtgagaatttatggcaataagactgagttattagtcgatcgagatgaggaagtaaagagttttcgagtgttgcaggctcatgggtgtgcaccacaactctactgtaccttcaataatggactatgctatgaatttatacaaggagaagcactggatccaaagcatgtctgcaacccagccattttcaggtacattttcttttctgaatttttccttttgaaaaatagggcatttaagtgcattaaggaaatattttttaaaattgtctttgtttgagcaactatttggttaacttagaaactttctttagctagggtttttgtttttgttcttgttttccctaaaaagatagaagtaaatttctttatatttgcagtttatcatcgttgactctttgcaaaggaaaaactacaagatgttttggattaaccggctgcagagggtcaaggcttctgcttagttttttctagttagtgtttgagttgaagtgttatacatttcttactgccgattgcttattacttaattgttcatgttttcagagttcttgcctattaaaattttattaatttggttaacaattctttgttctttacgttgttcattatttaatttaatatattatgttttctataaa

SEQ ID NO: 10875 - DNA, 1053 bp, Homo sapiens
tccttgtaactaaagcagagagtaaaacatgattgatctatttcagtaacctcaaatagaaacagtaaaataattatagtttttgatcaagaacagtgaaggtttgtcaaggctgactttggtatttgatacaatgttataaacatgttttcagtaaaaatatccttttctatactttttggttagatctacttacttattatttctttcccaaatgccaaagcctttgtttattttttctctacttagatctttttaaaaatatattttttattgatatatcatagttgtacatatttttgtggtacatgtgatattttgatacatgtatacactgtataatgatcaagttagagtaattggtgtatctatcatctcagacatttttttttgggttgggacattacagttcttcttttctagctattttgaaatatacaataaattattgttaactataatttccttgctgtattattgaatgctagaacttattcctctgatttaactgtacgttcatacccattaaccaacttcttttcatcaccccccttcctagatttactcagaatatgtataagtgatactaatgtaggcatatacacatttcataaaaagaatatactgtgttagaaaccaaacatcaatactctgaattctttgacagctggcttgtaataagtgatacattgaattgccccacagttttgcagaggagaagcagagtggaggccgagaaagtaagcaaaagaagatgacactgaagaaccctgtatgataggatattgttagttggcattatgaatagtaacatttgctatttaatttgtttcgctgttaaatttatttcagactgtattctaattcctatggcatttcttattgttaagcaggtcttagtcactataaaacagaaaatatgaaaagaaaagctaagggagggaaaggcaagttttgattaacaaaacgtctgagttacacatgattttaaataggagtgtggttttatttttttcaaatatgtacggtgaaatacttctaaaataccaagta

SEQ ID NO: 10876 - DNA, 1025 bp, Homo sapiens
catagctgtatgcttatattatgattatgacgaaggtatctcatttgaatgtaaaaggcttatgtttatgtttggactagtctgggggaggaagaagaatctaaactgtccttgctgtcttagtaatttacagtttgtgacacagtaaccttgagggaaaaataacctaaatattgtacaaagaagaacagaaaaggctttcagagaaagtacaggtagttgattttgggcatacataggaaattagtatgtttcactgtgatcacatttgaactgaactttgaaggacaaggtagcctgtaggaggtgaggaatggtataggtaaagacaatgagctatagtgcctgacgggtaattccacttatggaaatttatcattctctgttttatttgagcttttttgtagcaatcagttattacggacaccttcagaaaattttttaaaattcaaaagtgtttagaaattttttcaaatttcttatcagatatttcttagaaatttgcctcttgtcaagaacctggctgaagtttaatgacaaaccatccagtaacagacataatggaagaaatgcagtttcaaatcaattgttgcaagtttatcaaagagcatactgagggtaccgtagtggaactggcaccttgtgggttgtgtgcatgtacagttggtagtgttttcttttggaaatcaaaaggacaatatataataactcaaaagaaagttatatgctgtatttctggcagcaacaattaaaagtctcttatattcagatataactaaggtacctcaacacaaaggagaattatgctactgttgaaatgtaactttttgactattgtctaatacatgcaaaatggctgatgcagggcaacaggaaaaaatcagcttaaaaaatagcttaactgtggctacaattaggcagtaatttgctcatgcaaaaactcaaaggggatatataaaaatgaaatactatgggatggtaagattaaagattatttttcgtttcaaaatatttttgttattgtt

SEQ ID NO: 10877 - DNA, 2053 bp, Homo sapiens
cacagtttacattagcgtacactcttggtgatgtacattctgtgggtttgggcaaatatataatgcatgtatccactgttagtagtatcatacagaggagtttcactgctctaaaaaaatcctctgtgctctgcctattcatccctcttttccccttaaccagtggcaaccactgatctttttactgcttccacagttttgcctttttcagaatgtcatatatttggagtcatttaattaagtagcctcattagattggcttctttgacttagtaatatgcatttgtttcttccatgtctttttatggcttattggcagatttctttttagggttctgaataatgtttcattggatatgcaccaaatctattttgttcattcaactactgaaggacattttggttgcttccaagttttagcaattatgaattaagctgctataagaatccctgtgcaaattttaatgtagacatacaaatttttaactcctttgggtaaatgctgacgagcatgattgctggattgtatggtaagagtatatttagttttgtaataaaccgccgaactgtttcccagaatggctgtgctattttacatttccactagcaatgaatgagagttgctgttgctccacatcctcaccagcattgggtgttataagtgttttggattttggccattctaatagatatatagtggtatcttactgtttttgtttgcatttccctgatatgtgatatggaatatcttttcatatgcttatttactcatctgtgtatctttgatgaaatgtctgataaggtatttggtccatttttaaattgggttgtttgtgttcttattgctgaattttaagagctatttgtgtattttggataataatccattattggatatgggttttgcaaatattttcttccaatctgtgctttatctttttattctcttgacagtgtcttttgcagagtagaaagttttaattttaatgaagtccagcttatctgttcttcctttcatggatcatgcctttggtgtcatttttaaaaagtcattgccaaatccagggtcatctacattttctcctatgttatcttctcatggaattttagttttggattttacatttaggtctgtaatccattttgacagaattttaatgaagagtgtaaggtctatgtctagattcatgtttttgcacgtgaaggtccagttgttcagcacaatttattgaaaagtctatcttttctccattatatttcctatgctccttttcaaaaatcagttgactgtatttatatgggtctgtttctgggttctctattctgtttcttcatctgtttgtctaatcttttgcagatatcacactaccttaattgctatagctttatggtaagtcttgaaatcaggtagtgttagtcctccaacttgttcttgtctttcaatattgtgttggctattctgggccttttgcttctccttataaactttagtttttacattttaaaatggactttttaagaatttatttttaattgacaaataataattgtgtatatttgggatacagtatacatgtaaactttagaatcagtttttcaatatcacaaaataacttgctgggattttgataggaattgcactgaatctgtatatcaaattgggaagaactgacatcttggcagtattgagtctttttatccgtgaacatggaatatctcttatttagttatttggtttcttttatcagagttttatagtcttcctcatataaatcttgtacatagtttgttagatttatacctaagtattgtatttttgggggtgttactgtaaaaggagtgcattttattttcaattttcacatattcattactggtatgtaggaaagcaattgactttcatatttttttaatcctgcaagcttgctataattgctcattccgcgaggtttttttggtccattcttttggattttctccatagaaaatcatgttatctatgaacaaagacagttttttttttttcttacctcttattttttttcttgtctta

SEQ ID NO: 10878 - DNA, 1032 bp, Homo sapiens
aggattggtgaaaagtgatgttctttctttattcctgatcttagtgggaaatcttcaaattacgtgtcattaagtaggatgttagctgtagttttttttgtagatattctttatcagattgaagatactctctctttattcctagtttgctgagtttttatgataatgagtgctagattttgcaaaatgctttttctgcacatgtcgataggttcatgtgatttttcttttttagtctgttaatgtattggattacattaatgaattttcaaatattgaaccagccttgtatacctgagataatcccacttggtcacagtgtataatttctttttatatattgttggatttgatttgcttgtgttttgtgtcagcaaatatattatataaaaaataaacatttaaaaataatcttttaaataaataggaaatataaaaatgtagcattttctgttgtatataatatttgctagcagaaaacaattgaggtatacttgattaaagtgtttttaagaattctttttcaatgagcattttatttagttaataaaaatttgatttgtttatagttgttctgaaaaaatttgattatggtaaatgctacataaaatttaccattgaagcagcatttttatctggggtaatacctgaggttggttgttccacaactacagaaaactaggatacagacaaccagagtgaggttaagagtggaagtttaataggcaaaagaaagagaagagctctctgtgcagagaggggtcccagagaaaatgggttgccagttctgtggtgtaatgtacagggttttatagattaacttgaggaggcagtgtttgatttgcagagggcacggaagattggtcggaccaggcgtgccttttgcataaagcatgtagaagctggtggccccactttaatcttttattatgcagatggttctctacttggccagtgccatgttgcctgcctcttttactagacacatggtgacaaagaaaagggaagatgaaggctccgttgtgaacatac

SEQ ID NO: 10879 - DNA, 1037 bp, Homo sapiens
ttccaatccatgaacatggggtgtctttctgtttatttgtgtatttaatttttttcagcagtgttttattattttcagtttacaagtctttcacctcctcaattacggttattcctgagtatttatttcttttcgatgctatcgtaaatggaattgttttcttaatttcctttctagattgttcattgttagtgtaaaagtgcaactgatttttgcgtattgattttctgttctgcaactgctgaatttgatttttagtaaaaactgtaaattttcttaaaatcattctttacaaatttcatgctttgttcagtccttatttataaaaaattttagatgagtatggaacttgtgattaggccatagttaattttttaaatctcttcacagagcctagtttttaagtatataggtggctgccatggttacaattgaagtgtacttatttccatgagaagatttgtgttgtaaatcaacttccttcctttctgctatgatctgaatatttgtgttccctcaaaaaccttttgttgagacctgattccaatgaaatagtattaagaggtgtgtccctttggcaatattagtcatggggtagagctctcatgaatggcattaatgcccttataaaagaggcccaaagaaatttacttgccccttctaccatgtgaaaatgcagcaagaaggtgccatctgtaaggaacataactatgagaaagaaatttatgtcatttataagctaccttgtttatggcatttttgttaaagcagcctgaaaggactaagacactttacatgttaattttgttatataaaagataaaaaagaccagtaattctgagacctgtagatactggcttgaattctggagtgtgagaagaagatgatgtggctttattatcaaagaataggcagtattttaaatggatgctcatttggtttttgtataagaaaacattacttttgttacaattattagtacatgagattattaaaaatccaaaatagattttaatccacctgacaataaacctaat

SEQ ID NO: 10880 - DNA, 1056 bp, Homo sapiens
ggtcttagggaaggtcattcaaaatgatttagtttataaaaataaatgtttatttactcatttgtttgagaggtatgaaccaaagtacacatatataaaaaggttatggattttaatattttaatgtattagattaaagatgaggctaatactgttgcttgaggatgataatttgacaatttacagtggcataaaggagaaagaatttattggtacttgtaattgagaatactgagttcaaacatggggtaaatccagggactgtaacaatgtcattaggaatatcactttattctgtttattcttttacctttttttttttctcacaaactttccttaggactatccataatgataatcagtaggtttctctaaccggtttaaccaccccagggggaaaattttcctaattttctaatagcttcaaacaaagttgatagcttcaataaaattaggattaagtctctggcttagcttgggtaatatgtgctgaaccagtcactgtggcctgaatgatagaatgctctgagcaagtcagggtcatatgttcacttactactgaagtgagtgatgcagttaggattgagatcagctctgtagtaatgacatgaactaaaagtaagagtgatagaagtttctccaaaagaaaataaggactctttagttactaggaatgagataaaaacaagaatattcacaatagtatagaaacataataataaaaatgtgttatttaatgattgatacaatactagattctctgtgggccttacttaagtggctttcaaatgtttttgcatattaaaatcacttgggaaggttttaaatatctcagtgtcctggctgcacaccaggccagttaaatcagaatttcgttagtacctaagcctgtgtaatttgttttgaagttccttaggaaaatcatgctaacaagaactaggtagacagatctggtagagtcaaggttcaaaaagagggatttcaggggacagagaagttcacatgggagaagcaggatccaatggagagaacagaggggcctcaaagagagagaga

SEQ ID NO: 10881 - DNA, 1033 bp, Homo sapiens
aggggtttctgggtaaaacaacctaatgattcttgctgaagatggccagagtaatcagagtaattaatttggggaatggtgaaggataaggaacctgatcagatatcaagggtggggatactcttgctaaactgactcagtagggttcttgctaaaactggtttttacaagagagagcacaggtaggtctacaagaagattcgggagactgactaaagtttcatcaagaatctttgtcaggagacatgacctttatgatacttaagtttttctttttatgcggttttgttttaaacaggctaatagctcgtcagcttgctaaaatccatgctattcatgcacacaatggctggatccccaaatctaatctttggctaaagatgggaaagtatttctctctcattcccacaggatttgcagatgaagacattaataaaaggtaaaattatttttacatttgaaattatgttttacattgctttgctctatgatagggtttcaaaggtaattgtaaagtttcattgtataaaatctggttttctttctttgcattgaagtaaagtaagcattgattctttggctgtcagatagcactacagaaataactgcctctccatccccctcagtgtcccctcccaaaaaatatgccctacaacagcaaggggcagaggtggaagtaggggaacaccacttaaaaataaagagttaggtggtaatggtgaagcaagatttttcttgactttttaagatactgcagggttgagaggcaagtctagtattatatagaataagagcacaagagcctggagccaaactgagattaaatcttagtcctgctagttaacatttctgttgtgtaactcattcaactagggaacttaacctaactgtttccttatctataaaatggaaattacagtagtagtatattaaccatatagagtttttgtgaggattgagatagtatatgtaaagttctttaaaacagtgcctggtcatcacttaagtgttgaggtagctgctgttttaaaaa

SEQ ID NO: 10882 - DNA, 1053 bp, Homo sapiens
tgttgagatttctatctcatgtcttgatgttctctcagaatgtttattggtctcatgacttttggtgactttcatttctcctgctgtccccatttcttcataaaagctcatgtaaatacctaatatttaactttaaatttcagtaatggcaatcactgtttattttctctgtcagcacaatacaagaagctgatttacagctgtttaaggaaatacaaatgagtggaagaaaaggaaagctttttctgggaattaaagagtaaatcaggttttgttttattttgctttgttttaagagttctatacaatataaatagaaaatgggtgagtccccatagtcacttgtttggctctaaatcttatccattctattattactcctgagaaagctttgtagttgtcatgttactcatgttttaatgactgagaagagttttttcattggtacttttaaaaaatttaaataaatacaaattgatttttgtgtttggtaaactatgttttctagggtggtgtttttaaatgtagtttaatttttaactctgttttaatttgtattctcaaccactagttagcagaaaataaaatatctgtaagtcagataataaaaaacttaaatgaactgtaaaaacctgaagttatgaagaaagagtgacctaatataggtactagtttgtttgttttttcattcattcattctggcccactgtgttcagtcttgtacttgaataaaaatgtcagaaacaccacacttttttctttagtttttcatgcttttttgtcttttcccctcccccagcaaacgtgttattgtgtgtcagcattttctgcaaacttcattttttctactagcatttaaatatttcctgtgtcctagggattgctctgtggattgcaggataaaagagggaagggaccctagtgcccctccaggaggctgtgtatcttgtagtggaggagtccaatcactgaacagatacttacatttagaatgatgagtgctctggtgaaggggtacagagtactacaggacaccagcgtgaagattaaagg

SEQ ID NO: 10883 - DNA, 3335 bp, Homo sapiens
aaaatatgcaactacaaatttatcctctgagaaatcttctgaggagtctaatgtattccaaatgacttaatattctcagacaaatgctttaaaatacttggattatctcaagatttttgaagctaataaagtaaatagaaacacaggccattttaaatggtaaattctagttacataaatataatcttaaagtatgtttgtatctgtaacagtgttagaccagatttggtttctacctccccaatgttataaatgttcacttttgtttttataaaccatattactgtaagatcaatagaactttgcctagttaagtgaatggaaccaattaaacaactagtagctttttataatgttagtgtgaacttgaaaaattgtttttggtggaatttttgtctgtggttagaacattttcataaaacagataaagaatgtgtaatactcttaattttttttttttttttttttttttttttgctttctgccttctaaagtgcaacagtatatatcttgtagaactgtgggaggagagaagataatttttctaccttactccatattcttacttcaaactattttgaatagaggttcactgagccattgctgatagactgtgcatagctactagctgtcacactattgtaggttttttggagagattcatagggaagtgaatgtaaccaggaataaaggctctcactttagctctgggactatgcagtggatcttgggaacaaaataagatatctaatctattttccccattctggctagattttggttgttgtgatgctcctacttcctgtataggtttttgggatcatggtgcaggctagtaataggattcagaattgcttcccttttatatcgaccatgtaagggattctaaaggagggtaaatctcaaagtgctctgaaatcatccctctaaaatctgtcctgtggtgtgctaagatgtctgttgcctttttatgttaagctaaggaacttgaatgccttacctaataactcaactagtagtaagctcattttgtaaatatgaaaatggctgtaagaagtggcattcatgtatattcaatgttagtcaatagaccatagtggcctggatgctttaacaagccaaattccgcaattttttttccttttttccccttcatacttgtatgatctcacctgaccagtgatttcttttcctcctaaccccatgctaccaccattttctggaaatcaaagagatgtggtagtaaatcatacagtacacacgatcatctgagatcaatatgagcacaaaactcatcaagtaggtctgcctggaatgtatataaaaaatgtaaataaaaatttgtaaattagtgtgaactgtatcttgcatatgagactgtgtattgttttgcattctcttcccttttgtagaaatttttctgtaaggaaatgattcagcttgttggttttagagtaaaaatagccaacagttgtggctacacagtgagatcacaggaactggaaatagggtttgtcggctttggttaatgtcagtactcatttatttagcctctcagtgcttaataagacttttctttattttttagttagccgttaggttttgtgaggttagattcctggaagcagtgaatttatacactgttatattaatagagctccgttctttgagtcatgattccaagctaaaggaaattaaaaatgtaatttaataatttcctatttttagggttgttaatttttttctacaaaaaaaccttgaaattttagatatcccaatgtgaatctaatttccatatatacagaaattagacaaataataagtctttagttcaacttaagcatatctcaaatgacttctctaaatttaaagttgatcatgataggatcataaaagacagaaaagacttaagtaatcttgtaatgacaattatttccatttttgctgaactaaaaatatttaacttcataaatatgttactacagcttccagatttaaagaaaaaaagtttcccccactctcaattaaaagttagaaccctccacttttaaaattatacaaatatttcttttttacattacacagaagccttctgtaccattttacgaatttctgtcttcataatataagtgaaaatactgtcatttcaattttctgctttaaattgtttttaataagcattccaaagtgatacagacttaagcttttaatcaatcagtcattcagttgatagacaaagttagcgatgctttatgctaggaaacttgttgacagtaacctgtgcgactttatgcagaagacaaatgctagtaattattatgcacagaggaaaaatcattttaagtatgtggtaaagcagcttcatctttcaaaattgatttgctctggtttttctttagtccattagattccagaatgtccttttactgggaatttagttatgtattaagataacctgttttcagttctttttgaaaagaagacattatttatattgaaccaccttattttaaaatttttaacttttatataccacttgtgtgattccagtgtcatgtcttgggtttgatgtcgttggacagaaaagtgtatcaattattttaaatgaatttttccccatgtttgaggcttagtctgtaaatgtgttgctgtaacagaaaatacttgggtatgcattacttgaatacttgaaaactgaaattaataagatgtattacataatgaattagatttctctgaacagtttttacactgaaaatcttcatttctggattgcagtttgaaatggaatgaagacctgaattatttgggtagaaaaaattatgatagtgcttataagaactgtaaactgttttaaactattttgtgtttgacgcatcaaacttcaagttttttgtaagtttctctcctgaaattttctttctcttctatactttatgcacttactatactactgatgtaataaaagagcagggttaaaaatattgtatctgtattcattgtgaatcctgtagcttttctagttaacaaaaaatcgctttctaaaatactcttaatcccattgttttggttaacatcttacccatttgttgtatttcaaatgccattaatcattttagtacaacacctatgtttataaaaatttgaaaacattacatattgtatttaaaactaattagtgaagagtaagaaaaaaactagccaacagaattgtaggtgatgcattagttaaatttcaaaactcataataaaggaactttcagagattggttgaaacccagtggtatccctgtaaattagctcctgtgactggaaaagaccccaaaaaggcagta

SEQ ID NO: 10884 - DNA, 1033 bp, Homo sapiens
aaactttttgactgtactgtatttaggagcctttgtacagcttggtcaaatttccatgatatgaagtatttgagttttaaaatatactgttattaaaaggaaaaagacatggccattattccatgtgcttaaatgataatttccttattcagtttcagaagaaaaagaatgaaattgggtaactgtcattgcgttagctttatgttgaattgggaaattgtggcataaagcttaaattcgtgtttatcaaatgtgaaccatagtagtataatgctgctttgtatataatgtaagtgctacaaatagtctcagcactgaaaatgtattgatacctcttaaatgaatgcaacttttgatgtaggtgttttgctatgcctcagaaaatatctgtctgagaatttgttaatctgtttgataatgaagatacttcctgttttcttgtttcatattttcatgttcaaaatttaagttttacatttttactactgttaatttaaataaaatttgttctgtggataaaatgaggttggcagtgaagaaaattaaaaacagcctcattcatgtaactggttaagtaaaaatacattttcactatgtgttcataaacttttaatgaagctgtttgtctttcagttcaaatataagtgatgtttaggctttatttctgttaataaggctttttaccattgattaaatgaaggaatgtatctttttgaagagatttatattctgtaaataaaaattcgttgtaacaataaagttgagttctaactacagtgtattcataaattttattgttacttcaacttatttttgaggttttccttgtgaatatctgcaaacacaagactttccaaagttagtgtataaatgtatatgtggagtgattctttgaattctagttttttgttttctgtttttttagttttatatacattaaaaagttttgaaaaaatgtttacttttggaaaaatttggttgagatgagactatggaatattacataacttataaacatttctgtttacctagt

SEQ ID NO: 10885 - DNA, 1013 bp, Homo sapiens
tctgaactagacttttgacttctataaatgttaaaaatgggtggaaataagagagagaagaagggggagggagggagagaggggagcagagactgggagatgagctacgaattattacaagaaatgacaaaatctgaactaaggcagcaacagcagtatggaccgaaaagattaaatagatttgagaaatacttaggtaaaattgttggtaggaatgtaaacagtacaatcactaccaaaaccacttggcagttcctcaaaaagtcaaagacagagctaccatataacccagcaactgtaccttagatatacacccgagagaagtgaaaacatatggtcacacaaaaacgtgtacataaatgtttatagtggcattattcaaaattgccaaaaagaggaaatcactcaaatgcccatcaaatgaacagataaacaaaataaggtatatccatataacagagtattattcagccagaaaaaggaatgaaggaatgatcaacaagcaaaaacatagacgaactctgaaaatatcatcctgtgtggaggatgccagacacaaaaggccacgtctgtacgattctctttatatgaaataatcagagtggacaaatccacagagatggaaaaattagcagtttttagaggctggtgggagaagggattggggagtggctgctaatggatgtgggacttttggggtgataataacattctggaattagtagtaatgactgcacaacccttgtgaatatactaaaaaccatgtacacttgaaaagtgtaaattgtatgctatgtgaatacatttcaattttttaaaataacagagcttaccgacaggggatgagtacaaaggggagggcgaaggaaaagatgagtgatattgggcatgttgaattccctgtactcatgggttgtcctggtggatatgacctgcaggcatcttgatatacatacatgtctggtgctcaggacagaagtccaggctagagatagacttgggagtcttcgatc

SEQ ID NO: 10886 - DNA, 1058 bp, Homo sapiens
cagtccacctcgggggttcccaaactgtgatcctttgagtggtctggaccctgaggtttccgtagcctgggtgctcttgggttgggagagcaaggaggatgaaagcagcatttttgagcccctgttgggtgctctcgaagaggaggagtgagtagtttatctggtcagaattggaaaagtgaagcttaggctttctttccatatatttgcttcacaaaagaaaattgttccttttgttcctacatttccccactcctgattttctagtcaggaaggcatgagaagagagagatgcccctgcaagccagacccttaccctggtgcttatttagacctgattttaaaaatgttgagagcaagccctgagaggggcacaccaggtgatttgcctcgtgtaggccctctgtgcctgcaggacattcgcatcacgagtagctgccactgtggaggagaggaaagttatggttgggaacccttgttattttttttccaccatgtatatatgtccactggttacttgggtgaccttgaacaagttgccttgagctttttaacaccaataatatttattacccatttatttcacagacttgctataggatttagaaagctattcttagcaagtgtttttttttttttttaaatcacattcagatatatcacaaaatattgcagtgaactgtagggctgtccaaattttatgtatgcagcaaaatattttcttactcattagcatatgttttactctttgttttaaaaagaaatcagatgtaaatgcaggttataacaagaggagagctgtgatggtttgctaccaggttttatgtaggtaatatattttgtcactgttgttatatttggtcactgttgttagctatcattggctcgtgagtgctaaatcatgtttatccttatagtaattttactattggaaaatcgcttaagactaaattattcttccagatacaagtatatatgtttaaaagaaattgggattctctttaatggatagatattgggcagaaagtaaggttttacccttatttttgcttaaaata

SEQ ID NO: 10887 - DNA, 1080 bp, Homo sapiens
ataattttgtaaacaacattgagatcaagctcagccaaaatactaaaacagtgaatttgacctaaaattattagaatttgcaacatacttgctgttatcagtagtgtctaaaatagcactgatgggccaggcatggtggctcacaactgtaatcccagcattttgggaggctgaggcaggaggatcacttgagttcaggagttcaagaccctgtctctacaaaaaaaatttttaaaaatcagctgggcacaggattgcaacctgtagttccagctactccggaggctgaggtgggaggattacaccactgtgctccaccctgggtgacagagagtactattgaaaaggagactaaaaattatttgcagataataaaaagttcccaaggcaatcaactaaaatgtagtttagtagggttccactgtaaatcatgtaaatatcatgatcttttgtgtatgataataataaccagtttaaaagtatgaggaaaaaagcccattcatagtagcaacaaaaaatatgccagggattaaactcggtaagaaatgcaattggcctgtagaaaggaaactagtgaactttgctctgaagataatgaggagacttatgtttctggataggaagacaattctttagttagttttaatattttatattgatttgtaagttgaatataactccaagcaaaatctcaggaatttctcatagatcagtgattctgaattattttacatttttatagaataaataagagccaagaaatgtttatacggtaaagaagaataatgaaggaaaagttgtaatgctagacattaatttgaaaatggtatgattttgataaaatagacaaatatttggagcagaatggaaagctcagaagaatgttgtgttgataaaagtgccactgcaaataatgaatgtaaaaatgtagtaatacatatactagaaaagagtgtatatgaatatctatcttgggcttgggagaaagaagctactaaaacatagaagcaaatgttaaatggaataattcctatgtgtaatgatactaaaaattaaaataatttaattttgcttatatca

SEQ ID NO: 10888 - DNA, 1076 bp, Homo sapiens
agtacaagtgctcaaagcagcgttatttgtaatagacaaaaaactggaaatccaattgcctatcagcagtagaatagatgaataaattgtggtttgtttattcaatggaaatctctactgcagagagaaagaatggacgattgctatgcacggcaacgcagatgaaactcagcaaacataatgtaacgccaaagaaaccagacaacattacatatgatgcagtccgtttatagagtccaaaaacaggcaaaactagtctgtgatgataaagatcataataatagttgcctttgagggagggtgttgggactaggagaggggcttttcttgatcttcgaggtgattagacgagtgtgttcactttgtgaaaattcataacttaagatttctgaatttttctgtatgttatactgcaattaaaatgtttctttaaaaacctagttatctcaactgctaggcatgaacactgtcccaatactattcccagtcctcttctatctaaatagtcactattgccatgctgctacttcctcccactttgcagctcactaaggcaggctggagatttttgtgactgctggagtgatttttgccagtttgcttaacccatttcattccatgagtttcctggcagagattccacaagcaatctctgccaggatgactgcttgtagcagtgcttgagttttggtttttactgtgaaattgtaggacttaaatataaacacatagtggaagtcagatatattaatgaaatgcaaatatatttatgtaagcatagcaaaaactagggtttttccctccttaagcatgaagtttattttggaaagtatgttagaattttatacagttaattgattcagtagctgtaccctacagttgagctgtttatattatcaatgtactgtaggttaggttgtatagctcattcattctgactgctgatgactatgtcacattcatctacacctggtgatgtactttcaataaaggacagagaccaggcctaagctcaattctatatgtagaatactgtaaaatagagtaccactttaatcagtatcactgaaatttac

SEQ ID NO: 10889 - DNA, 1050 bp, Homo sapiens
tgggggccattttaaatggtgaaatcccaccaacaaaactcacaaaaaacatggcaccaagtagactgagaaaggacacatgttgacagtatgagagctgaaacacaaaggcaatgtcaccttgttcagtctcagctgggagcgtgtgtgtcagctaaaaactttcacaccctgtgcgtatccacaaataaccctgaaagcaccacaaatagtgatttttgggattacaaacaaatttttagcaactaggtaggtttcacaaatatggaatctgcaaataatgaagattggctgtaattcctttaagaaagcattgatcttgaggtaatatgtttccacaaatgcaaatgctcaattccaggaggatattatgacaataaatggttcttagctaaagaatacttgttccctggtagcatgttagtgaataagcctagtgcttcattgtaaaaactattaaaataatagtgatttgcatctggaaacctcataatgaagacaataactgaactatattaaaacctttgcagtagagccttctatctgcatcactgtttccatggaaaaatatattccaaattccaattggagtgtccttttgcttcctaggtctttagtctgaacgatgaccaatccaccacacgcacctacagtgtaggtcttccattttactctctagtctggttctggggctgggcatagaactgttggagttgatataaagatcagggttacagctcctagagtggagtattttgggctgagacgatggggttttccagatattggatcatgtcatctgcaaagaaagacaacttgacttcctctcctcccatttgactacactttatttctttctcttgcctgattgccctggcctgaatttccaatactatgttgaattaatgactcaatatatgactaaaagttcaaagtgaaacaatgataattcagataggaaaatatgtggcagtatgctaaagtctaaaaaggaatataaaacgtctgtgagatacctaacatcagatttatagaaacagaatagaatgt

SEQ ID NO: 10890 - DNA, 1070 bp, Homo sapiens
ttatgttgttacatgtcgtgaggggtttggtatcttcaagtaaaggttttaaaggaacctgaactagactcaaacttgaccctctgatgctaatcgaaaatacacaatcatcaaatggcattcttactccattttttaactattacatatcccattttgacaagttattcttaccttttttacataggtcgaactggaaggtacacccttatagagaaatggagagatactgaaagacacttagcacctcatgaaaatcctatcatatccttaaacaaatgggggcagtatgctagtgatgtgcagctcattctacgacgaactgggccgtctctcagtgagcgacccacttcagacagtgtggctcgaattcctgaaagaactttatacaggcagagtctgccccccttagctaaactgaggcctcagattgacaaatcaatcaaaaggagggaaccgaaaaggaaatcactgacatttacaggaggtgccaaaggattaatggacatttttggaaaaggtaaagaaactgagtttaagcaaaaggtgctgaataactgcaaaacaacagcagatgagttgaagaagctaatccgtctgcagacagagaagcttcaatccattgagaaacagctggaatctaatgaaatagaaataagattttgggagcaaaagtataattccaaccttgaagaggaaattgtccgtctagagcaaaagatcaaaagaaacgatgtagaaattgaggaggaagaattctgggaaaatgaattacagattgaacaggaaaatgaaaaacagctgaaggatcaacttcaagaaataagacagaaaataacagaatgtgaaaacaaattaaaggactatttggcacagatccggactatggaaagtggtcttgaagcagaaaaattgcaacgggaagttcaagaggcacaggtcaatgaggaagaggttaaaggaaagatcggtaaggtcaaaggggagattgacattcaaggccagcagagtctgaggttggaaaatggcatcaaagctgtggaaagatctcttggacaagccaccaaacg

SEQ ID NO: 10891 - DNA, 1391 bp, Homo sapiens
ccagccttttttttaaatcttcttcccacagctttcttcactgtgaactctttgctcttgccaacaccaatcacttcctaaacacgtcatctgttttcatgcctacctgcttagaaggtccattccttcacttttcaactgagggaactcacactgtacttctacaaagcttccaccagtttcttcccatagacatctcttaaatctatttgacttaacactccactctgccacctaccacatgcttgttttctctactagactcttgaggtctgtggcccttaatatagagggagccttggccgatattaattgctgtttagtacatctttgttgaaatgattctcaagaaacaagcttaaaatattcaaaaaactaatacgggacttcatttggtgtctcttattgttatatggctagatttttgtgcattgtgttttctttttaaaatgtcccgttcataagttgcttagtggaagagaatattttgtgtacttttaactcaagttggaataaaatacaatattattcttgatagaattacgtacatctctggaagaacatcagtcggccttggaacttataatgagcaagtaccgagaacaaatgtttagattgctaatggctagcaaaaaagatgatccgggtataataatgaagttaaaagagcagcactccaaggtaatccattctataaatgtgacctgaaatggaaaagagagacgattgattattctgtgttcagattttttttgaaaaaaatcacaggtatctagtaatggcattttaacatgatgttgaatgtttcatctttttaattgacattttctcctttttcttatttttccatttcttgttatatatcattttctgtttgatttataaactctcactgtttcttagaaactttaatttgtacgttgaaaaataaattttattttggatataaaggtaagtctggtctcttcaacattatttttgtagggctatatacttttaagaaatatttcttaaagggctgggcatggtggcttacgcctataatcccagcactttgggaggccaaggcaggaggatcacttgaggccagaagttcaagaccagcctgggcaacatagcatgactccatctcttcaaaaagtaaaaaaattagccgggtgtggtagcacatgcctgcagtcctagcttctcaggaggctgaggtggatagaccacttcagctcaggagtttgaggttacattgagctacgatcatgccattgcactcccatctagacaaccgagtgagaccctgtctcttaaaaaacagaaatttttttaagaaacattttttctaataaatttgtgtattgacttctcttgcaaaaacaaaaaataatggaaaccttttt

SEQ ID NO: 10892 - DNA, 1132 bp, Homo sapiens
agtaagtggtagagttagaaattgctccttcaggccgggcgcggtgactcacgcctgtaatcccagcactttgggaggccgaggtgggcagatcacgaggtcaggagattgagaccatcctggctaacatggccaaacctcgtctctactaaaaataaaaaaaatagccgggcgtggtggcgggcacctgtagtcccagctgctcaggaggctgaggcaggagaatggcgtcaacccgggaggtggagcttgcagtgagctgagaccacttcactgtagcccagcctgggtgacagtgagactctgtctcaaaaaaaaaaaaaaaaaaaagaaattgcttcttcagatcaggtttgctctctcttacattgcattattttactacaaaaacttctccttttctctttaatttacctccctcttctagtcccaccccaagttttctttcttctcttttttcccttccttttttggtaatttcccctttaggagttatttacagttttgcatgtcagacataaattctcttgggaaaagtatgcagaaataattcaattgtattctgatttcttatagacagggatttactcttagcacttattttaagaataataccaggagcccttatatttgtattacactttatagttttatgaagcgtttttacacatttccttacttaatcctcatagcagtcatgtggtctaggcagtgagggttatggctattacacctattttcaggtaaagagaggaactcagattaaagtgacttgtctgagatctcaaaataagagacagagcctgaatttaaacttaggtctttcgactctaatataaacactttatttaacacactggtcttccttgtagagtaaaagctgctacaagcaaatcgttcactaaggcctctacaaaattagttgatgagacaaggtttttgcccttagcaattacagtgctgaaataaatgatataatcaaatgttctgacttcatttaagccaattaggagtgggtaaatatcattatagcatggcattttctaaagttttaagccttgagctttgttttgttttgtgagaattgagaacctggaattttagttctgcattttaaatcatgaaatgttaa

SEQ ID NO: 10893 - DNA, 1025 bp, Homo sapiens
gtgtgtgtataggatcgtgcactatatatagcttgcttctttttccatcatgataattttcccatgtcatgaattatggcttgcaagtgctattcttaaagggctgcattatttttcattatttggatttattgttatttaattggagctctattattgaacatttagattgcttccaaaattttttgctgttattaatatattgtaataaacttctgtgaaacacatactcttcacctgctacttacctatgacttctgtaagcagagacctctgtatccccaggacctagaaggttacctggacatagtagttgcttaattaaaaaaattattgattgaatgaaagaagactattaaatgttcagttcttctttttttattctgattgcctgtgtatccaggggcctcttatttggctgcatgtgtgagtttggctgtaatgaaagtattggccatgtatgaccataaacaggcattcctatttctgtcacagttatatttgtcattctgtattaatatatctgtatcctgatttctgttgaagcatgattaattttgtttgcttctaagcaatgtagctaccctattgatgctgataaaaataaatttctgaacctataaggctgaggattgggcctaggttgtggtaaactggcaagataatggatgctaccctctcaagagccctctgaagagaaaagtctgctacccttcaccaggtagaaactcctgacagtgccacattttccagtttgactccctgtgataccctgaaaagacagatgtttgactcttttcaaataatattttaacatattttaagacacaaaggcattgtgtcagacttttttcttaagaatatatattgttgccactcagaagttagcttccaaaagaaataagtgtgtgcaaaggtttacgatagtggtatagagaagtttttaaaataaatgtgcatcttttcctatagtaataaaagcacattatgaagaattttgtaggtccagtccacatattccctgt

SEQ ID NO: 10894 - DNA, 1026 bp, Homo sapiens
acaatattcttttaatcataacattttaattttaatcaaattgctctgtaatcccagctccttggaaggcagaggcagaataatcatttgagcccagaagtttgaggctgcagtgagctatgatcatacaactgcactgcaacctgggcaacagagtgagaccttgtctttaaaaagataaagaaaaaaatctaattgctcacaaatagaacaaagtatgagtagataactgaattttatgtgaatacaatttaatctgaatcctatccacttcgcccaacagtgtgtattttgttccaggagtgtcattgccgagggtgaatggttggggcagggggtgtggtagctcccacagccttcatcggtgttcctccctacccacctccctactcttatctggaaaaattacactttcttttatccaatttaaagtctttataaaaacagatcagggaagtctcccacttaccctctttctcatcagattgcccctaaactattctaatagagaaattctggagttgctgtgtgttgtaggagagggatttacagcaaagtgtgacaggtaaaatcatgtaattcttgaaatctaagatacacttttctcctctacgttttatcttctgtggaaatttcttatcatcagtggcatcttcctgtcaattggcagcatttctttctcttgtgatgctttaaataatagtgcgtcttacaattggtggctcttagatttgatgaaataagggtagtggtatgaaaggtactgaggtagcttagagagagcagtgattaatcatgtagtagtcagagaaagcttcccagaagaataactgagttggattttgaagaaagaataggatttctccaacagtatagtcagaaaggactttgtaagcctggtaaagagcaaggcatggaggagatgtgagacggtatggcatgtgtgaggatgagcaagtcttcaggcgttgctgctgtggaacatttggagctgtcggggaaagtcttgaagagagaaactggaga

SEQ ID NO: 10895 - DNA, 1075 bp, Homo sapiens
taaataattaaattaaatgaaaatgaaaaaaaaaatgattacagaaaatgtcttagaatgtgccaaagagcaaataccagcagcagcagcattgctaatgttcattaagcattttgccctctctactatatttccaataactcttgatgcctttctttttaggcttgacaaattcttatgtgggaagtaattatagaccatcatttcttcaggataatgagctcagacatttaatccttaaggtaactaaagatatatttgtctaagttgtgtatgtgctttcattgctgtttgaataggaggcagattttcttccatttgcttcctgttctaaacatatgggactccatattacaccgtatttcctttaatatagaagtttaaaatagagaagtagccatgcattactagtttgtgttaatgaaagtagagacagaggataggcactttccacactatggagcaaagcttgtattcagtgctaagcattttatactacccatctctcacacataggatctactcccccatgatcaccacctccttcaaagccgtctgcctggcatcctgttccctcaggatcctgttcttctcggaggccagtcactgcttacttagagttgttagtgctttgacatttccgtcctcatcattcctgtgcatggcttttcagattcaccggtctagaggggaaactgtgatcatgtgatttgcttctcatgccctcggaggtgataaatgtcttggtcatgtgctgtgtgactactaggttttaagccatagtcaaattaaatagaaggattcttcatacacatttttgtccatttttcctttaattaaaaaaagccactcttttatttgaacagctgaatttaaatatagcatttctggcagggatagaaaggatattgtgtggataaaaaggatttttgaaggtggcaaaatgtacgatttgctttcgaagctttctcaccaatctgtacatgctcgtcagtcgtaccttcatggaaccctgcttctgccctgcagagcatgcccagcaagagtgccagactcttcctatgtgccatatgta

SEQ ID NO: 10896 - DNA, 1050 bp, Homo sapiens
gacaattactctcttttttatatggattaggtcttttctgtatgaaagaccttgtataattgtgtttgggaagtataagtatttttttcttctctgaaaatgcctagtaccaaataattatgtaaaatataaaacaattgattcctgtaatagttaaggtttttttcattttttaatttaatttttatttcatttcacttaaattaactttgttcttccccatttgaggaaaaaagaaagataaattgcaaatgtctgtaagttatcaaaatgtgattgcttgacaaatacattttttgggtatatttcacttcagggtttactgtacaatcatgccattgctttaaaaaactgtttcctttctcaataatagatggtcagaaaatgttaggagataaatttcaaaattatttgacaatattcttttccacctattctctcgcccccttctgcacgaaagctggtttgcaagttcacagtaatctccacgctggaaggacacgtgtgtattctggctcaagacgatcttttttctgtcggataaagagttgtaaaatctctgtcaaagaagagcatggatgcttacccaactcaaagaagaaaggtatcattttgaaatgtcaagtgatgcaaagcatggctataaaattaatgtcctaaatattttctgtacagaaaaaataaaatatatggtcaagggaaatatttgaattcaaaagcatcttaaaaataagatttttttaaaccaaaattacttacatttgttcatcacatctttcgaatttatcaggtaattacatattatctttgttgcccaagattttaatggtgttattgaaattgtagtttggggcctatcaagtgggaaaaaaatgacaagagatggaaataaaacttttgctgtgaaacttcattattacattttaaaatataaaggttagatgttaaaaaaacttcaatagtacaagagcctgatttgactaattttggtgaaagtttcttaagatgttccaggtgtgattttaattttttatgagatggtgattcttc

SEQ ID NO: 10897 - DNA, 1032 bp, Homo sapiens
tgatatgcatgggtcactcatcccctaccctgtgcacttctttacgatcctgaccatatgtgggcctacagtcttctgggagggagtacactcaccacttctgaagtttattttcaattttgaaaccagggcaacagcgattttaggatatctgcctcaggaacttttgggaacttcttgttatgaatattttcatcaagatgaccacaataatttgactgacaagcacaaagcaggtaggtatgcattgagcagaatacattttggggaatttaaaatgacagttttaactcttaatttcccattcctgtgaaatttgaagtttgaattaatcttcacaacattgatttttatagtcattgactattatgctgataattatcttttctcgttaagttctacagagtaaggagaaaatacttacagattcctacaaattcagagcaaaagatggctcttttgtaactttaaaaagccaatggtttagtttcacaaatccttggacaaaagaactggaatatattgtatctgtcaacactttagttttgtaagtaattttttatgttaagacctttatattgatttcaaatgagtctctttgcttttctcctctcatcttgctaaaccattaaaactgtgtgatcctctggccttttattgtaacttgagatttatcttttgagtaattcatttactgttcattgacattagttctcagaattaagctaaaagttttcatttctgtaatacattccttcttacttgatataatatgtgagggtaaaggcatttattcaagcattttcttcctaccctccatggccattcagtaaacaatgcagacgtggatttctactgtgcattattgtaagaaattgttttgtcctccctgtcatttttacctgcacatcttataagcctggggtgccgccatgtctgtgtaggcatgctcagcacgggggagaacagaaatccagcccaggtgttgctttagcaagctctggtctgtagctgtgtcagcctgaaggaaga

SEQ ID NO: 10898 - DNA, 1029 bp, Homo sapiens
agaaaggtcaggttacccacaaagggaagcccatcagactaacagctgatctctcagcagaaactctacaggccagaagagagtgggggccaatattcaacattgttaaagaaaagaattttcaacccagaagttcatatccagccaaacttaagcttcataagtgaaagaggaataaaatactttacagacaagcaaatgctgagaaattttgtcaccaccaggactgccttacaagagctcctgaaggaagcactaaacatggaaaggaacaaccagtaccagccactgcaaaaacatgccaaattgtaaaccattgaggctaggaagaaactgcatcagctaacgagcaaaataaccagctaatatcataatgacaggatcaaattcccacataacaatattaaccttaaatgtaaatgggctaaatgctccaattaaaagacacagactggcaaattgtataaagagtcaagacccatcagtgtgctgtattcaggagacccatctcatgtgcagagacaaacataggctcacaataaagggatggaggaagatctaccaagcaaatggaaaacaaaaaaaggcaggggttgcaatcctaatctctgataaaacagactttaaaccaataaagatcaaaagagacaaagaaggccattacataatggtaaagggatcaattcaacaagaagagctaactaccctaaatatatatgcacccaatactggagcacccagattcataaagcaagtccttagagacctacaaagagacttagaccctcacacaataataatgggagactttaacaccccactgtcaacattagacagatcaacgagacagaaagttaacaaggatatccaggaactgaactcagctctgcaccaagcagacctaatagacatctacagaactctctgccccgaatcaacagaatatacattcttttcagcactacaccacacctaatccaaaattgaccacatagttggaagtaaagcactcctcagcaaatgtaaaag

SEQ ID NO: 10899 - DNA, 1050 bp, Homo sapiens
agttgatgacttcactgctgaattctaccaaccattgatttatttattttttgagatagggtctcactttgtcagccagtcactttgtcaggtctcactttgtcagtacagtggatggttcactgcagcctcagcctcctgggctcaagtgatctttctgccttggctacctgaatagctgcaactacaggcatgcgccacaacacccagccaatttttggatttttttgtagagacaaggtctcactatgttgcccaggatgatcttgaactcttgagcttaagtgatcctcccaccctggcctcccaaaatgctgggattacaggcatgagccacagtgcctggcctctatcaaacatttaaagaactaataccaataccaaccctactcaaattattctagaaaattgaagaggacattcttccaaattcattccatgaggccagcattactctgataccaacaccagagaagaaaataccacaaaagaagaaaactacaggtcatatttctgatggacatagatgcaaaaatcctcaacaaaatactagcaaactgaattcagcaatacattaaaaagatcattcaccatgatcaagtgggattcatcccagggatgcaaggatgtttcaacatatgcaaatcaatacctgtgatatatcacattaatggaattaagaataaaaaccatatgattatttcaatagatgccaaaaaacatttttataaaattcaacatccccttatgataaaaaggctcctcaaaaatgggtatagaaggaacatacctcaaaataataaagcccatctatgacaaacccatggctaacatcatagtgaatagggaaaaatggaaggcctttcctctaaagactggaaccacacaaggatgtccactttcaacactgttattcaacgtaatattggaaagtcctggccagagtaatttggcaaaagaaagaaacaaaaggcatctaaactggaaaggaagaagtcaaatgagccttgtttgcacatgacaaatcttatacctagagaaacctaaaga

SEQ ID NO: 10900 - DNA, 1009 bp, Homo sapiens
gtggcaggcgcctgtagtaccagttactctggaggctgaggcaggagaatcgcttgaacccgggaggcggaggttgcagtgagctgagattgtgccattgcactccagcctgggtgacagagcgagaactctatctcgaaaaaaaaaaaaaaaaagaccaggcgcggtggctcacgcctgtaatcccagcactttggaaggccgaggcgggcagatcacgatgtcagaagatcgagaccatcctggctaacacggtgaaaccccgtctctactaaaaatacaaaaaattagctgggtggggtggcaggtgcctgtagtcccagctactcgggaggctgaggcaggagaatggcatgaacccgggaagtggagcttgaagtgagccaagatcgcgccactgcactccagcctgggcaacagagcaagactccatctcaaaaaaaaaaaaaaaaaaaaaatcctgatttgaatggtagactggataaagaaaatgtggtgtatatgtaccacagactactacatagccataacaaagaacgagatcattcatttgcagcaacttggatggagctgaaagagttggagctggaggccattatcctatgcaaactaacacagaaacagaaaaccaaatgccacatgttctcacttacaagtgggagctaaacatcaagtacatatgggtacaaacaggggaacaacagactgagaactacttcagggtgcaggatgggaagaaggtggggatcaaaaactacctatcaggtactatgcttattacctgggtgacaaaataacctgtacacacaacctctgtgacacacaatttacctatataacaaatctgcacatgtaccccggaaccaaaaataaaagttaaaataaataaataaatattcatgatttggacagggaccgtgattctttcagctgtcagctctcctatcccaatggggtatcatttagggtgtgggcttcctcattgcccaaaatagctgctcaagccatc

SEQ ID NO: 10901 - DNA, 1026 bp, Homo sapiens
ttaaagaacaagatggactgggcatggggagaaagatgcccagtccatcttgttcttgggtttactcttaaggcagagtgattctttgctgtggcaaaatcttcacttttagctatgtaaatggaaagcaggtatctggctattcttaagaatggtgtgaagcaacctgaatgttgatcttttagtctgagaaattaaattccccgttcataacggaaattgggtgtatgctttgtagcagcctttggttgctttttttaggagaaatatttcttaagtctcgcctggctattattaccactgtatcatcttgtgacctcatctgatcttgacctttctccaagcttgcctttccctgctcttctgtgcagaggactccggctccaatccctggatggctttaagtccagcaaacctttctgtttttcctatcgctcttctctttgcttaacctctcctctttcctccagacccacttaaaagcagttcatcaggaaaacttagctgacagtctcagtcagaactcactcgtgcaggaactttgcaggaagcaggtaatcaaattttggggttttaactgctcaagtaccaattcggtggtgagttaaggttgtctttgaaggttccttccagcccagtgattttgagatctggcatctacttgttatttgaaattgtactttgtgataggaactttacttgcagtatctcagttaattatgacgtagcactagcattacctccattttacagatgaggaaactgagaattttttccaacactgactctcaaaatggctcttttctggatttgtcttatttcttcaaatagattatggactagttgaagaccatgactgcctttgttgacaatgcttgctacctggtaggaactcagtaaatatgtgatgagatgattggttcattcaaccaatatgcattaggcctataccaggctccatggagatgcaaagatgccccagctagaaaatgcagtattagttatactctaagcttggcctcctac

SEQ ID NO: 10902 - DNA, 1664 bp, Homo sapiens
cgcactttgggagtctgaggtgggtggattgcttgagctcaggagttcaagaccagcctgagcaatgtggtgaaaccccatctctacaaaaaacacaaaaaattagccgggtgtggtggcatgtgcctgtagtcccggctactcgggggcctgaggcaggaggattggaacccaggagattgaggcggcagtgagctcagatcacgccattgcactccagccggggtaacaaagtgagatcctgtctcaaacaataaaaaaaaataaaataaaataacaagtttttgtcccgtttgccacaaatcatgtattagtatttgatcatctgtaaagacagttaacaaatggcattgcactgtgaaaaattccatgtttcttctttttaaatgtgacagggcgtggtagctcatgcttttaattccacagtacagcactttgagaggccaaggaaaaaggattgcttgatcccaggagtttgagaccatcctgagcaacatagtgagatcatgtctctacaaaaatattaaaaaattagctggggtgtgatggcgcatgcctgtggtcccagctactctgtaggctgaggtggacgacagagtgagaccctgtcgcaaaaaaacataaaaataaaaaagtttaaaaaaattaaatgaaaggcttttatacagcacattcggaagagtggcattatattttatagtatttaaatgagtgtcttaatctttccttaattatccctttacacttgctgctggcctccggattcagattgcgtcttccgtataactcaaaggcttttcaagtacttcttctcagttttctttcaaagtaggtcagttcagattttatatctaacttgcaaatggaaaatctgaagcatgggaaagttaggtaatttaccaaaactttaataatcagtggcagaagttaaatacaaactaaggtcttccaaagtctcatctattgctctacctatcagatgagtaaaggctaataggagtctattatgtgttttccatttggctgtctttttttagacatataatttaggtaatttaattttaaaactgtaattatcatttgatgattgaaatgacttattcacatttttttttttaagtaaaagaaaaaagagtcagtgcaaacccaagagctcacaaaattccccaaactagtctctcttataaagtgcttggaagtgatgcatcttatagtgcaggatattggagtaagttcatgatgggaatgaaattcagcctcaacaatcttgctctgttcatattttttcaatgttacaatgatgttaattgcaaagatacttctttcccctcaaaacgaccgggtattgattttttaaacagtgttcaaggaatggagtgaactatgtttaatttgttaacatgtttagtcccagatatcagagagtctttgtaatccagagtgacattttgcagactctgattttaaagcctaaatgagagcaaaatattgttcctattataagaaaatcgttagcccaaggaaatgttattggcaaaatagttctcactgccccttagactgtcacctagaagagctcccacatctgcctgtgattatgaccagccttttctgcagttgtgcttttttggaggaagcatggatctgtgcagtctaatatgttt

SEQ ID NO: 10903 - DNA, 1025 bp, Homo sapiens
aagacaaaaagtagctggtaagctcttctcttctttacaattatttccattattataatttatctggattttctagttctggctttaagagcaacatcagaatagcagttaatctctttcctacacaattgattttagaaatgctgttggcttaagataattaagttttcttttgaaccagcaacatggctgaattagctacagctttatggctgttgctgcttaaagatttaataactaacaataaatacaacccgttttgactttcttattttgccagtatctattagaatgaatttgcccagaaggaaatgataggcataaattcagtggaagttgatttatgggattctttctgtggttccgtgacttagaatccaaacagggttgcattctggattcacacagaagcctttgatctttagtgctgattactttgatgccaggataagtagccacatacaactgtccaaacaagtatacttgaagaattctatattaccgttgtttcttggtgctttctaaacaagtaccatcagtgaagaagattttgaatacagatgagccgtgaaattttgcggagctgctagaaaagaatttttattgaattgaaattcattttccctcaccaacatggaattcatacttgaaattgatgttatcaccgttatttaatcaaatagagagcctctttttaatccattgcttgattttttttataggctagcttctgagcatttaatacccaaatatatgcttcctttggcttttttttttttttcttcgagtcagggtcttgctttgttgtccaggctggagtgcagtggtatgatcatggctcactgcagccttggcctcctgcgttcaagtgaccctcccacctcagcctcctgaatagctgggactacaggcgcatggcaccatgcccagctaatttttgcattttttttgtagagatgggatttcactgtgttgtccaggttggtcttgaactcctgggctcaggcaatccattcaccttggcc

SEQ ID NO: 10904 - DNA, 2498 bp, Homo sapiens
gttgagtcaggaatgagatggagtgaccgttttacttaacgctttataaaatgtatttgtcggttttttagattaagtatattttaccctgtaagtttgaattgtgaaaaaactatgacattgtcttgaaacctttaaaacatttctaagagtagatagaaccaataatgtaattaatttaggacatttattttttaaggggctgacatttattcctttctcaagtattacagtaaaaattaggtggggtaggataattttgccaattttttttaatgcgcagattcagagtttgttagaaattatttgcagcagagttgtgggcgagaggcataccaagttgtttcaggctggtctaaaggtagtgagttatctcagttgattgttcacagtcagtttcagttacagattgaatgccttgttctgctcttaccccgttctcactactcgactagcctaaaaaataataataataaaataaaaagaagttgtttcacattatgccttccctgccaagcctaaaacctcccgaccagattttttttaaaagaggacacagagttggttctcaactggatatttctagaacatatgctgagacgctgtccacagccataaatttattacagggaggtggggcaaacatgcaggaattgtaagtgcaaatataccccacttggctcaggaatttgggggccagggaagacatcctgcatcttactggtttcccttgaaggaatggtacccagtttgaaggattcaaaggagaatttcttctcctaagtctcttcctttcgcctcggtgatctgagcagggtttgctgactcggtgttgtccccagtggcctattatttgtgatcggtggggctcctctttacccttggaggaacacatctccaatgctttcttttcttttcataggcacttgtagtggggataggggtgggagggtggcacgggtggaaaccttacctgcttcttggtgcccactcagctctgcagagccttggagctgtctactcaagctggaatctctttgaaggggattttctagaggtagaatagtatttctgacagcctcacaaatatactcatcttttaatattttgccacctttaaaagttgttattcagaataatagatgattccatagcagcctgtagctcagaatattattatgtgttaatttggaaaaaaaatgtgactagtattcagcacttctttgaaccagggtatattacttattagctgtattgcttgatttttcacagactgttacatctccatttaaatcataaatctgaattatgctgtattactgtaaagcctaccagtgttccctagaatagcatggtaataatttttgtaagaaaaaacgagtagtaacaaaacattgttcacattatgggaacagaaagataataacaaaataaaattccaggataggctgggtgtggtggcttatgcctgtaatccctacactttgggaagccaaggcaggcggatcatttgaagtcaggagtttgagaccggcctagaaaacatggtgaaactccaactctactaaaaatacaaaaattagctgggcgtggtggtgggcgcctgtacttccagctactcaggaggctgaggcaagagaatcgcttgaatccaggaggcagagattgcagtgagctgagatggccccactgtactccagcctgggcaagagagcgagactctgtcttggcgggggaaaaaagaaaattccaggatatatgaagtcattatgactaaaaaccacgtattatgtgcatcatattcttaattttattttaataattaattagtcttcctcatcatcccacaagtatatcacagaaataaatacagtctcctctcagctctcattatttttaataatgatctccttggtactaaagaagttgaagattacaactcagaaatgcaaaatgttgggccaggcgcagtggcttacctctgtaatcccaggactttgagaggccgtggcagaataatcacttgagcccaggagtttgagaccagcctgggcaacatggcaaaacaccatctctacaaaaaatacaaaaagtagccaggcatggtggtgggcgcctgtagtcccagctactcaggagcctgaggtgggagaatcacctgagactgcaaggtcgaggctgctgtgagctgtgattgtgccactgcactccagcctgggtgacagagtgagacccatctcaaaaaaaaaaaaaaaaaaaaagtgaaatcttgatgtattagggtttagagaatagctgcaaaaagttattttctgtatctgctggaaaacagcatatctttgtaagtacagattgtaaggcagacagattgtaattatgtggatagagtagcgagtggtaacagagcttgacagaccagtgttcacgtgacagagtgtgcagccctcaagcgcaggtgcaggtggctaacagtacagggttaaggggccaaagtgcac

SEQ ID NO: 10905 - DNA, 1048 bp, Homo sapiens
ctgagccagtaaataggggagggtgtgctgtggtggaaatgacatcttcaggaatgttgttggccttggcgctggcaaaattcccaatgaactaagaaattgcgaagaggacgtccccagtgaggtcaagaagtggagtggttttttggcaggtattgtgcctttaggtgaaactgctttctttgcctctgttcttgtgaaaaaagatgttgtggtttcctacaagaatactttaaaagaaaattgccccttaatttttaaaaaatttgtcttagtttttaggatttgatcctgatgataatgatacactggacagtaacctgtaacactgactttgggggatttttttctgatgtcagtgactgtgacaacagagtcttccacactgtgatacccatcatgatcaagagataatcactggaaatgtattaacgtttgcaataggggttgcttttcttattttttatcctctcttttgcttccttccctggacagccatcgtcatgacccacagcttgagcctggaagtgttcaactacagaattggaatattttcatttacgcaaccttctccccctcccatcctgcaaatctctcctgcctccaacaagggtgacttgaagaaaggaagaggaggagcttgaggagtgggatgagaggggagaagggaaaggaaccagggaaggaatatcaaaacaagagcaaagagcatatacaggaagagatggtaggaaataaagatggtagcgcctaggaggcctcagcgtcattcagaagcagggaaaagaatcaatgtaactcaagaaaggatgaaaataccctttcttcccatccacgtgtttccatctcaatcctcacagggtcctggtcctgaagtgtggagcaaggagttggggagctcacagctgggcaaagaaagtcttaacagtaacagagaatcctttatatatctgtttatttgactcgagggtcctcctcggccagggattatttgggggaaataactggctttatttctcctataatatgaaattcattttgaaaagta

SEQ ID NO: 10906 - DNA, 1064 bp, Homo sapiens
agttttttttaaaatgtggtgtcccattccaagggagaccaattcctaaagggtaaagaagggttaaagtaggtcacatatatacagtagcagctgtaaataagcttacttgaactaattacttgaaaactggtggaaaaaagagaccaactttgttattttttaaattattgatttttaaattatgggagcaaatccatctccaaacatgatactcttgggccaatgacggatcatcaaaatgtagattcattgtgtctgtgtggtaaagggccaaagtcaataattgggacaaatggtaaagatgattttaaaatctgttgtatttaggtcccttgacatatcattagcaccttaagtgagaggttttctttttcttatcagtgtccttgacaagcattcatattaacatattcattctctcttctccatcacccatacccacacatacatctagtatgtttagggttctgtgttcagatattttgtttgcacactactttttaggaaacttataatgatggagccctacagtgaatccttaccagtgttcagtcctccccaaaacttgcataaaaatattcttagctatttttccagccttttttgcagttacaaatgctggataaatagactgataaaacctcttattttatttatgtggcaggttgcatatttatgtggacacataggttgcactgctaggcattctgtattgttttaaagaggatatattatttagaaaaatggacatatgaatattattaaaaattgagtcttaaatttaaatgggaagggaagaaaacaccaaataagaaaaaaatttgcctttaagagttacttttgttgaatgtatttgacttagttcttattttaaggctaaaaaaactttgtcatatttaagtcggcagctttctaatttaatcttagctttgtaattcatgttttgcttttgtggactaaggtaaggacagcatttaaatatttgtgctggagtgaggggaagaagctgttacagaagtggaatggtttctggtggtatttctgaagttaggtaaagtgct

SEQ ID NO: 10907 - DNA, 1775 bp, Homo sapiens
ttctcactgcttttcagtcttctctgtacttcatttttgtgaaaaagtgaaaatcacatataatctttatttaaaaatgctcaccaagcactgcagactttggagttagggattcagcagcttgttccagtgaaaaggaggagtgaagctggggaagttagtatctaagaggggcaagctgattgcatgtgcatttatacctatgcctttaaaacattcccataaaaagtattaataaagaaatttccattccacactagtactgatgaaaaggtggttgattttgccttgtgataattatcaaaggatagtttttcatccttagattttattcacatgagagattttttttattttctctgttgacttaggaacacatcataaattcacaccaactgacacgttgctgacgtctgtacttgacataaccatttttattcatacaggaagcattaaatataaaagatggtcagttttgaagagcaaagggtgctgaaatgacttgtacggttggctggtgctttctcaaatggattgccatagttcattactagtaaagaaaaggaaaatgtgatttacgttgtcatttttcctattaaaaaaaacccttaagaatggggcacttgagctgtccctgcaatgttttcatatctagtagtcattttagggaaagtgataatctgtagaatgaatagttatgttttgatatgactgatactttctttgttaaaaggttgtattaagtcttcaatttcaagtctagcttaaaagtgtaaacattatgtgattcatttgaatacaagaatgcctatgaaatacccactataacagcattccttttgtgtttagaactatagaagaaaatgtcttcaaataaagtagttttcagtcactttttgttatctaagttctatgtatcagttacgtatgcagggctgtgccaggactgggaggaaatgggtgaagtgacttgggagcctgaggtgggaggattgcttggggccaggaatttgagaccagcctgggcaacagtgaaatcctgtctctacaaaaaatagaaataaaagaaattagccgatacagtggtgcatgcctctagtcccagctacttgggaggctgaggcaggaggattgcttgggcccaggagtttggggctgcagtgagatctgattgcaccactgcactccagcctgggcagacagtgcaagaccccaactcaagaaaaatgaaataaatggacaaccattttctacacactcaggacacactgatggaggagaaggaggatggctgacctagcagagcgacacccaaatctaactgagcacttttttttttcccaggaattattctaagcattttttatttaaattatttaatcctcacatgaatcccatgtggtaaatacaaatatcctccgctttacagttgaggaaactgaggcactgtaggttacaaattgccacttgagaaagaggagaagggaaaactacatacagtggtcactggtttaaagggtatcctttctcttgctagtggaggagtgggtttccgagtgagccagtctgggagcctctggtcctgctttgcagcagcgcgttccatggctgacctgcctgggggtgaagtggcagcctcttcctgtgggcatggttacaggaggtgtgtggaggggcacctgaacacttctgttgaggccagggatcctaggctcctgtttgtaggccatcaacatttccttggcaataaaactttaaaaacccatttgaggctg

SEQ ID NO: 10908 - DNA, 1050 bp, Homo sapiens
agaatgcaaaattagcaattcctagtgtaagcaatttcaaattttcacactcatcatgaatttaaggatgcaaaggacctgctttatattcctgcatttttttgtgagggaaagtcatgttaggtatttctaagatgtatttttctcttctctttactctccttattacatttgaatcatgtgtagttttaagctaggtatttatttacttatttgttaccagacaggtgtctcatgtttgggtggtatatattgctgccaaaggctcaccacagagttgctcaaggtgaagagagtgggtttctagaagtacagctaattcttctgtagcgtctagttagtgtaaaatataaaaaatcaaccaaatacatttatacacaattaaaggaatacttatacgcaattataggaatttagtaaataaaactttttagtatcattgctaccatgcataattaacatttttaagatttattacgtatttactcagtagaggaacagaatcagttgacatttctttaggaccctgacattatggcatatgaagaatgttgggagtgcctagattgcctgttggaaagccttggatttttagttaatgactcggctagtcttcataatggtgaagaggaaaactctttcagatattgctcataggatgtcagttttgtcaggaatatgctcaattatagagagaaaggagagtgaagagagaagggagaatgaagagggaaaggcgaatgaaggtgtgcttcagactttttttttttaacatgcaagtctaatagttatattgagtggattaaagtctatatgaattagaagtcatttatagatactggtactcaattacatattaagtacagaggtaaaaaaaaatgacaggttattcatactaaagtcaggatgagatgaaaaatgtgctgagtataccagcacttttaattcaaggaaaaatgaaaatgagtggttaaaacaagtgttaaaagaaaaacttcagccaaattaaatttaaaggagtttaattgagcaatgaacaatttgcaagtt

SEQ ID NO: 10909 - DNA, 1026 bp, Homo sapiens
cccctgggttcaagtgattctcctgcctcagccctccgagtagctgggattacaggtgcccgccaccaggcctggctcatttttgtatttttagtagagacagggtttcgtcatgttgaccaggctggtcttgatctcctgacctcaagtgatccacctgcctcagcctcccaaagtgctaggattatagatgtgagttgctacacccagctcaagattttttataacactttcacaacttgtttaaaactttagctttatctaattttaaacaatcctttaaccctttaaactttgcaaaaatttacatcccatgctttcttataatcttttaccaaaacacatttcattctcctcatactttgcatgtaaacctatttttttcagtagtctcaattatatgttaaaatggtaattcttagcaactttcacttttggtgcataaatttcttttcattaatcctttcataacttccgtagaccatctacaacatgcttgtactttctgacttgtcctaaacatccttctttttaaacaaccagtcattttttactttaggacaataatttaccatacaagatcctttcttatataaaatctcttttctttataaccctctttgcatagctagggaacttggctaattccatatgtccccagggctttaaagtcaaggcagtgtatgaccttaaagcatttaacaaacctagtatctgacctgaataatttagatcgtatatctttatttttgccaaaaatctttaaaatgttttatttcccaaagattactaaattcacttgaactaaaaggcattacagtttttatttttctttcaaaatatttaagtgcctatttttctttaaaccaattaattagagctcttttatataaacattacacacacaacacatatataactgcacagacagaagattattacagttgttgtaagtttctatttaccagtttctaagtttttaaattggattactggctataggatgaagtctttggaagaacaggg

SEQ ID NO: 10910 - DNA, 1029 bp, Homo sapiens
acaatttttcatgaccagtgaatgctagctgaagaaactgaaaattttctgaaattgtcagtataaatcatttatttcagtagaccttgctatgctttgctgttggaagtaaatataacttttcctaagattagtcaaaattcactgagtttgtgtcatgctttgttagatgctgagaatagatcaaagtttgatctctatattttatttaattgatatcaaatgaacataattaatgatgatgttgaattttttttaatacaagtatgaaaatgccctttctctttgtgattgtttggtactagtcattaactttgttcccattttgtataaatattatgtattagaagttagaggcagttttctgtgaagagtatttctacttgattttatgttatttgataaatagatgttttgaatagcagcataaaattaaatgtataaatttaatattattgctgtattgtaatctttttctgtttaattttttggcttgcattattttagtcgagtaaagtattttgtatctgttatttttatggtaatatatcttttcttcatataaaataaaatttgagacctctgcatccaaaatactaaatataaaagtttataaattatattaaaatatgtctcagattatatagagtgatgcgtagtcattgttaccttcaaattagccacttggtgaaatatgtcactttttagtcgctagactatgtttgaaagctgtaaaatactggcgagccacaatttaggaccacgtaaaatgtgaaaatcgggtttatggaaacagattagaatttattttcattatggaatgttttgtttcaaagtttgttgaaaaaatatattttgatgtataataaaggtatatagtatgatgtttgtgagattatttttcaatagtttaaaaatacttttttattttatgtaacaatataatggtacatttcaagtaaagaatttgttcaaatctctatctcccttacaaagctaatgattttatgtccccctttaatctgtttt

SEQ ID NO: 10911 - DNA, 1047 bp, Homo sapiens
tgtgtttttctcatccctcatctcccatgaatacatgacttgatttatcttgatcagcctagtaacttgctccacatttttccaaaagtgcaaagcagtttcagctaaaaatacacatatcaaaatgatccaaaagttgtggccacagctcaaaaatgctgatcaattttgaaaatctaaatcagccttggccctgaaaccgagggaagaacctttgtggtaggggacagatttccaaaaactcaccacagtcctgttcttagctggagtttgtgctgatgttgccagacaactgaggaatagatgcaaaaagcaggaagcattattgaattgagctctagtgccaatttgggaaaagcaaattaaaatgtaaaagaatatttttccactcctggcatctcaacataaaatggcaaaatacatggttgctgaaaaagttacagaaattgctaattttgccaaaaagtaaaagccaattgcaaattcttttttgcataaaaaatgcatagacagttagaaattctaatttacaaataaatatgtatacatttaagttggagagtattttgacataaatgactgtgtgtgtgcgggcttgtttcaatatcttatatttttcaggtgccacttgaagaatggatgatgatgattttggtggttttgaggtatgcactgttatttacattagtttgttttaactttgtgggattataatggagtaaactattttgaaaatgtattatatttcattggcattcatgatatttccttgatcattttaatgtaattctggagtaaaaagatgaaatcaagaaaaataaaaaaaaaccctctaaaaattaaaactgatgtattattatagaacatttggacttgcccataggaatggtttaaattgagttaattaagtgctaccagtgtaagcactaaaggaaagattttaaaaattgtcagcagatgattttattgggatacatgtctgttaggaaatacttgtgagatgatggatgagtactaaagatcctgtcacatatttgcatgtttata

SEQ ID NO: 10912 - DNA, 1032 bp, Homo sapiens
tggcccctattagtctttactttgaagctggatcttttcctatcctattaactcagagcatgctttgattgggggttaacgtgactcctgggggttgattatttcaattaggtaggatattgaaacaaaagtctttagaagtatatttttaagcaggtatagttatttttttattttttctttgttgtatttaaaaataacacacctgaatctgctatttaagaactagagtgttaaccaatttcataatttttcttctatcctatccctttgcctttgtccctagaggaaccactgtcctccattttatgttagcatttccttgattttgtaaaaaaaaaacaacaacaacaacaacaaaaaattgtgtgtgcttgtgtgcacatatatatatatataagagctttgcttgtttatgtgctttataaaaatgggttcatactgtttgaaatcttcaggatttatatttttaacccaaattttgtctctaagattcagtcatgttgtttcatatatctgtagtttctttattttcactgataaataattgattatgccacaactcaggtacccatcttatgtcagtatttaggttgttgccacttgtttgctgttatgaacagtaactggtggaaactttctgatatatatttttagtggtagcaagtctttctttatttagcagttttgcctagggaaggattttgtggagaccaagttatttttcctctggtgagtaattcttgagatgtgttgtttcttttttattatataatttcccctttgctgtttcctctttacttttattgtgacttacagaaaaccttgaagaaatggacaaataattcccatatatccttcattcattttcttcaaaggttaacattttaccacatttgctttatcattttcttccctttccttctcatttttcttattctcctcagtatttatttagtgttctttttgttcttacactgaggacattcaatcaaaatactatgtcccaaagtaacttgggttagttcttac

SEQ ID NO: 10913 - DNA, 1035 bp, Homo sapiens
tttatttgacatagccagataaccttagatattcctcttaggagtctggcctatcaaacttaaggcattgaagagtagaaaatgcatgttttgtgtagtcagggatatgtttggtggggatggggaggtggagagagagattgagagacattgagcaaagaaagtaataaaagaaatatgttgagagagactgaaatagagtgagagcaggagatatacacatacattgacatatattgtgtaatatatatatatatatatatattcaaatacatatacaacccctcttaatgtccctatcaatttatcacatataataaacagcataatgtaatatatacacatatgttcatatgtgcaagcacacatattcattcgcatagccatatatcatatgtatatatggaggtgggaatgggagagtagaaggaggagcttgagggagagagtttgagaggaatgatactgagccatacattctcaacttttccttaccaactcaaggattcaggtcacctcaccttttatgtgtagagagggagagagaaagggtggggtaagaggtcaagagagttgttgagtttcctattacacagaaaaatgagcttagggaaaaggtgtctccaacagttcaatttctttacctgtactttcattatttataaaatatggaggggagaggaatgttcctttttcatctttatggtcttttctggttctataattatacaactaaatttatgtaactggtttgatagcaaattttatacagcaaattcttatggaatatttgtttctcattttataaaacgacttctctagaaataatgtatcatctgaccttttggtacactggtaattttgtagtcctatctaggctgatgcctctgttttttgacagacactatgcattattctaacattaattttaggaaaattgacattacttttctaagagtgaggtaatgtttttgctggcttgccagctacttttgccaggataggagagagagaaaaatagcatctgaaagatgt

SEQ ID NO: 10914 - DNA, 1024 bp, Homo sapiens
tttccctgttttagacaaccaaggtttcaactgcccatctacttctctatcagactattacattactctaaggaggccatctctctgtccattgttggacattatgggctgcacagtgtgttccttggtgtgaagaaatgatggtcaactatccaaattcatacagtatcttctactctggtggaatactgtcaattcctgtcaagacccatgtgtagccctccagggctaccagcatcggtctcatttgccagctatgtttagggccaccagggaatttgctccatagccatctgcagcctctgtctcccttattgacaaatagaacagttcctactggcattatgtatctgagagtgtgcaaaaggaacatgcctagattcagcccacgtctgcactgctgcagtgcccgcgtacccactcatgtcgtagacccaggtggccaccccaaggcagcacacagggatatctgcttgttgatttcagtcaccttccaaacatggaaaggagttctgatgagcattgacttgttctgttttaatgcatccctcaaaatgttgatagcaccatgatctacatgaaccttgaattatttttgatgtgttactgttttgttttctctcttctttctgtaacaactattgtttggttgctcgatctactgaattgcctgttttattgatttttctttcctttattttctctctctaatctgtctgattttcttaactttgtttttcttttcttttttctttttagtcagggtctcgctctgtcacccaagctggagtgcagtggtgtgatcttggctcactgcaacctctgcctcccaggctcaagcgattctcccacttcagcctcctgagtagctgggactacaggtgtgcgccaccgtgtctgactaatttttctactttttgtagagacggtgttttgctctatttcctaggctggtctcaaactcctgacctcaagcaatccacccaccttggcctcccaaagtgatgggattacaggtgtgagc

SEQ ID NO: 10915 - DNA, 1026 bp, Homo sapiens
agaaatattaggtattatcattatcatttctatatgtaacatgtcagatttttttagtgtagcaattgcaatactttttcattatctcatagctgatcattagttggttgtcttcgtatagattcttatttcagtcttcttagaaatatccacttcggaataaaagattgtggcccatctcttcaccttcttgggctcagttaaaggcagcattctttcgttaactttgaaaataaatagattgctacagattgatgaaaaggacgtgaaattttgttgaagtacaaaagaaaacaaacaaaactaacctaatgtgcctcatatgccaaattttcccatgtttacttaatttttttctcttatgtcatgatttcaaaaatcttttattctgataattaatgacagtaaaattaatgtacatcttggaagactacataggcacatgccacatcgaagattgtttactgcaagcaacataagaattttcctttacttgtttaattgggcttttgtcttgaacttgtcattctctaatatatgcactcgctcagacttcatgagttcttaatgtctcatcttaatgttctccatcaaagattaccatcttatctattatgtagagtatcatatttttgagataatgaggaactgtattagcatgatccttttttgttttaaggtccactcaacagttgtgattgatcaggttactttaatcctttgattctcaacttctacagtgcatagtaaattatttgtgttgctttttaaaaatgcatatgccaaggagttttctttcctggaaattctgaatctgtagatgtaggtaggggctagacatttgtcgagtttttcttttttaaaaaaaattctattaagttattctgctaccccatgggaattattaaccattgtcctatctttttatatttgttggtcaatgtattctattttctttcagccattatttttctaatttttgttattaattaatattgagtctcttaaggttttgtgggtgggtgt

SEQ ID NO: 10916 - DNA, 1051 bp, Homo sapiens
ttcagttaattctaaagcagaataattagaagcctgcactctagagtcagactatatgaattgatccctggctttgtcacttagggcaagtctcttaatctctctgtgcctcatttttttcctctatggatgagatacacaagtaattactacctcatagtactattatatgtattatatgacatcagatgtgcaatagtgcttagattagagcttgacatattctgggtgtttattggctgcattatctttgtaattcttagctaagactgtttgtatagctagtatcagaaccagggctgggattcaggttttctaatttctagtctttagaagaaaagtttgttactggtatttcatatgttgtcttgtcaaagaacctttactttttacaaaatttactttggtgtcactgttgtatatgaatactagaccaaccttttcttcctctgtactgtttcaacttacacttttgacaccagatgtgtgggagttttctgcatcaacaaccagttctccaactgcctggacaccaaatcggtgttctacaattcaattccattctgacactaactcatcaaagttaacgttcgacttcacaagtttaacagctcagtcccagaagactgacctcacttcagatgccagttgcaagtattaggtccccagggtacccacactttcctctgacttgactacagtgttatgagtttccacaactggtctccccttccagtttgataatttgctagaatggctcacagaactcggggaaacattttacttacgtttcttggtttgtcataaaggatacaactcaggaatggacagatggaagaaatacataggacaagttatggggaaggaaggagcctggtacagagatcctaaaatcttggaattttcagggtgataagagtatctgtggtagcttcgagatcagcatgggggctatcatcagaaaaaccgaggcatgaataaagggttgaaactttcagcctcatccctccagcatccaatggcttaataagttacacctatataatgaaac

SEQ ID NO: 10917 - DNA, 1025 bp, Homo sapiens
tggctctgtgtccccacccaaatctcatctcgaattgtaattctcatatgttgagggagggacctgatcacctcctgtctagggagggaagtgtttggtttatgagggcagtttccccatgctgttctcgtgatagtgaattctcatgagatctgatggttatataaatggtagtttttcctgcatgctcacactctttctctagcctgctgccacgtaagacttgcttgcttccccttccaccatgactgtaagttttctgaggcctcccaagccatgtggaactgtgaatcaattaaaccttggtttgtaaatttctcagtctcaggtatttctttatagcagtgtaaaaacaaagtaatactgacatcgtggttgctgccaagttttggcaatagataaaatggatgtaaacatccatgtgcatgttttttgtggacatgagttttcaacttatttgggtaaataccacagaagtgtgatttctggattgtatgttgaaaccacatttagttctgtaagaaactgttaaactctcttccaaagtgtctgtaccattttggttatgcaccagcaataaatgagaattgctcttgctccacattctcaaaagcctttggtgatttcaaatgctggattttggccattctgacaggtatgtaatagtatctcgttttaattcacatttccctgatatgggaaatgtgatgtgaaacatcttttcatatgcttattgccatctctgtatcttctttggtgagctgctaaagtcttttacccatttttttttaagtcaggcctttttttgttgttgagttttaagagttttctgcatgctttggaaaatagtcctttatctgatacatcaatcttacgtattttatcccagtctgtggcttgtcttttcattctcctgacactatctttcatggtgcagatgtttttaattttaatgaagttcagcttatcccatttttgtgtgtgtgtgcgaattgtgcctttggtgttatatttaaaagtcattg

SEQ ID NO: 10918 - DNA, 1028 bp, Homo sapiens
tttgaaaatacctttagttttttggagcaattgctaaaataaagtaagtaattgtctcttctatatttttgttctttatttagtaaattcagcaaacatttagtcagctgcaccatgtgccaggtactgctctagcctttggaaatacagaagtaaatacatcagaatctctgcgtttctagtttttcttagggagcttacattttggtggggtatggaactgacaatcaagtatgatgttttgggatggtaaatagcataaggaaggagcagggtaatgaattagtgatgcagatgaagagctggggtgctcttttagataaagtgagtgagatcaggcctcagagattaactgaattggcacttaaaaagagacttgaatgtagagagtgggaccaagtcatgcagctattttgaagaaggaagttccttatagagggcacaacatatacaaaagcctgactgataaagaagagaacctttgagaaaaggtaaggagaacaggatggctagagctaaatgagcaaatggaatacctttatgagatgaagtaaaaaaggtgatggcccacaaggaaagtgaaaaaagtgattgagatggaggggtgaatatccctatcaaatattgctaatatgtctagtgaaatgtggatttacaatggagtagtcattaattcatgtagtatcttattatgtcacattgaagggactcaaaaaaattgtaatttaatgtctaaaagggattagtggatttacagtcatagcaattatttttagtttttaaatatctatatatatttcagagaagtaaatagatgacaactaagttttatgcataagatatattacaaggataaaatgggagagacagagggatgaatacaaaagtttaaggaaagagaaggaatgatgtaaaattttctagttaatatgtttatatattttttaaataagtgatggttaggtatacataggttatatcagaaagagtaactgttcgagttattatgtcaacaagcatagtacaca

SEQ ID NO: 10919 - DNA, 1030 bp, Homo sapiens
aaggcaggagaatcacttgaacccgggagggaggtgaaggttgcagtgagccaagatcgcaccattgcactctggcttgggcacaagagtgaaactctgtctaaagaaaaaaaaaaaaatcattttactaatattcccctctctaaagtacttctttttaaacacaacatttcaaaactccagattccctttggaattgctaaataacctctaacagagtttctggaagtgtagactatggattacctgcatcagaattacttgcttgggtgattattaaacatgcagattcctggttctctgcctaaacttttcgaatcagaatctcctaaagaagcttcagaaatttttattttaatttattttccagatgattctaaacacataaacattattcccagacaactaaagaaatatctctaagtcaccacagatgtgactgacttcattgaaagtgtacttcaacaagtccctttaagtttgaccacttcatgtatgtcaagaatctgaacagtgaattaactttagctaatagtaggagccaagaaggtgcaatggtaactgaagagaaaagggtaataagaaaattttttcttagtttgaagtgtaatttgaagagacactcaacataaatatactagtggattaattttaaaatatgatgttgaagaagtagagagtagaatggtggttaccagaggctgggaagaggagtggatgaggaagatgttgatcaaaaggtataaaatttcaattagagaggaggcataagctttagtgatctattgcacagaatagtgactgtgataaataataggcactgtatatttcaaaattactaaaggagtaggatttaatgttttcattacaaaaaatgataagtatgtgaaatgatggattcagtaattagcttgatttagtcattccacaacgtaagcatgtatgaaaatatagcattgaaccccatatatagttctgatcaattaaaaataagattaaaaacaggatgactacagtcaataataattta

SEQ ID NO: 10920 - DNA, 1039 bp, Homo sapiens
atcctagaaagaggtcccttgttttaaacaactaacaatataaacttgctctattttgtaaaacagttttgtcacattgtcagtttcaggttcttgactttgccacacaaaagaatctgagaggaagtccaaagtaagagtaggcaaagaagtgtattgcaaagccaaagcacattgagagaagcagagtgggctgctcaaagttagtgacagcagctagtgcctcaagagggattccctttacgcaagctattcatacatattcataaaatactggtgatatcaagaatgcaaaagtggacatgcagttggagcatgtgctcagtatttacatgctttaacatgaattgcatgtgtcattaacatgtaaaatatccacctagaggtgtgttttttactattaaaatgaggaaaatgtcactcacaggtaaaacccaagcctagctgcacatgcgggaccctggagacatccttagttttccccaaggcaggaatttgtagcgtatagcttcttgggcttttggtgctgactggctggagactgaggaagctacattataaataagggacttttgttctcttccccaagctatattgcgtattaggaacttgtaagcatctggcggtctgctggtgtcctgtaggactatttatcttgcaaaatagttaggtgctgatgcacaaggaacccactgcaaaagagcccacggggcttcacacaaggggacaaggcagtatggcctcctaatcttacttattctgcttcaatatgtctatctttgttgtcacccaaaactgtatgactaatttccttttcctcgaaaacctagcttttgatgttctgatagcttattgtggtacaagtcaaatctacttcccatatcatcatgatttgctcattaacctccaaagcccaggtacatatggatttcagaaaatggtggttagcgagagaacattaatttgaagaattggacccacaaacattaattcattctacaggaatgtatgaccacataataaaagccatacgtgctag

SEQ ID NO: 10921 - DNA, 1024 bp, Homo sapiens
tgcaaccgcacagggccttgcacttggaagggccctgcgtttggtaatgttctgctatcaccgtctgctggcttaataattttcaaagaggctctggatcttcattttgaactgggtcctacaaattatatcctgaccccaggctgacaaacttggtctaaaactaaccaaataacagtgtttgaacagcaatcccacatttacggtgagttctccagtacaaacctgaaatttatctgctgctcacttaggtgctcttggacatgtcattcagtcttcctacatttcagtttcctcattgacaaaataaagacaacagatgacaccttctactttctttattttcaaggttgtactatctctaagtaaaaagaggtaataattgtaaaaaatgtctacttgctttgaatagttcttttctaaaaaatatgctgttgttgaagggttaaactttgccctccatttttcagaagtagcttgaggaaggttgattgagcacactgaaaagactgtagaacctttctgacccttatagtttggtggaaaataaaacaaaaagtaggcaagtattcagtgtgttaaatactcctgaaatatcattatttggacaaaattagaattttcaactaaaggtgcagaataacttcttggatcccaaaggtagttattgaattaaattaatgtttgggtctaattcatccaaacgtcgaacggtgagaaaatgagccaatgactgaaattttttgagggggtaatcctttttgtttcatttaatttaaaaaatctgtaagttcaaaagtttgatcaagtcatcctttaaaatatcctaggaaatgccaaatcaatttaaagtacacctagtctcttgccaaatacacctagtgaccttttgtaactctggtgcctcttaaagaggaactgagaaaacaggcaagtcctctgtccccagactcctcccttaactactctctgacctcaaaacttatctttattccagctgtccttgttagcatgatggcaatac

SEQ ID NO: 10922 - DNA, 1068 bp, Homo sapiens
ccaggacgggggacagccttgtttttctaatatggtaaggcccatgttctttgatattgcttcttgtagtataggatatggaaactagagaaactacattagagaacttattcaaaaaatatcttcctttgctgacaatatatggcttaatttacgtgtttattgaatgttctgtcttaatttcactggatgaatttgctagggctgctacagcaagataccactgactggatggctgaaacagcagacatgcattttctcacagttctggaggctagatatctgagatcaagatgctggcagggttggttccttctgagggccatcgggaaggagctgttcctggcctctctctctctttggctggtagatggccatctttttcctgtgtcttcagaacattttctctctgtatgtgtttgtgtgcaggtttcctctacttataaggacaccagtcaggtcagtttagggcccactctaaagacctcattttaactgaattacctctataaggtccttatctccaaatatggtcacattctgaggttatcaaggttagaacttcaacatattaatttgagggggacaaaattcagcccataacaatctcttaattgcattgtgtgtgactcctgatgtcaatattcagaaagttgctgatatacatcatgggaggaggaaagagcaaggacacttatatgtagcaggcttctcctgtgcctggaacattgggctaggtagttcagagattttatttccattcatagccacttgctgtgtacttaccctatgccaggttctttacatacattcccattaagcctcacaacaaagcaacaagccaggcatgagccccattcaacagaagacagaactgaaatgcaaaggtgaaaattcttttcaaagctggcattcacaccccgacctatcatactaagactcctttgttcactttccacaacatcagagagacacctacctactccgaccttgtcaggcagtccatggccattctatcttgtatgatctaatttcaggaatacttttcctatgatgagtggaaaaact

SEQ ID NO: 10923 - DNA, 1028 bp, Homo sapiens
gggattaatgggtgttctcttcttctgaaatacaatgttctgttctgttttcatgaggctccaattgaaaactcattcctgcccctgtcctcatttccctccctgggtctgtgaacagctttctgaagagacagagagaagtgagctagctctgggagtaggcagtggaagagcactacagtgctttccatacctagctgaaaaggacctgtagaaaatctgcagacacatttatgatcagggacttctttcccttcctaaccaaaatagaaaacaaagtctcagataaacaggccagatctccaagtcttgcgcatttctccagtcctgtctgcatttcccccatctctaccctgagccaggctcctaccagccccgcaagggaaaagggagtaaaacagcctttcaatatgcttaggaggatttgtcacaggtgattctccataaaagtgtaaggagaaaacttgtaatgccatatatgaactgaaatggacaatcgcaagattatgtgtggctgaagacatcaccattgagacagtaaggccggttagacgagctttcagtgacagaagttaaatatgatgcttttgaaacaccgatgtgtgtaaagacactaaaaacaaatgcaacataatagccaaaacttgtacttgacagaaacacctagagctactgcaggaatgctttctctgtttgtgtatactctgaggatggttaccactgaagtgttaagtggctaaattataattgctatgggaactgtaagtgaaacttgacctttgatacacttacatgttcagccataacattgcattaacaggctcttgcatttacctggtgtatgcggctttgcttcaggctttcagggagagtaacttgaactaaaaattgtttaagaaggagaatgaagaaagcttgattcctttcaaaatctcatccactcctagcatcagagctcacttcttcaaaattgtcttgtaacaatgcttttcaaggcaaggtaacaaattcttgtatagagactacta

SEQ ID NO: 10924 - DNA, 1058 bp, Homo sapiens
ccgcctcggcctcccaaagtgctaggattacaggcatgagccactgtgcctggcccaaattttcttttatgatcgaccactcttcacattcatcactcactgttataagaaaatcggtctctgagcattacatactcttccaatctatttgaacttgtccccattgccttgtgtagagacttactaatgtttcaatcatagtgatatttcattgttttgattgttaaagagaaattattcaaacacattttttaagtgtcaagaaagattttattcaagactattgcaataggggtcaagactattgcactaggggagagagagtgaattcaactccaaatacaaatagggacaagtggggatttagagtaggagagaaaatggacagttactatgaggaacttgcttaaggtatcaaggaagggggtaggaggagaggaattctcctcactcttgatatctagagtgatattttacctgtttctttttcttcatctggattcttcatgggacaccttgatatcactctagatatcaagagtgaggagaattctcaataaactggcttaataggattctttgctaaagcagggttcaggaggtcaatgtcaaggcttagttcagaagaggagcctgactaaagttgggtcaaagaggaagtctttgtctttgttaatctttcaaatttgaattcacccactaataaggaccaatttagaatgctatatgtactttacaagttcttttctagacctggaaaataagctccatcattactcataatgacattataggtaactgacgccagctgtcttcataagaacaaaattatctagcagaattgcacacacactgacaatttggtccaaatgaattctaggaaatctgattaaactcagagggtaatgaaaatatttgtagtatttatattgtgcttagtatttgccaggtactgtcctgaatcatttgcatggtttaatctcttagtcctcccaacagtctattgggaggtattactaacagtctgtagggaagtactattactagccccatcccag

SEQ ID NO: 10925 - DNA, 1080 bp, Homo sapiens
atgacgtaaactacatcaggtggtgttaagtgctgtgaagaaatggaaaggatgagctaaacaggagtccagagtgtgcaggtgaggtgggtattacagggatcagcctttcagctgaggcagcagatcatgcaactgtgagtgagggaggcctctgggtagggggaggagtgagggctgagagctgcagtagagcatccttgggcatgttctgggaacagacagcactgtgtctgagtatgtgttgtgatgggagagggaaaaggagcagtgataggaaatgcaatcagagaggtcatggggccacattgtccagtgccttgcatgtgagccaggcaacccttggagagttttagcaaagaagtggatcaccgggtctgacatatgaaaaatagactgttagtgctgcaaaggtgagggcagcaagaaacacttagaggcatttacaataatggtttggaccagtttggtacaagcagagatggtgagatgtgatcagagatgtggttggatatactttgaaggtagagctgatgggatttgccaaaggaatggaaattgagtgtgagaaaaagagagtcaagggtggcctcaacatctttggattaaagaactcatagaatagagccttactcactgagatagggagaatggtgaagggaagagactgtgaggggtagttcaggagattgttttgagtcaagtaaagtcagagatgccttttagatatcccaagtactgtggtgggtagagtttgtcatatttgatgaacttatagaagtcaatatctgaccaaagcaagcataggagaccatgctgtccaatgtgctgaagagacaggcttgggccagactacactggccttggggagcactttggagatttcagccctcatcctaaaagcaacaggaatccatgagtttggggtatcagattaagagttccaaactgggactggctgcagtctggcaacgagtttggagttggggattgataggagtaagagtggatgcaggaatatttgttaggaaatacaacagtccagacaagacactgtggtggcttaggtcatgtggtggt

SEQ ID NO: 10926 - DNA, 1151 bp, Homo sapiens
aattagtagatgtctctcctcgtgtcataggttaatgcttgaacttggctctggattgcatttgcatgtttctcttcttgctaatcaatgcttctaagtctttactgtatcaagagcctattcttcattattaattttgtttttagatcaatgtaaaatacatttaagtctttctcatatttcaaagcataaaaataaacaaacctcctctggccattctagctccttcttccctccagagctaggcttctggaacaagttatcctgttatagagcttccacagcttcacttgcttttaatcttactgactgcagtctaatttctgccctccccagttcaatgaagctcctccttcaatgactgctaattatgtcccagttgttgaaactgatggacattgccctattcttatttcacttagttcttctgccccatttgacactgatgagaaatctcatttgtcttcagtgtccttgctttctcctctatgttcagtctttctcacgctccttgtaggctcttcctcttcgatctgtcccttaaatattggtatgacaccactggatgaactcatctagtcccatggttagagttaccactgatgtgctgaccctccaaactagaatttccaacccaagcttgttggaatatctagttgctttattagatatgcaaaagcaacagaaattttgcataaagcttctctcataatctttttcagcagacccgatagttctcttttttcccctttcctagtcaatatcatcagcacctgtgtacttatcttaagcagaaaccaggaagtcatccctcttcagcctcaccttctacatccagtagtcacaaagtcctgatgtttttgccttcttcttattaaatttctgtcccttctttcacccttttcacagctatattttgattcaggctctctatatttctctgttaaattactacacatagtctgttatccagttcccctgcttcgagttgctatttgtctaattcactctccacactgcaactggtcaactttctaaattgcagatctgttcatgtcacttccctcctcaaagttcttcagtggtactcttaaccttcaggataaaacttatccctttatggtatagctcatgattacagctattatctc

SEQ ID NO: 10927 - DNA, 1090 bp, Homo sapiens
gcctgctttaaaattatctgccggaaaaggactccagagatagtgccactggagctcaggaagagttaatatgttcaagaaaatgcaggagggcatttctttcaggtagatgcctaggctctgcctactttgcatgcttctatctgactatgtaaggcaaaaatttatagaagtataatcatgcctttgctgcaaaatgagaaatagacatttaagaagaaatttccatctcatcgaatgagcattttggtgctatagtaattgtttcaatttaaaacattcatttgtacatattttctttcttttttttttttttttttttgagatagggtctcactctgttgcccaggttggagtacagttcacaatcagctcactgtaaccttaaactcctgggttcaaaggattctcttgcctcaacctcctgagttgctgggaatacaggcacacactgccaaagctggctaattttcaaatttttgtacagatgggatctcactatgttgcttaggctggtcttgaacttgtggcctcaaacagtcctcctgcctcagtctcccaaagtgctaggattacaagtgtgagccaccacacctggtttatatatattttcaatagttttaataaaatatgtttatatttaataagatatatttatacaaattttcagtagttttataacaacaaagtcccttagaggcagaggatagactttttttaaatttctgagacatggtctcactcttatcactaaggctggagggcactgcatgatcattgttcactgcagcctcaacctcccgggctcacgtgatccacccacctcagcctcccaagtagctgggaccacaaatatgtgacaccatgcccagctattgtttttaatttttttttttttaagacatggtggtctcactacattgtacaggctgatctcaaactcctggtttcaagcaatcttctggtctcagcctcccaaagtgctgggactacaggcatgagccaccacacctggctagagaacagacttttaacaacaaaaaagtactttttattctaaggttgaatttaggaggctgtataaagtaaa

SEQ ID NO: 10928 - DNA, 1029 bp, Homo sapiens
tgctttcttaagatatagactatgttccaaagagctcgtatccaagacaaatagaacacggcagaattatacacgtgtggtggtggggaaacaggtcatattaagtctggtggagtggagggaggcatatgagaagacttggaagagtggatagagtgtggataggtgagatgtgcacacgtgcctggcagggcagctggagctgggaaacccaggcgtgtttgggacacagccagtagtccatcttggcagcgcatgtgttacgtgtagggaagaagttagagatcaagctggaggggaggatgggccatactgtggagattttgcataccatgcagaggaattgtatttaattctctatgcagtagagatccattgaaggagggccatgtgtgcgcatgcatttttgtgtgtaatttggggttgtttgctcatttgttttcatcatggaaaaatactgatgaaagtgggcttcaggaatattaatatagccaggggccgggggaggcagtggattagcatagggagtagacggaggaagcgagacccattaccagagaggagtagtatggaagactagaatgagggtgaggcaacaggtataaaaaacatctccatgttttgggaaagaaaaaaacaataggacatggctactgctttgcatatggggttgcacctatcaaattaactccagattagaacatgcatacttgtcatgttttgcatttctagtaccagggatttaattcttttaaaattcaattctgttgaaattttactccatgaagcaatgcgtttttgagagctaatcctgatatattcaaatctcaatgacttaagtttatggagtggacttcttttaaattagtgattccctgatttgcccgactgttggaatttccagggcatgttgaaaatacagattatcagactcttaactctgcagatgtatttagtgattctaaaatggtacccaggaatctggatttttcccaggggccctgtgtaattcatatttatgagcaggca

SEQ ID NO: 10929 - DNA, 1006 bp, Homo sapiens
tttctaaatttctcttaaatctgcctgtcttctcttcttcaggcctactgagaaattccttatgtccaagtatgttcctagtcccaactgccacaatctatcactacattgcttcaacaacctctaatcttcaaccttccaattctctctctatactgtaataataaattatctttttaatacataaatctgatatttctcttcaaatctttgtaaaacttcccttcccactacacttaagagcttggattctatcctaacatgttttacaaagcccttcaaaaaccaggtcctgctaacctctcttcaaacccaatcactcacagtctacgttccaaccatattaaatcactttcaattccttaaatatcctattctctttgccagaaatattttttcttccccctaccgcatctctacatttgactaactcctacttactcttcaaggtccagtctactcatctctaccttgagcaagcagggggaacaaaaaaactttccatggccttcaaagtctatctgcttctagaacgttgtacctttatcacactatttctaattgcctctttttctgtttcctccaccggattgttagagcaggaaccatgtctaacttgatctttgtatctccaatgcctagcgaacaggtattcaatatttattgagaaaaggaaggaaggaaattttcccagaaacaccacagtagcacatctttcaaatcacagcagtatgtcatacttaggtaagtaaatatataaaaataagatccacaagaaggattttcctgttgtctactgtcccaggacctagaacagtggccatcacatagtcagtatagcactgttaaacaaatgaataaaacagtgaattacatttctaaaagtttatataaatgttatatttgtataatgagctttctaaatgctcttttaatttatatataagcataaagatacggcaagcagttagttttacaaatctcctaataatacatacaacctatt

SEQ ID NO: 10930 - DNA, 1080 bp, Homo sapiens
cggagtgcgcatgcgcagcggcgggggttgttccggctgcctttcactgaggggacccgccagtttctaactcagtggcgtttgccctgattcccggggcctggctttcagcgtagcaattctgccggcgaagaaggtgagcgcagtgctgtgtggcagcagagctccttaggacgaggagcagcgggacgaggaagggcagactggtgaaatcgcaaactgggcgtctgttccggcgccggacccctatttgcaaaggtgggtggcccgtccggagcgggaaaacattccggaagtggagggccgggccagcgtgattgacaagcgggaacccctgtgtggggacgggtaggcctaggaaggttgtgcctgcggtggaactgggcggtgcgcagaagtgggcattaacagcagccgcgtgtctgggtcttagatttggcccagctgtgttgagcttttcatggattatcttacgtagataagacactgcaacagtgagtgagcgcttgtaacccacctgtctcttacggaaactgagccccagcgatgctaactttagcaaggatacagctgggatcctaaacttggcaatcagagcccagagccgataaagttagctgcatgagtctagcttcccccagggcgggaatcgaggcggagcagggtacagtacggaggccaggaatgagtgcacttgaccagattgttgacggaagtgtcataaaaatggacttaaatgctgataagcagctgtttgggttccacacagggtgcgagctcaggatgcacgttggaggggacacagggccagagcaaggtgggaatgcgggtattatgggccaggccatcctccagctggtggagcaccgcagtactgcagtgtgtggccctggcttaacagcagtgcggaaaagcttttttcttggggctgtggtgctttccaggtgtgtgaagttaaaacattttagggccatacggtagatagtacctgccacatagttgtcttggtcagccccggctgccatgacaaaataccataaactgggtggcttagacacagaaatgtgttttctcacagtc

SEQ ID NO: 10931 - DNA, 1143 bp, Homo sapiens
aggcccgagctgagtagatgaggctgggagcctgaccagtctcaggctgaccagtgctctgtcttgagaggagctgctggtcagctttttgtcttgggattcagaacgaggagacatgaagactttttacttggcagtgggagctgaagctgaaaggtccaggggctgatgaggccacgtgtaagcgaaagtttgggataagcagaaaccgagtgcgctgagggagtgagattgtggctgtatccggcacctggctgagcaggagagtgaaccccgtgggtgtgtgtttgctggtgacgttcctggagctgtcttgaagtccgagctgccttgcagcttgtagtctgcctctgtttttggctttcccagatagtttcaattcttactctcagtttgtgaacctcccttcagtgaacctcccttcacttatgctggatatctcttgcaaccggatgagcttcactaaagcagagtcatttggacctggattcgaatccctggttttccactttttagctgtgactttgagcaattatttaatttctgtaagcatcagtatccagtagctgtatccttatagtgttgtacagattaaatgagataataaaagcaaaagaccactgtagagtgtttaacacataggaggtactcaaaaatttgttaggtacctttcttcccctttccttcatgtgttaaagctttttcagtacatacccctctctcaggattgaattgtaaatcatgttttttgattacccttcttgtaataattcctctacctctgtagtcatgtttttcttttttcattttttcttgtccccagaatgtctaacaaaacagccaaatatacctctgtgaagacagagggtaaaataatgctagttctgtgagttctctcttcttgtgcaaatccataaactgccaccaatctgtagtcattttaattgcccctaaaccgaagagcatcgtggcaactacctttcccctcgtaaatagagtgacactatcactagtcttattgaggccaaagttataaagatgggctctcgatctactaatattagtaaaatgggtttgggacttactaacatttgtgcttagaagagacagacctggcaaagagcttggagaagtgagttccaa

SEQ ID NO: 10932 - DNA, 1068 bp, Homo sapiens
aacccctaggctcaagcaatcctccctccttggcctcccatagtgctgagattacaggcatgagccactgtacctgacccctttcaccttgtttagcctgacaacccatcttctccctctcaggtctttccatctcagtcttctgcactccaggcttctgcgtcttcttcctctgctcagcctttaattgtcgatgtttctggttctatagcttcatcttcttgtgtgcagtctctgtgaatgtaccctgtggctttattacctttgacattcttctgtcttctaaatcatctcctgaatagagtgttttctcctgtcctgggtgtcccgcagcccatagaagcagccatgctgtgggacaccctgagtggggtttgtgttacctgttgtgcctaccatgcccttccccgccgtggatgcacaggtgccccaccttagctgccccagatgctgtttatccttgatagtcaccttttaagccttatacaggtctatcaagttgagtcaccattaccacttggtgtgtgctgtgccttgtgtaatactgcagttccgggagtcatccaacctggaatgcatgctttgcggggatctatgatgccctcgaattgtatgttacatgtgaacctgtgagcattttctaggggctctgcacctttgtgtcctcagctctgagccccatgcttgctgcaaccagcaggtgttcagagtgaatgaatttgcttatcttggcataaatcatgtaactgttgatgataccccaggaaggtgagcctttggttataaatccttttaacattttccagtctaaaagttttgtggtcttattacacgatgtagaaaacagtgggcctcagttattcttttgctgttgtgccggagtataccacggttgtttttgaaagataactttgaccatacccttaggaacttcctcagctcactttcaaatggagggcactggctttctaaccattgtgtctcccagcccagtgacagctgaagctgactgcttccgatatcacagacagcacagaagagccgccctccaggtgctgctgggaaatg

SEQ ID NO: 10933 - DNA, 1045 bp, Homo sapiens
cagtattgtatcctccaacgaaaaaagacaatttgagtattaggagtccccctcccttctcctataatttcatataaaagccttccaacttgtagcggactccagaacactttgaactctgttggtatgtcttcccagattgatcctcacatttggcctccagtaaacctttatcagattatttctacctcaagaaccttcgttttagacaacagtgcatatatgtttgtaattgttaccttgatgggttgatccttttatcattataaaatgcatctctttatcagcattttttgtcttagtctgttttgtctgatactagtataggcattcctgctttctttttttgagacggagtttcactcttgttgcccaggctggagtgcagtggcacaatctcagctcactgcagcctccgcctcccggattcaagtgattctcctgcctcatcctcccaggtagcagggattacaggcatgtaccactatacctggctaattttttgtatttggtggagacggggtttcaccaggttggtcaggctggtattgaattcctgatctcaggtaatccacccacctcggcctcccaaagttctgggattataggtgtgagccactgtgcctggcctgcattccagctttcttgtagctatttgtgtgatactttttcatcattttactttcagtctgtgtttttggatctaaggtatatctcttggaaacaataacatatagttggatagtttttaaaatccagactgacattctctgtcttttggattgtgatattatgaaatatatctctggtctttatccctgttttcaggcatacactcctaaaattcgagcagtctccaaagtgataaatgtcttttttgtatgctaatgagttgacttatggctgacatcccctagtttcagaatggagggctggtcacctgaaagaccaaggcccgattaaagggttgggacttttcagccctacccctaattcctggtaccaattgtctatcttagtccattttctgttacttatagcagaa

SEQ ID NO: 10934 - DNA, 1029 bp, Homo sapiens
ccccaccctacggtcacctctatgttaccagacactcctgttactcaggagattacaaaggtctcaggagctctgtgtcaggaaccgggttcaaagaccacgtattagtgcaaaagattgtataccccaatctacaagagttttaggtgccccgtgtctggaatcatgggcagagaccaagtatgtatttcttatcgtgggctactatgacagtaatgccacagactgggtggagaaatttatttctcccagttccggcggctagaagtccagggtcaatatgtttgatttctgttctcttgaagcttctctctcagtggcttgcaggtgactgtcttcttgctgtgtcctaacgtggtccttcctctgtgggccgacatcgctggtgtccctcttcctatgggggatactagtcggattagagccccactctaatgacctcacttaaccaattatctccttaaaggccctatctccaaatacactgagggtcagggctttcacttatgaattttggggagggtacaattcagttcatgagactctctcctccaagttgacgtaaaagccaggggacagtgagggggacgggcagttatgaagcatcattaattctccttagaagtgctgcttttcttctgtcagtgaacactgtgacccattctgcttccaaccttgtggactagtcaaagtagtgagaggaacagagtcctaacgcctgagagttgtaaaatgagtgtcagcatgtggtggctgccttttttttttttttttaacggatagactttattttctagaagagttttaggtttaaagaaaattgaggtcaggcatggtggttcacgcctgtaatcccagcactttgggaggccaaggcaggcagatcatgaggtcaggagtttgagaccatcttggccaacatggtgaaaccccatctctagcaaaaatataaaaaatgagtcaggcatggtggcgcgcgcctgtagtcccagctactcgggaggctgaggcaggagaattgcttgaacc

SEQ ID NO: 10935 - DNA, 1047 bp, Homo sapiens
catgtgtcctttaatatctggagatgtattaacctcttcagttcatgtgaggggaacataattacatagtaaagataaactcattttttaattgaggtaagcatttcaaatagaaatcatttttccagtcctttttttagagttgtgttacatgtggttatatctagggcctttcaaaatctattttcagcttacatgattttcctttgttatagtactaaaggagatgattagcaatatctagagttctgaaaatgaatatttaaatagtttcaggaataaaaagtacaaaagaagactggttaaaatttgttgctacaaagaaaaggacacagaaagacagccaagagagaggtaaagtcatctttttaaatcttcattcacttatctccctatctggtatatggaaattggattatggttatgatatgattgtaaagtatgattttatccatgttcttttttttttttcagtcattcagtgtttgtgtttgagtggtaggaggacatttttgtgttgtcgtgctgtggaatgaaaggctgagctttattttattttaataggaaaataagtcttatcacaatgagttagctaagaggtttgcatattttacctgtataggaccagacagcaaatactttaggttttctgggtcataaggtgtctgtcctgactactcagctctgactctgtttcagggaaatggctgcagataatatgtagatgagtatcagctgtgttctgattaactatttatttatttatttatttatttatttattttgagacagagtctcactctgtcacccaggctggagtgcagtggcgtcatcttggctcactgcaacctctgcctcccaggttcaagcgattttctccctcagcttcccaagtagctgggactgcagttgcataccaccacgcccagctaatttttgtatttttagtagaggcagggtttcaccgtgttggccaggccggtcccaaactcctgacatcaggtaatccacctgcctcggcctcccaaagtgctgggattacagaca

SEQ ID NO: 10936 - DNA, 1050 bp, Homo sapiens
actgtgcgcctgtcacccaggccagaatagtgtttgaagaagagtcatagctccaaaataacctgaaaactaaaaatatacatatataaaaataccttggatctaaacttaagagttttttttacaccgcatgttctcactcatagatgggaattgaacaatgagaacacatggacacaggaaggggaacatcacactctggggactgttgtggggtggggggaggggggatggatagcattaggagatatacctaatgctaaatgacgagttaatgggtgcagcacaccagcatggcacatgtatacatatgtaactaatctgcacgttgtgcacatgtaccctaaaacttaaagtataataataaaaaaaaagagtttttttttaacttaaaaatggttgaaatttaaaatgttgtaaagttgaaaaagagccccttagaaaggaatgattcagcattactgatggcattttaaaaaggaaatgtatctgtgagacagctttagaaaagttttgcagcttggataccgtaaactatgcactaatgagcttcaacccattttcttgcttattttgtcaaccctgacaccaaggatagttaccagctgctgaagaagcactttctggacattgggcagctttttcttttggagccaactctattctttttcagggttatagttaaatcattcaacacaaaaatatgtacttacacagttttagagcttgtcacattggtgacctgatgaatgccacttaaattacctagattcatctttaagcagaattgttttcccttcagatgcttagaaagattgttagtttcttttatatctttaagttctaaatcacaaaatcatatggcaagaaaaaccccagatttcttttccaatctatgaataaacataaagagacagttaatacttaattgatctatctgaactatgatttttaacttctctcattgtttttatttttttattttattttattttattttgagatggagtctcgcactttcacccagcctggagtgcggtggtgtgatct

SEQ ID NO: 10937 - DNA, 1050 bp, Homo sapiens
tcgtctcaaactgttggactcaagacatctacctgcctcagcctccaaaggtgctgggattacaggtgtgtaccactgtacccagcctcagtttgttaatattttacaataatttagaagtagaaccctttcttaaggctgggcgcgctggctcacacctgtaatcccagcactttgggaggccgaggtgggtggatcacgaggtcaggaaatcgagaccatcctaacacagatcgagaccatcctaacacagatcgagaccatcctgactaacatggtgaaacccccgtctctatgaaaaatacaaaaaattagccgggcttggtggtgggcgcctgtagtcccagctactcaggaggctgaggcaggagaatggtgtgaacctgggaggcggagcttgcagtgagctgagatcgcgccactgcagtccagcctgggcgacagagcaagactccgtttcaaaaaaaaaaaaaaacaaataacaaaaaaagaagtagaaccctttcttaagagcattctcaggtcttctatcttaattactgtagttatttccagtcatgttttataatcaggtgctatttttcattgtggcataataagtaatatatttttgtaaatcatgttgaagtgcttgagacaatacaagcaattatttgctaaaatttagaccagggtctcaaaacaacaattacatttttagataatggtcacagtaagtcttttcagaaaaaagcaacgaagaaagctctagaccaatgagattttagtcatcattaatcaatgccaagcgaaaaaatcttaagatgtatttaaatttgtgatgccagtgtgattcagaaatttgaaaaatggatttcaaagtaatgctgtgagcagataggtcattgtataaacataactaatggttcattcattcattcctacaataatgattcagtgtcagatttgggtgttgaaaatacagcagagaacaaacacaacagaaggtccatatttgcggagcctacattttgtgggggaagagagatgataaacaaaatgaatgagtta

SEQ ID NO: 10938 - DNA, 1024 bp, Homo sapiens
ataggaaaaaaggacaaagagcaactagtcagagaggatttgcaagtaaatcagtaaatgggaagagatgttcaatctgagtagtcagtgaatgtaaattaaggaagtttactttttttcccattaatttacaaaaattttaaatatgataatatacagtgacaaaattttttttttttttgagatggagtctcgctctgtcgcccaggctggagtgcactgggcaatctcggctcactgcaagctccgcctctcgggttcatgcccttctcctgcctcagcctcccaagtagctgggactacaggcgcctgccaccgcgctcggctaactttttgtgtttttagtagagacggggtttcaccgtggtctcgatctcctgacctcgtgatctgcctgcctcagcctcccaaagtgctgggattacaggcgtgagccaccacgcccggccccaaaatttttaaataatgataatatacagtgtcggaaagtgtgtagaggtagaagtgtgaattgctgtgaactttgagaacgtggattggcagtctgtattaagatctaaaatgcatacagtgcttgggcccagcagtctcacagaagccataggtgattgtatgtcagttcccaaataccactcgttagagagaagcactgtttaacatctagtatctcatttagaccctgtttgagcatagatcatatgtgtgtggaacataaaagtaatcgaagtatgctcattctttttttaacatatctttccaggcttctatatagttaaataaataatgctccttgacatttatgtatttatttatttagatggagtctatttctgtcgcccaggttggagttcagtggtgtgatctcagctcactgcaacctctgcctttcgggttcaagcaattctcctgccttagcctctcaagctgggactataggcatgcaccaccattcccggctaatttttgtatttttagtagagacggggtttcgtcatgttggccaggctggtctcgaactcctgac

SEQ ID NO: 10939 - DNA, 1059 bp, Homo sapiens
atgtatgcagatggtccctgacttaacgatggttcatcttaatgattttttgactttataattattttttgactttataattttttgactttatataaaccatattttgggtgcccacacgtctattctgtttttcactttcagtacaccagtcaacaaattacatgagctattcaacactttactttaaataggctttgtgttaggtgatttttgcccaaatataggctaatgtaagtgttttgagcatgtttaaggtaggtgaggctaagtaagctgtatttgataggttaggcgtattaaatgtatttttgacttatgatatttttcaaactatgatgggtttactaggacataatctcatcatcagttgaggagcatctgtatatgtatgtgtttagatagatataattagatatctatatataatagattctatgctatgggcattgtaagttctaaattgcttcagtggcattattgtacattcttacataagattgaagaattttgtgattttgattaatttatatccttcaaagtgaccaggaaggtagagtttgcatgcagaaaatttgcatgtatattaattccataaataatgtttgtagttaaattttcattttgtttaaacattttttacaagatagagtttactcagtgctgttatttagcagctgtgtgtatgacttcataatttagggggctgtctgttttgtgttctaagccacgtggctgctgtggtgactgctttagaaactttcagttccctttgctgtgaaacaggtttcagtgcatcgtccctgtgtataaggtcaggtttcttacatggactcactctgtttctgtaaatttgtctgagaattttcaaggcagtgctttcatggcctctcctctaattttgtgtgtgtgtgtttgtgtgtgtctgtgtgtgatgatgaaaaagtcaaaagccctaaaattaaatcagagtttaatccatgtccctaaactagataagctgctttagaccttttccttatcccttacacgtcgctcagtaaatacttgctgattgac

SEQ ID NO: 10940 - DNA, 2012 bp, Homo sapiens
aacttcattgtgcattcaatttgcattgcctttgctgtgttcacagtggcactccatgaggcttaactatggagatcctggtgctacaagccgttaaatagttctctcttctcaacctattcccctatcctgcttttcttttcttcatagcacttattacctcctgattatattttttgtttgccttttgtctatcacctgtcattcttttaccagaccatctagtctcatatgtctatataacctttctgaaaaacatcctgtgggaaatataccatatatacagaaaaagtgcacaaacatgaatatacagtttaacaaataatataaacctgctattcatgtagccaccacccagatgaaggaaatagaatatcataagcaccgcacaatctccatttgtgcccttctccatcgtagctttctctgtcccagacaaccattgtccacaacttgttgtaataatttacttaattttcttttatagttttatcacacataatttagtttttgtctgctttttgaactttacatgaatggaataatattgcatatattatttaatgctttttctttcatttaacatttttttttgtgtgtgtgtgagattctccaggttgttgtacacagtgctagttatttcattttgttatggtatagtatcccattgtatgattgtaccacagtttatccattttttagttgatgggttttgacttgctttcattgtttgggctattatgaatagtgctgctctgcacctgttgtacatatagcctggtgaacatgtttgcgaatttctatgagcgtgatcacggtggtgtagaattgccaatcttcaacctgcctgtattttccaaagcgatcataccaatttatttaccttccagcagtgtatgagaattctctattctcaccatcattggatattgtcagattttaacatttggctcaactgatgggtgtataatggtatcctatggtacttataatttgcattatccctagttactaataagcttgagcaatttttcatatttttatttcgatttcctaatttatgaaatgcctgtttaagtcttcagccatttcaaatgttacctgtcttttcaaaatgatctataggagttctttgtataatatatattctggcccctagtcctttattctttgtatgtgttgcaaatatcttcatctctgcagtttactctttttgtggtgtcctttgataaaattctcaatttggtgaatgtaattgaatttattaatttttctctttgttatgtatttttgtgtctttaagaaatttttccctatgtagggaagaaggacaaaaattgtctttcataattagttctttaacccttcataactttgagtatataaattattgtgaccatctttgaatctacagtagttgaattgcatatatagaggcttgagttcttaaattattctttccagggtgaatattagcatatcacaataggacagtagggacagtggctttttcgctaatgaaatctaagatttttccttttctgctcatgaaaaatgtttctgcttaaattgtaatgagtgtacaagaggcataaatccacagtgggtacaaatgtcaaagattatggtttaaaccagcaaaatatgtcttcttagatatacgaaacattttgtcaaatagcccctggcatcatctgggctaaatgaagaatcaccaggacatgtgatacagtgaaactattccacttatagtaacagcacttagtaattgctttcattaatccaggcaggttaatattctatctacttgcataacaatgtcaaaaaatctattatctactgaaaccttttatatagcaagttaagctcctatttctttcataaagattgagattcaaatattaatccaaactactcagaatcactttctcttcctcacttttctgatacccccactggagagtgactgatcagtgcattatctgtcacctcagagctcagagtgcccctct

SEQ ID NO: 10941 - DNA, 1049 bp, Homo sapiens
ttgttttcttacggatatatacctgaaactattcttgttaagtgagtcaacaaggcccacctggcagaagaggaaacccaagaacattaaatcagttaagatggaggccaaggcgggtggatcactggagctcacgaattcaagaccagcttgggcaacatggcgaaagttcatctctacaaaaaatacaaaactagccaggcatgatggcgtgcacctgtagtcacagctactcaggaggctgaggtgggaggctggcttgggtctgggaggcagaggttgcagtgagccaagattgtgcctctgcactccagcctgggtgatagagccagactttgtatatatatgtgtgtgtacatatatatatatgtgtgtgtgtgtgtgtatatatgtaatacatatatattacatatctaatatatataatatatatgtaataaacatcatgtatatatgatgtttattagccctccaatgcttgaaatcaggggttggaatcaaggctaaccaactctggtctggtcaccatcactgaatgcttgcggtagccatgtgaacattgtttattgtcgtatactcctgggagagtcccagggatgagcttttataaagttgcagacgggaaagggactctcactttggagagaattaagcatgtcacccagttgcctaacaagttattgctgtgcaggcaaaaaacagacaaaagactcacccaactctaagatttttttgatggacttctctaagttcattatgataaagttaatattatgatttttccagttctcaatattttgggtctaaccctttttttattactttatgtatatgttctgggctccgtagactctctggagtgacaagaaaatcttgaaaaataaaaggcgaggtctattggagagctgttcgtggatgattctgatacgtgctcttggttaagaatcactgctctggttttcttcccagtgcctcttacccaccactgttagatcagttctttaaacaccacttaaactcccacttttgtcagcaacctcctcttgaca

SEQ ID NO: 10942 - DNA, 1062 bp, Homo sapiens
tgtgagcccttcaaaggcaaaaattgtgttctttggttttgttttcctagggccttgcacagcacttgccactcttgattaagcatgcttaagaaatgcttgttgagtgagtgcgtgaaaggggggccaataacttgtatggttatttgtacgccatcaaacttttttttttgagatggagtctcgctctgtcgcccaggctggaatgcagtggcacaatctcagcgcactgcaacctccgcttcccgggttcaggcaatactcttgcctcagcctcccgagtagctggaattacagtcgcgcaccaccatgcccagctaatttttgtatttttaatagagacggggtttcatcacgttggctaggctggtctcgaacttctgacctcatgtgatccacccaccttggcctcccaaagtgctgatttacaggcgtgagccaccgcacctggctcatcaaacgtttgatttatcggtttcctagcatataaactagctgcgaagatgtgtatttttttgagaagccatgtggagagagtaggggacacagaatctgctcttcaggcatgctgacagcaaaaagtgactactagtaggccatgagggatggaagagagaaatactataaaaagcatagttgtctggggctatttaaggaagacacaataacacactgcacatcccaggacccctttcaggcatcactataatagcatggtgtaagaactgtgtcctctcagtcctgttcagcttcagccactactatcctttgtctattaatacagcaccaaccacttggtcccaaaggaacgttctggcgagaaatgtgcagagagaatcagttcgccagcaggtgcgattctggaattgtttggctgccagagacccggtatttggtgtgtccgtcattactgggtgtttgtgtccccaagccagagtcatcatgttgaccatcctcctgaactggggctctggttggattcccacctgtttacctggtgccttaacgttcttctccacttatcttgccatacccttcctggagaggaaagaagacaattaa

SEQ ID NO: 10943 - DNA, 1677 bp, Homo sapiens
tcttgctttgttgcccaggctggtctcaaagtcctggcctcaagtgatcctcccttctcggcctcccaaatcctgggattacaggggtgagccaccacacctggtcttaggtttcttaattttatttctctgtgtttctacaggcttttaggccattttactaataattacttttttttttttttttttagtttttttgagacagagtcttgctctgtcaccaggctggagtgcagtggtgcgatcttggctcattgcaaccgctggttcaagcgattctcctgcctcagcctccctagtagctgagattacaggcacgcgcgccatcacgcccagctaatttttgtatttttagtagagacagggtttcaccatgttggccaggctggtcttgaactcctgaccttgtgatctgcccacctcggcctcccaaagtgctggcattataggcgtgagccactgttcccagcctgctaatagcttttaaaaaggaatattgattttcatagttgtgtggcagacacagctgacaccactagctaacttaagcatactctgagaatgaccttgcatggcagatgcacctgacacaaaatttaagcataacctgaggatgaccctgtagcctaagaagaatgtgtattcagagttcccagctaataaatccaggaaggccaactgggagagtcattccttatctgtgagtaacatctgaaccctcagcccatcctgtggaacacaggccatataggggattgaggccctttgttttgggttagatagaggttgctagggggagggtgctaagcaagaatgctgtataaactgcatgctttttacaagcagttgccattgtctagtccagcccgtcaccactggaccaccctgtatgtaaatcctctcagtaaaccttgtctcatttactggctccaggtctctttgaaagcctctcaaacatggcgccatccctattgcagccattagagtccggcgtggcagtggtcaggactgttgaagaaggctgagaatttagggcactgtgaagtgtttaatcatttatcaaggtatcaatttagtgtctctcaaggaaaaaacatatttgttgatttgatttcatgccaacactgatgttttttgctactctatggccttgaatagtcaggcattgactgtaaccaaaaggatgtatggaaaataattgttttcttttttgagatggaatcttgctctgtcgccaggctggagtgcagtggcgcgatcttggctcactgcaacctccacctctcgggttcaagcgattctcctgcctcagcctcccgagtagctgggattacagacgcatgccaccacgcccagctaatttttgtatctttattagagatggagtttcaccatgttggccaggctgctcttgaactcctgacctcgtgatccacccacctcggcctcccaaagtgctgggattacaggtgtgagccaccgcgcccggccaaaataattgttttctatccttagtgaagagctaaagagaatttccttagaataacagcaaaggaacttaaagtgttcagaaaaacaaagtgaggatggtaggaatcctttcgcctgaaactttggaaaaaggtggatgaattacaactaagtcatcttttagctttgctttcttgatcttccttc

SEQ ID NO: 10944 - DNA, 1107 bp, Homo sapiens
agactctgttaaataaataaataaataaataaatagatagatagatagatagatagacaaataaagcaaaaaaacctattactgatatacagaaagtttgagtcttctggatagaagatcaaaccaaccacaacattccgttaagccaaagcttaatccagagcaaggtctttcttcagttctatgaagactgagagaggcagtgctatggaaggagagtttggtactagcagagactggttcatgagatttaaggaaagaagccatttccattacataaaagtgcaaataagcagcaaatgctgatgtaggggccgcagcaagtcatccagaagatctagctaagattattagtaaaggtggatgattttgaggggttcaagacttcagtggaggaaggaactgcagatgtggtggaaacagcaagagagctagaattagaagtgaagcctgaagatgtgactgaattgctgcaatctgaggataaaatgtgaatgaatgagtacttgtttcttatggatgaacatccttcttaaagatggaatctactcctggtgaagatgctgtggatattgttgaagtgacaacaaaagatgtagaatatttcacaaacttagttgataaccagtggcagaatttgagaggattgactccaattttgaaaaaagttctactgtgggtaaaatgctgccagacagtattgcctattacagagaaatctttcacgaaaggaacagttgatcaatgcattaaacttgtcttattttaagaaattgccacagccaccccaaccttcaacaaccaccaacctgatcagtcagcaggcctcagtaatgagacaagaccttctaccagcaaaaaagattgtgactcactgaagacttagatgatcattatcattttttagcaataaagtatttttaaggtatgtacattgttgttttagacataatggtattattgcacattactagactacagtatagtgtcaacataactttcatatgcactgggaaaccaaaaaatggatgtgacttgttttattgtggtatttgctctgttgtggtggtttggaactggacctgcaatgtatcagaggtatacctg

SEQ ID NO: 10945 - DNA, 1050 bp, Homo sapiens
cttggccaccaaaccctaattcagagcaaggccctaactcccttcaattcactgaaggctgagaaaggtgaggaacttgcagaaggaaagcttgaagccaatgggttggttcatgaggtttaaggaaagacaccatcttcataacataaaagggcaagtaaacagcaagtgctgatagagaagctgcagtaagttatccagaagatctagctgagatcattggtaaagctggcttcaccaaataacaaatcttcaaatgtagatgaaacgactttgtattggaagaagatgccttcaggctaggactttcatagctggagaggagaagtcaatgcttcaaagtttcaagggacaggcttttgtcccttgggctcttgttaggggctaatacagcttgtgactttgagttgaaggcaatgctcattgaacattctaaaaatcctagggcccttaagaatgatactaaatgtactctacttgtactctattaatgaaacaacaaagtctgaatgacagcacgtctgtttatagagtggtttatcaaacgtttaaagcctgctgttgagacctaccactcagaaaaaaaggttcctttcaaaatattactgctcattgacagtgtacctggtcacccaagagctctgaaagtataaggagatgactgttgttttcatacctgctaacacaacatccactgggcagccaatggatccaggagtcattttgactttcaagtcttattatataagaaatacattttataaagatatagctgctgtagatagtgattcctctgatggatctgggcaaagtctattgaaaaccttctggaaaggattcacaattctagatactgttgggaggaggtcaaattatcaacatgaacaggagtttcgaagaagttgattccaaacctcatggtgactttgagggctttaagacttcagtagagcaggctgggcatggtggcctataattccagccctttggaaggctgaagcgggtggatcacaagcatagagttcaagaccagcctgggcaacacagtga

SEQ ID NO: 10946 - DNA, 1103 bp, Homo sapiens
tgtcctgaaaccattcacatggagcctaagttaaaatgctctgggttcgggagtgtcttcctggagatcactaagggcttcaggactccttgagatggagttttcttttctctctctctcttttttttttttagtattttaaaatgtatttcgttaattagcagcagtatgccaaagttgttccattattatattttgttcattcttttgtacaagtgtcttccaatgtgatttgataatgccaacaatttgcaagtgattttattgcagcatgactttggttcccaggaatgctgaagcacaggtcctagaacagaggcttgaaaaggaaataaaagggatttgatcataaatgcttctggggttggcataccagatcattttgagctcaaataggagacaaaagaaaggatgttgggaaagctgtatggtggagaggctgaactgttggaatgaaaagacaagaagcatattattatgttaattccagcaccctagatctgcaatgctgaaaggactgccaaaactaaagcttgtcctacaccacgttcatcacaaagaaattctgtttagacgttgagttaaactttctcaactgtattcagtacaggattaagtggttgagatgggccattctgcagttacactgtttccgttccagtctgggtctcctcatgtattagctgtgtggaccttgggcaggtaactcctttgtgcctcaaagaaatggagatgacgataatacctacctcagtggggttattgtgaggataaaatgcgattaatagaaaataattagaatggtgcctgggatacatactgctcattaaacattgtatatttttattattagtgcactgtgctataataggatggctatctagaaaacatcatgcaatttgtaatgcacatttatcatccagttaattgaaagaggtagtgatgggacagtggtggcagacattgaatgctcagggatgaaaaatgagacaggttttatcttgttttgttttatttttgcctctcattaggtatccacctacttttcaaaattgtgttattttaatctttattgcatacagacatattctcagtaaattgag

SEQ ID NO: 10947 - DNA, 1215 bp, Homo sapiens
gtcagagaacacgaggcttgccaccatcttggaagccgcccaccaccatcttggaagcggcttgccaccattttgggagctctgtgagcaaggatccccggtaacattttggcgaccatgaagggacctccgaagcgtttgtctcttccagaattgaaactgtaaaactacaaatggttcttcaaatggagccccagatgcagtccatgactaagatccaccgcagacccctggaccggcctgctagcccatgctccaatgttaatgacatggaaggcacccttccggaggaaatctcaactacacaacacctactatgccccaattcagcaggaagctgttagagcagtcattggccaacctccccaacagcacttgggttttcctgttgagagaggggactgagagacaggactagctggatttcctaggccgactaagaatccctaagcctagctgggaaggtgaccgcatccacctttaaacacggggcttgcaacttagctcacacccaaccagagagttcactaaaatgctaattaggcaaaaataggaggtacagaaatagccaatcatctattgcctgagagcacagcgggagggacaaggatcaggatataaacccaggcattcgagctggcaacggcaaccccctttgggtcccctccctttgtatgggagctctgttttcactgtttcactctattaaatcttgcaactgcaaaaaagaaaaaaaaaagaatcttcaaatggctattgatgctaaagaaagttctgaaggagcattctccaatgcagttatttcctacagaagattttaagtgattttttaaaaaactgcctcttttctaaaaatatttcagcttttattttagatatgggggtacatatgtaggattgttacatgggtatattggatccaggtagtgagcatagtaagcaataggtaaaaaaatgacctcttattcaagagggtacctcattactatttacaaagtgctttcaaacattctttctcattttttctgacaactctggacgtccccccctacttttagaagaaaactaacagtcccaaaaatgttttggtgtaagtcaatatatgaacccaggtccatgtccagaactgtttaccactcacctctttataaaacggtaactgtggccaggcacggtggctcactcctgtaatcccagcactttgggaggccgagg

SEQ ID NO: 10948 - DNA, 1133 bp, Homo sapiens
tggcagtaactgaggtgattgatctgaaagctgaaattaaggccttaaaggagaaatataataaatctgtagaaaactacactgatgagaaggccaagtatgagagtaaaatccagatgtatgatgagcaggtgacaagccttgagaagaccaccaaggagagtggtgagaagatggcccacatggagaaggagttgcaaaagatgaccagcatagccaacgaaaatcacagtacccttaatacggcccaggatgagttagtgacattcagtgaggagttagctcagctttaccaccatgtgtgtctatgtaataatgaaactcccaacagggtcatgctggattactataggcagagcagagtcacccgcagtggcagcctgaaagggcccgatgatcccagaggacttttgtccccacgattagccaggcggggtgtgtcatccccggtagaaacaaggacctcatctgaaccagttgcaaaagaaagcacagaggccagcaaagaaccaagtccaactaagacccccacaatctctcctgttattactgccccaccgtcatctccagtattggatacaagtgacatccgcaaagagccaatgaatatctacaaccttaatgccataatccgggaccaaatcaagcatctgcagaaagctgtggaccggtccttgcaactgtctcgtcaaagagcagcggctcgggagctagcccccatgattgataaagacaaggaagccttaatggaagagatcctcaagctaaagtccctgctgagcaccaaacgggagcagatcgccacattgagggcggtgttgaaagccaacaagcaggtaatctcattctactggtgaaagcatgccagtcaaagctttcttaactaatttattccctaattttattgagtatcgagtatcgtcaagatgagagttcagattcttggtaagtggataaataaaactgtcccagtgccagatcagaatgtcataataattattgtttttaaatgatgaaatacctgtgcccagttaggtggaggcagaggtgaggaacttaaagcaggaacacaggagaagatctagatgcctttctgcagatgtagaaaggcagctcaggcggtgctgggctga

SEQ ID NO: 10949 - DNA, 1043 bp, Homo sapiens
tttaccttggtgggagtgctgcgaaatataggcaggaaaattattttcacctttatttagtttatctgaaaagatattcttgaaagacacatatttgagaaaggtgctgaataaatgttggtgttgataaagagaagcaacaaagcaccaaataccctcctgcaaacgcaagcagtgccagtgaatagtaggtcaagggagctcttggtctttggagaatgaggattaatttcagattcagagtgtcttctccatttgccatcatctggggaaaaccacgcccttattatctcatctacagtgcagctttcaagtcctcatctctagttcccataaatctatttatataattgacatctataccataagccataatattgtttgcactattaacatgttttatataaacctaagggcaaaatatgactttattttatgttgtcactttagagaaatagaaaagattagagtgaatgaaaccatcattctcagcaaactatcgcaaggacaaaaaaccgaacaccacaagttctcgctcataggtgggaatcgaacaatgagaacacatggacacaggaaggggaacatcacacaccggggcctgttgtggggtggggggaggggagagggatagcattaggagatttacctaatgtaaatgacgagttaatgggtgcagcacaccaacatggcacatgtatacatatgtaacaaacctgtacgttgtgcacatgtaccctagaacttaaagtaaattaaaatatatatatataaaataaataaaataaaaaaagaaaagattagagtgaatgaagaatttgtgagagatctgactctaattttaggtcggaataaaggaatttattattgtaactctgctataatttaaagacccaatgattcagagtggtcataaataaccaataccatattagataaggcttacacaaggacatgctatcctggggcattcttgatcaagccatccagataacttctctgacttcttcctaaaggttgaatattaacaatttaggtctggg

SEQ ID NO: 10950 - DNA, 1064 bp, Homo sapiens
ctgctggcaccagtctattatattcaactgtttgcccccactgtaactacataacaaccacctctattacaacagtgattataaggcattatctgagagggtatatccaaactgtaccttgcaaagggacttctatctgcaaagaatactaagaaaacatattatgagaaagtcacaataggtacccagagaagccaatctctaggttaaccaactacttccctgtccatttctccttataaatgtgaaaggagagcctacaatgaagaaatcctggaagggcatctcccagctctgagactctctgatgctatgaattcaagttattctgtccatgactgggtctggaggtcactgtgtaaaatctacgcttctaaataaatgttatgatatctcagcatactataccatacttataacatgtatgcttataacagcatactataccatatagtatagttcccaagaaaagggaatgtttcttcccccctaaaaaaaggaaaattcccattatctaatatataaaacaaacttttttgatgatttaaagtgactgtgtgttgtgaactgagtagacaaggcaggaaggagtagtgatgttcctgagttcttgctgaattctgacaacgtgccaacactttgatttctctgtcaaaatgggtgggatttgatatctaaaaaagtataccattacatatctaaaagtatattgttacatggaatatggaagccactgatttaattctggaatgtccgtcaacatgacagccacctaaactcctctgaggcattgtaaacggttaggaaaattgacctttctacacactaaatctggcttcagtggctctcctgagctctaagggagttgggcaggggcagcctgagctccggctgtgagcatagctcaactgatgtgtagttagaatgttcatggaaggcccaggcttgctacttcccattcctttattttaaatgatgtagtgagccaggcgtggtggctcatgcctgtaatccccgcactttgggaggccgaggtgggtggatcacttgagcccaggagttca

SEQ ID NO: 10951 - DNA, 1030 bp, Homo sapiens
gtaagatgccgtctcaaaaaaaaaaaaaaattggtgttttcttggtttgttttgtgttttagtttaaggagacacatttcctcatcttaaggacttttttgctgctctgatgctggtcatctagtccattcttttgctctaaactgagccttgcctcccagttcttcattgcacttcagattgtgtcttactacaaagagaaaattagtctgtgatcagtttggatcagaagaactgaaaatgtacatttagaatagaagccagggatgtgatgcacacccgtgatcccagctactcaggaggctgagatgggaggatcacttgagcctgggagttagaggctgcagtgagccgagatcgtgccactgcattccggcctgggtgacagaacaagaccctgtctctaaaaaataaaaagaagaaaagaaagaaatttaaagtaggaagggctaccgtttgcttctggccaagcttcacctctaaccataggatcttttaaaagactagttctgaggtcctttactctgagtaggtatttatggaataagccattatgtattgacattagaatcagttaaacataaatttttttctctttttatgcactacttgacatcaaaagcaaaaagaggtaagttggctataaacctgtaggtgaacctaatttttcttagtagatttgttcctgagtagctttgcttcaattaaatttctgtgaatcaaatacttttacattaggaagattgtcattggaaattcttattcttttctttgaaaatgaataagcatcttctgtaaacttagattttcaagatatctagtatttaaacattttgcttttcctttaatcaagttatacttacggtttaatttgcttgtgaagacaaggcattttcaaacacttggtttagttttgagataactgaattgtttctcccaccagaaatgtggattacatgttataagtctttcctattttcttaaaaatgaaaaaaaaagccaagaaacaactgacattggtgaaagtctg

SEQ ID NO: 10952 - DNA, 1163 bp, Homo sapiens
tggagaccatcctggccaacatggcgaaaccccgtctctactaaaaatacaaaagttaactgggcgtggtggtgcatgcctgtagtcccagctacttaggaggctgaggcaggagaatcacttgaacccgggaggcggaggttgcagtgagccgagattgcaccactgcactccagcctggcgacagagtgagactccacctcagaaaaaaaagtaatacagaaagtgaccttgcataaacttagtttctcatttctaaacaaaaataaaatgtatctcatagagtttttacaaggattcaagagcttttgcatgcaaattgtctgcaaatatatatatatagcactttttataagcattacatattaccattatttctcatccttctttcttctacatttcttctgcccgctcttccttttctgtcattgcctaaaatccctattaatgaatagtttgaaagaacatggccaggtttgcagaaagaagaaagagagatatccttttccctcccataaggactaaaagaggatgtctctgtgctttgatcattaaccatggcgtgttgattttaggacaatctataactctctgtcaatttcctacttaacagctttcaaaattaaatgttcttgcttttctactaactgttaatcatctgttcttattgaaaggtctttaatgaatattgactgtttactccaagtttataagatttttggtctaaagtggttgtcttagtccattttctgttccttataacagaatacttgaaactgggtgatttataaagaaaaggaatttgtcatttgcagttatggaggctgagaagtccaaggtcacggtgagagccttcttgctggtggggactctgcagagtcccaaagtggtgcagggcatcacatggcaagggggctgtacatgctaagtcaggtctgtcttcctcttatagagccaccaatttcactcccatcataacccatgaatccattaacccatgaatccattaatccatgaatggatttatccattcatgagagcagacctttatgatccaatcacctcttaaaaagttccacctttcaatactgccacattggagattaagtatcaacatgaattttggaggggatattcaaaccatagcagtggtatctatttaa

SEQ ID NO: 10953 - DNA, 1064 bp, Homo sapiens
cagagtgagactccatctcaaaaaaaaaaaagaatatatgagttgcccattttcaaaacaggaaaggaaaagaagaaagcacacgtccctttttttctcacttgttgaaggaaagagactgaaaaatcatgaacttatgaaagatagaggaagaggtgcctaaggagaaagagaatatttaagtaagaggattaatacctatatatgtcagaagaagaaatgtagaaatatagtttttacacggtggaaaagaaaagtttctctaaactgtagaccaacaaactttgcctcatcctcggcaaatttctggaaatggatgaattacaaatgctctctatagaatggggattgttaaaagccagtgtgagttcatcaagaatgacttgaactggactacccacattctctatctcataagaccagggaaatggtaaaataatgtgtctgaacttgggcaagcaattaaccaggcatttttttttaatattcttgagacaaatagagaaatcaattctagaggataatataattgtgtagactcataactaattgaatgatatgtgcaaagggtccaaattcattgacttatatttatgaaatatggtcttcacttagcctgaccttattattaattgctaatcttacataaagctatcgaggtcatgattctcatattttctgatttaagagagaaataaatgctaaatgacggaataggatccaaaatattcatcagataggaagaggcgaaatatttcacatgtattttaaacataaagtttaaatggatatgaaatattgtgctggaattccaagcactgtaagatggaggaaaaatgactttatagcactacctgtaaacaaagctcaatggaaatagcagtgtgatgtggctgcccaaaaatgccatgaggtttctgctgttttaataggactgggatgtctcagataagacaagacagtgccactgtactcttcactgggcatatcttaccacacatgatttcctttcttatcacctcatttttagaaggatgtgcacaaaccggaacaaggtcagagag

SEQ ID NO: 10954 - DNA, 1048 bp, Homo sapiens
tagtagagacagggtttcaccatgttggccaggatggtctcaatctcttgacctcataatcctcctgccttggcctcccaaagtgctgggattacaggtgtgagccaccgcgcccggccgctagtcaaattttaaaaggcccaaacccaaatgtgttttgtcattttaccctaggaaactcaatgattttgcttctttattcttcaagattattcatccagaccctgataggcctgagcacaggttcatttaaactagaggctatcacaggcgtcgtttggaaagttacattatacacttaacaaatgggaaatgttaggctgggctcggtggctcacgcctgtaatcccaacacttggggaggccgaggcaggtggatcaccagaggtcaggagttcgagaccagcctggccaacatagcaaaaccccatcactactgaaaatacaaaaattggcagggcatggtagtgcatgcatgtaatcccagctgctcgggaggctgaggcaggagaatcgcttgaactcgggaggcggaggctgcagtgagctgagatggagccactgcacaccagcctgggcaaaacaacgagactccatctaaaaaaaaaaggggggggggggtgaaatataaaactcttccttatacctccaagcccaagcaggtagggggaattcttagagcaaattagacttccacaggcaaattctttatcctagtgaatctggatctaccagataactatagaatcctctaaactccaaagccttggtcaacctgtcagtaccatcagcatcactgggagctcattaaaaatgtagaatctcagatctcaccccacacctaatgaatccgaatctgccctttatactgagctccccaggtaatttgcatgcatattaaagtttgaaaagaactgatctcatgaaatcttacagctaacacagagacctaggagaacaagaccgtgcaaaaattgagaagaacttctgtaaaatgctgggggcaagaaaatagggaaaacaagaaaagagaagagtgactttgagg

SEQ ID NO: 10955 - DNA, 1019 bp, Homo sapiens
ctaaagtcaggtgaaagactataaatagtaggatagatgtatgtttcatatcccaagatgggctttatctaatttgctagtcccagtgcaaaatgaaaatgcggggctccttgatcaaaaaataagaagaatttcaagacagtgatagcaatgcattaggccaaacatgaggtccttctaagcacagggctttgtttgactgcagggatccacaggccatgaagccagccatgccccagaatatgctgaaataatgattcaggatctcaacactgaatgtagctattcagaaactgggctttggtgaccaggcgctgtggctcacgcctgtaatcccaccactttgggaggctgaagcaggtggatcacgaggtcaggagtttgagaccagcctgaccaacatggtgaaaccccgtctctactaaaaatacaaaaattagccagacttggtggtgtgcacctgtaatcccagctactcaggaggttgaggcaagagaatggcttgaaaccaggaagcagaagttgcagagagctgagattgtgccactgtgctccagcctgggtgacagagtgagacactgtctccaaaaaaaaaaaaaaaagttataaaaaaaaagaaactgggctttgtttttaacaaaatatacttctaagtttctgtgcttggaaggaaaaatactaatgtgtttacgtcctggggaaaaatatttaatgctaatatatcaatgagttctaaagttgaatcttgcaatacttccttattccaatgtagccataacatgtcaactcaaaatttctaaacaactctgatatgtgtatcaggtcatactaagattataaaaatctttaaatctttaaaaaagcaacagtagacattttaattagtgtatattaaagtaaaactaatttaagaaccctactgatacttttatagtttgatgtcctttgaagttgtaaaatattaataatgtcagtcaaatgtcacaggaagatttgcctaactgaaaagagctattagt

SEQ ID NO: 10956 - DNA, 1050 bp, Homo sapiens
cctgtctcagcctcccgagtagctggggttacaggtgcctgccaccatgcacagctaatttttgtacatttttttttttttttttgagacggagtctggctctgtcgcccaggctggagtgcagtgacgcaatcttggctcactgcaagctccgcctcccgggttcacgccattctcctgcctcagcctcccgagtagctgggactacaggcgcccgccaccacgcccggctaattttttgtacttttagtagagacggagtttcaccatgttggccaggcatttttttttttttttttttttttttttttaaagagacgggattgcttggcacgggggctcacgcctgtaatcccagcactttgggagaccgagggggaggatcgcttgagcccaggagtttgagaccggcctgggaacatttcaaaaccccgtctctgcaaaaaatgaccccttgtggactgaagtgggaggatcgcttgcgctcaggaggtggaggctgtagtgagccatgatcgtttcactgtattccagcctgggcaacagagtgagaccctgtctcaaaaagagagggagagggagagagagagagagaggggaggggagtcagagagagatggggtctcactgtgttgcccaggataaggctagagtgctgtgcctattcataggtacaatcgtagctcactatagcttcgaactcatgggctcaaagctatccttctgcctcagtctcttaagtagatgggactacaggcacacaccattttttttttttttaattcaaagaaaacccagagcagttttttttaaaatggagaacctagcactaccttttctaggtgtgttacattgtctcgatattgtaaaccggctgaaactcaaaattcttgttgctattttcagggtcgaaaagtaattatcttaataggtacagccattccccttaccatgataaaatctgtaatatctgtaggagaatgatctagtgttttgagaagtagtctcaaactactggatgaccacaccctgttcaatttgggaagggta

SEQ ID NO: 10957 - DNA, 1040 bp, Homo sapiens
gttgtgctatcaagtactaagtcttacttattctttctatttttttttgtactcattaatcatccccatttcccctcctccccagctgcacttcccagcctctggtaatcattcttctactatctccatgagttcagttttgatttttttagcacccacaaataagtgagaacatgcaaagtttgtctttctgtgactgacctatttcacttagcataatgacttctggttccatccatgctgttgcaaatgatatttattgatattttgtattttattcatttcaaatgtatttatttctgctctgatctttattgtttgttctaattttgggttcggtttgctcttgctcttctagttctttaagatgaatgttaggttatttatttgaagtttttcttctttttgatgtaggccctcataggtgtaaatttccttcttagtactgctttcactgtatctcatagattttggtagttgtgtttccattattattgtttcaataaatttttcaatttccttcataatgttttcattgacccactgttcattcaggagcatattatttaacttccatgcgtttgtatatgttccaaaattcctcttgttatttatttgtagctttatttcattgtggtcagagaagatgcttgctattatttcagttttttttgaatgttttaagacttgttttgtgacctaacatgtcatctgtccttgaggatgatccatatgctcaggaggatgttctgtagccattggatgaaatgtttcataaatacttattaggttcatttgttctattctgcagattaagtctgatatttccttgtttattttctgtctagaagatctgtccaatgctgaaagtaggatttagatgtctccagctattactgtattgggatctgtctctcttttttttttttttttttttttttttgagacagagtctccctgtgtcacccaggctggagtgctgtggcacagtctcggctcactgcaagctccgtctcctgggttcacgccattctcctgcc

SEQ ID NO: 10958 - DNA, 1078 bp, Homo sapiens
aagttctttttcttctttacatttccttttgttaagtctattctactgaagtaactcttctggaagccatcctgtttcactattatttttcagtgatttgggaaacagttgtataggaaaaaaatttatgtctttgcctgtggtacatagaaatttttgtggaattctcattgccagtaagtaccagacagaattcagatatcatctctcaatcgtaatgaatctagtggtcagtgttgcagccatcagtgggcagataactgttcctccaaaagcaagttaatgcattcatttgtctatgaatgaatttttgatagacaatatttaaatattggtagacaagtaggaagctactgaagaagtgattaatctgagtgtaggtatatcaatttgtaaatgcagttacactgcaaagtaatacaactggctgaattggttagatttacacaaaaagtaaagcttcagtgatcacatggtaggtgaatgattttatttgagcattctccttgctttgaattctagtctactgttgtcctttgaaccctatgactcttaatagccaagagtgtattatggtaaagaataagtggggcgcagtggctcacgtctgtaatcccagcactttgggaggccgaagcaggaagatcatgtgagtgagcccaggagttcaagaccagcctgggcaacatacagatactctgtctcttcaagaaatgaaaaaattagctgggcatggtggtgcatgcctctagtcccagttactcagcaggctgaggtgggagatggcttgagcctagcaggtcgagggtgcaatgagcagtgattgtgccactgcactccagcctgggcaacagagtgagattctgtctcaaaaaatgagaatgcactagatacacaattttattgaactttctattatagaaaatttcaaacttatgcaaagtaaagactagtatgacccccatttacccatcatccagctttgataattattaacacatccaaatagttttatgtaataaagatttataaaacgtgtgtgtgtatatatatctatattatatatatattttatata

SEQ ID NO: 10959 - DNA, 1033 bp, Homo sapiens
ttgatctcctgacttcgtgatccgcccgcctcggcctcccaaagtactgggattacagttgtgagccaccgcgcccggcctgattggtgtgatttttatgttttggtggttatgttaaatgatggcagtaatagtacattaacagctgtgctataaaaatcaacctacttatttaactcacacattaaaattctttgaaactacacagaactataaaggaacaaggacttttagtctcactgtgtgttgtgtggtcatcttttttttaagtaaagcaatattaaaggtatattttttctgttcattagaaaaagacagtctacagccataccacccggaatgtgctcaatctcatctaatctcagaaaaagacaaatttccacgaagagtaagctgattttagaattgaaactcagtttagcattttgtgtgaagctgattcttccccctatttaaaaaaatggaatagatgtaaaattattactataaaatgattaatattgcttttctttgaattattcttttttatgattgtgtatatcgaagtcttttttgtgatgcttctcaacttctaaacaaattctggtgagtgatcctaaactgaaagttgtggcttgagggctcgaagaagtagagtgcttgtggccgggtgcagtggctctcacctgtaatcccagcactttcggaggctgaggctggcggatcatctgaggttaggagtttgagaccagcctggccaacatagtgaaactccctctctactaaaaattaaaaaattagctgggcatggtggcacgagcctgtaatcccagctacttgggagactgaggcaggagaatcgcttgaacctgggagatggaggttgcggggagctgatatcctgtcattgcaccccagcctgggggacagagcaagactctgtctcaaaaaaaaaaaaaagtagagtgcttgttcatgactctgagctcatttagtctcagccttcagtttctggtgctacatcacttgggactcacacgccaagcccctatca

SEQ ID NO: 10960 - DNA, 1063 bp, Homo sapiens
ctttctgtgaatttatacatgtatgtatatatgtaaaaacactgttgatttgcaattctgtctttccatagaaatgaactttttctatcgaaattgtttaacttaaatattttaacataaattatttacatggatctttatgtataattcatccttatatataccccttaatcacgtagtcatgagaagataactttgctttctttacagaaagggcagagaggaataagataagaaactgaaacaagcaagaatgaagagagatgtgggggagagactgctggtctccagaccacagcaatgtgttttaagataagatgaaatattttaactgcagaagggatataaaatctatgtaattacatgctgatgggatccattgcacccaggtttttgaccttggcctgtaaatgctagactatgatatcttgttattctttttctcctttgggcttttaaaaaataatttcattctcagatcattttctgtactgtttactgaggcaaaaaaaaaaaaaatctgaagtcaatcatggtcttctactttctggactgagcatttggcagaatgcagtatcttttcctgtattttgacatgaaatagcacatggcttctacaagatagttttaacttgttggggtcaccgggagttatatgatggtcaaccccttttcccaaaattcattgtggtagttttagtggaaaacgtaaatcaagaaatctcatatcatactttaataaataaataccaaatacatagtgacatataggtttgggaagaaactagtctgtggggaccattataagagaatcacattatatattacacagtatatggatattggaatgtatcacttgtggggggttctcttcattagcaaaacagtcatgtctgtctgtatataagacttttttttttttaaccaaactagcatttcattttgtgagtgacaattgacattttaaaataagcataggccgggcatagtggctcatgcctgtaatcccagcccttgggaggccgaggtgggcagatcacttcaggtcaggagtttgagacca

SEQ ID NO: 10961 - DNA, 1046 bp, Homo sapiens
acatgttaaaagttttagtttgaatgtctggaatttgtttgtttgtttgtttgttttggtgcattctagagtctccaagagtcagtcaccatgagtacccgtgaggtagatgatacttattttaacagcacctaaactggggtttaggagctatattttccaagaagtgactcagtctaattctgaaatgacaaaagcagttcatatcattttattcacacttgaactccactggagtcagggatgaaatgtcatcttctattccaagaatgaagtcttcagataatgtccaggtgcttcagaactaactagtcatcataagaacacagagtccataatttctccaatgtatagttttttgtggtttctagaagcatcaaatgaatcacagtgctaccaaactccacacagaactagtcacagtgtccttcctatccatcttaacattaggctcatttttacatttcaggtatttgtacattttcatagtataatagggatatatcaggtggaagttccactcactatcagtcacaaagtagctgtaatctgtatatatgtttttacacagtcatgtgaaatttatttatatacacacatataatcccagtttgttcacttatactgctatataatggtccattataggaatatatcctgttgaaatttgtgtgttccccagtgtttgctatagctgtttttgtaaacagtggtactgcggatattcatataaatgtctcatgtttgagaatttctctaacgaatcaaggagtggaattgccagactgtagggtatatttattggatattgctattgcttctcaggatggctgtaatttacattcccatcaacagagtgaagtttatttatatctgtactttctatagtcacattttaaatttatggtacctcattgtggtttctattgcatcctcctgattactagtgagtgtgagcatcttatcatgtttcttggctctttgaggttttgttttgtgagtttttgttgatatctctgcacattattttgttaggtatttttaag

SEQ ID NO: 10962 - DNA, 1160 bp, Homo sapiens
gatatttttggcttttggaatgttattgatcataacatcagtctgaattctctctcctacagtccccatttacttactgaactcagcaattggtggtaattttacacagtaccagaatttagagtgttgtgatgattcagaaatgtttttagttacactaaactgaatgtcattgaagattgagtctatacctacaagatgtttaatttatgttgaggatataatttacttacctagcagcttttcatccacagtgtctaaaagatgaaaagtcccccaaccccaaatctatgaaacatctcttctttcccaaatcacgtatgtaatgaagtaaatgatattttgatcttatataatttttatgtcaaaatatgtaaatgactgcatatgcctaacatatagccctgaaggatttaaaatgtctgtgagtttggagttgcaaaggtactgggcagagctttgtattggactgataggggaatgccatggcaataaagatcctgagaaatatacaacctaagtaggtatgccagatagtgacatttgttggctttggaacactggagtatttataatggaaaaatagcacagagtaatctaaaatagcaaatataattgtatagggaatgtggagtaaaggatattaaaaacttgctgggaaattagaattttcagtgggctaatgagggaaaacataaggtagttaaacaggtgatgagaggatatattaaaggctaaagaagggcatgtacaaagacagggtataaacatctcataagtgtctttttacatgtagttgattcaatcctaatacttgtagagggccagtggtgaagaggagggagcctacgcagtattcttagtctgcaggagagaaaatacacgttacctctcactatccaaattcttactagagattaaagagttagataaacttcttgagaaatctcttactgtacacattcttgccacttgatattcaaagatcaggaaccaggctgatttggacaacttgttatctacgccttactctctgaactcggaacctcataaatttggatagtgaggaatacattattcttttattcagcactaaatctattaaacatatttaaggaatggcatatgccagcctgggcaacattgtaatacccggtctc

SEQ ID NO: 10963 - DNA, 1637 bp, Homo sapiens
attgcaccactgcactccagcctgtgtgacagagtgagaccttgtctcaaaaaaaaaaaaaaaagaaagcaaaggaaaaatttatgtttataatcaagagaaaagaatgtaaaataatacatggtatataatacatgtacatataacatgatacagggatagaagtaggattataacctgttaatatggctggctacctgacttcccatgtgtttcatcaggttttgattgttaaaaaaaagttttaggaatcatgatttaattcatttttaaaagcattaatgtctatgtacttgaaatgaagtttattacttcatagttcattgaaattttaatatattttaaaatttatttttagggagtaagccctgaaccaattcatcttaagattttttcacccaacgttgtcaatttgacacttgtggatttgccaggaatgaccaaggtaaggaaggaatagttgtagatttggtcaggttgttttcacttcgttgacatcccatatgagaataatcagcttctttttgcaatcactttgatctgttagcagcatttgataacgttgagccctcctttctccttgaaacactttctttacttggcttccaggataccacactctacaggtttatctccagtctcactggccactccttttcagtctcttttgctgtttcttctcatctccccaatgtctaaacagtaagtgccccagagctcagtttatggaactctcgttttctctaggtacactttccctttgatgatttcatcagattttatggctttaactacgtaaggctctgtatattgacggcattcaaatatctccagacttgtatatctagttgctattcgacatatacacttaaatgtctaatagacatttcaaactctaataccgaattcctgacctgttcctcaactagatttggtatttctatagtcttcccccatcgcaataaatggcaactcatgccatttattggcaactcataaaaaagctgagttgatttttaattgttagttccttggccatctctgtttggtgcagtggcttatcctgtaatcccagcactttgggagatcaaggtgggaggaattctttgagaccaggagtttgagaccagcctgggcaacatagggagaccacgtctctacaaaaaatacaaaaattagtcgggcatggtggtgcacacatgtagtcccagctgaggcaagaggattgcttgagcctaggaatttgaggctacggtgagctatgattgcatcactgcactccaacctggccaacagagtgagaccctgtctctaaataaataaataaatggcaactccattctaccaattgcttagccagagtttgtagtcatccttgacactaatttatcccacattccacttcctgccagcaaatcctcttggctcttcctacctttacagtatatccagaactcaatcgtgttttataaattcatatttactgtcctgatctagccactatcatgctacctggattactgcacaataatcaataataggtcgtccttgtgatctcatcttagtagacagtgatacgattaaagtgaaaattcgattgtgtcatttcttggctcaaaacttctccagttccttgt

SEQ ID NO: 10964 - DNA, 1024 bp, Homo sapiens
gctttctcactgttttgttaccttcaagaatagttttaaatttagtattttggtaggaaattcagagatttcctagatttcagagatggaattgtatttttggacatttcctttcctctttaaagatcttgagatctgttcagtactaatagatctaatgcttctttcttatgcttccagttagtttgcacttgttaccctatatatagcttcacatatgcttcagaagcttaagcaaattaaaaaaacaaatggggactgtgagagtttgagactgttttcaattcttgataaccattttagaggaaaattaaataatgtataaattattcagactcatcgctatttcaagattttctgccatttagctcctttccttaattatccagatttaaagttctgaacttcaaataaaggtttataaatgtcttatcttctctcagcccactgtgctcagatattaatcaaaccatctaaatcactgcacaagttttatttcattcatgacgtcacactgaatgtgctctctctccttaagatttcatttggtatgtcattcatgtatagttaacaaacatttaaaaatctaattactcatttttaagttaatgtgtaacataaatatactacttatatttaaatgtagttcaccttaactgacatactaaagacagattttagcaaatattttgattcagaatgatacctcaaactaccatttttctaactgccataatcctctattaaacttatataatccatttttagattgtaagatcttaaagaatacctaaaaaaaaccctcttaaatgttgatgaattgtttttccattataaagtcatttttgacttttagaagtcaagactaatacattttctagaaaacaaggtacaaaagcacttgtgattaatggtagcactagatttctttcagcaaatccttaagagtacagaggttgaggggacttctgttgtttgtcacattccgcatttgaaacaactcacagtgactgtcagcctaaga

SEQ ID NO: 10965 - DNA, 1050 bp, Homo sapiens
tcgtgtattttatgtgtggccccagacagttcttcttccaatatggcccagggaagccaaaagattggagacccctgctagcatttaatgcttatacacgtatttacttgtaaatatgttgtttctttgataggatatgatttcaacataattacggtttatttaaaataagaaaaataaataactttcaaccattaagaggttataagactttaaagggaaagtttaatagggtataatttcaaaataattgctttttatttaaaataagaaaaatcattaaacttcaaccaataacaggttaaagaatttaaaggtaaaagacatttcaactaattacaaatactttgtttttttttagttgggctacattttaccactctaggaatagctgttaattattttttatatagggtatttttatgtatttaatgttgacaactgacgtttccaatatgcaaaaacttgcgtaactgagaaaattataataaaaatagagattgagaatatatttttaacatatatccatgagtcaaaactaatatttaatatttgggatttgaaaaattatttctggggtaagaaattttgtcacaatataatatctgtatattgtgctttttttaagagagaagtttttgatgaattgaatgttaattaaattttatctcagcatatcaccatcagaccaaaagatacagtatttttctaacaaggaaaagaaaatacatacatatatgtatttatatatacaaatttgtatatatgtaatgtatgtgtgtgtgtatacatattaatttcctctttttttttttttgtaagaattgagacagggtgtcagtatgttgcgtgggctggtcttgaacacctgcctcaagtgatcctcccaccttggcctaccaaagtgctgggatttaccatgaaccactgtgccagcttccaacgagaaaattattaaatgtgttggtttttcacagtgaaacttaattcagtttagttgaaccatatatgtgtgtgtacggcatatacaagatgaaaaagaaagggagg

SEQ ID NO: 10966 - DNA, 1047 bp, Homo sapiens
attagataaatgatttttatgaaaataaacaaacagaaagaagttacgctagagctggcacagtgaagatcactgtggtcccaggtactcaggaagattacttgaacccaggagtttgtgatcagcctgggcaacaaagtgagactctttttttaaaaagaagttacaatgtagcaaaaagacaagtatgaaataatatggtggttatggagatgaagaggtataaaagctgtactagagaaataaagcctcatgagtcttaaaggttaaccaaggaccaaaacagctattaatatcattctgcttttactatgtgtttgtgacaggggcaacaggatcatcgaccggacagacagacacaagtggaccatcagctaaagtaacagggaattatggacaatcatctgaaataccagggacaattaaatcatcatctgatgtttcagggacaatggggcaatcagatacaacatctggaccatcagttgcagtgacaaggacttctgaacaatcgtcaggagtcacggtggcatctgaaccatcagttggagtatcagggacaactggaccattagctgaaatatcagggacaaccagaccattagtttcagggttaaggacaactggatcatcagctgaaggatcagggacaactggaccttcatcaagagaatcagtgacaactagaccattagctgaaggttcagggacaagtggacaatcggttacaggatcaagagcaactggattatcagctacagaattagggacaactgtgtcttttactggaggattaggtacaagtagatcatctgctagagaaacaaggacaactggaccatcagctgacgggtcaggaacaactggaccatctgttgtgagatcagggacaactagattatcagttggagtgacaagagcaactgaatcatcacctggagtgacaggaacaactacaccatcagctgaagaatccaggacaacaggaccatctgttctagtgacaggaacaactggacaatcaggccaaggatcagggacaactgg

SEQ ID NO: 10967 - DNA, 1045 bp, Homo sapiens
tctataaaatgctattccctggaacttctcatgcctcacatcaccaggctgagaatttttttgtcttatttatttttacaatggtaaagtgattagttgtaaagaggaaaaattgccattgctactgacctaaatgattgttagtcatactgaaatgtgctcagagaatcattgctcaacatgtgaaaagcttatccttgcaataaaaatccctctattttctgatactctgataacattatatattgagaagtcacaaagatttactgatatatagcaagtgtaatttcttctttgtttcctctttactttctgtctctttttagtgccttcattgttcagggaagtgtcatgccaaggtatattgacaatactggtcctttttgagcatccaaaaacagtggtatttctcgaagctaatgattgcctattatttgtttcattagggaattaaaatttgtcagccttttctccaggattttgtttcatccagagaatattttccttcccaattgcttgcagttgacaccactatttgaatcctgatgaattatttctgcttcatgtttgccatagaccttctgctcagcttgcgtatgcttatatactttacttatcataaacttccttgtgtttgagatggggtaagcgttgttgatgatgggtagtaatagagaattattccatctacatcagatcacagttttttttttcaatgtttaataataggttttagaattctgggcaaaagtaacatctcttttttttttattatactttaagttttagggtacatgtgcacattgtgcaggttagttacatatgtatacatgtgacatgctggtgcgctgcacccactaactcgtcatctagcattaggtatatctcccatgttgtgttagtccattcctgcattgctataacaaaatacctgagactgggtaatttataaagaaaagaggtttaattgacccacggttctgcaggctgtacaggaagcataatgcaggcattgcttctgaggagacctcaggtagcttctaat

SEQ ID NO: 10968 - DNA, 1050 bp, Homo sapiens
aacactgcctcaaacttataggacccctcaaaacacagtaatgttttggatgtttttaagtaaacaaagagaatattttagaaatgttcttttgtaataatatttcatattctgaaaatcccagaggaaggttgtctatttattagcagatgcccacactacttcttccatattggtagatatgatcatgataatatatgtgctgtataactgatacattataaggcactggctgttctcaatatttacagttcataagaattacctgagattgttaaaaaggaggaatcctgactctcatccctacagactccggcttagtagatctgatatgggacccaggaatctgcatttctaacagtgtctctgttgcttctaagagcacattccagaaacaaaaattttgatcaacctagatggagttaatgcttgtgcttcaacaaaacatacatataaagacgtgcgcgcgcgcgcttgcgcacacacacacacacacacacacacacacacacacacacacacccctgctcagattaagactatagaattgcttttaaatacctcaaggatcaccacaatgccagagccatcaccattacttctttctcttactctgttcattgcttttctccttttcctctttcatttcttttctttttctttttttttttttttttttttttttttttttttttttttgagacggagtctcgctccatcgcccaggctggagtgcagtggtgcaatctcagctcactacaagctccgcctcctgggttcgcgccattctcctgcctcagcctcccgagtagctgggactacaggcgcctgccaccacacccggctaattgttttttgtattttttagtagagacggggtttcactgtgttagccaggatggtctcgatctcctgacctcatgatctgcccgcctcggcctcccaaagggctgggattacaggcttcctctttcatttctattatctttcttcttttctaacaaaggatggctctttacaaacattgctagccaatctgagcatcccttt

SEQ ID NO: 10969 - DNA, 1037 bp, Homo sapiens
tgcctagatgctgatttctgaagactgatttagggtggtggttgccaaaggttggggtggctgtggcaatttctaaaaagatgacactgaggtttgtgagatcagttgactcatctgtagcatgcaattctgttttatagccttttacccacagtagaacttctttcaaaattggaattgatctctcaaatcttgctactgctttattcactgaatttatgtagtattctgagtccttacttgccatttcaacaatgttcacagcatcttcaagaggaggagattctatctcaagaaccactttcatccataagaagcaactcctcttctgtaacagttttatcatgagattatagcaattcagtcaaatattcgagctccacttctaattctatttttcttgctatttctaccacttttgcatttattttctccactgaaatattgaactcctcaaattcaacttcttccaaactcctgttaatactgatacttcgatttgacttcctcccaaatgtactcaatgacatctaaaatagtaaattcttttcaaaagatttttaactgattttttcccagatccatcagaggaattagtatctatgcagctaaaatcttatgaaaggtatttcctaaataaaaaaaacttgaaagtcagaattactccttgattcatggctgcagaatggatgttatgttagcagtcatgaaaataacagcagtctcttcatacatctcccccagtgctcttgggtgaccaggtgcattgtcaatgagcagtaatattttgaaaagattgttttttttctgagcagtcggtctcaacagtgggcttaaaatatttagtaaaccatgctgtaaacagatatgctacatccagactttgttgttctatttacagagcacaggcagagtagagttagcgtaattcttaagtgccctagaattttcagaatgctaaatgagtattggcttcagattaaagtcagaagctacattagctactaacaagaaagtcaacctgtcttgaaattttg

SEQ ID NO: 10970 - DNA, 1114 bp, Homo sapiens
aaagtgctgggattacaggcatgagccaccgcgccaagcctaatgtggctttcttagacttgtctactcatgactagtctaagaattagactatttgtttttattttcacctatatttatctctaaaatatgttagaatcaaaagagtaagttttgaaaaacatatttattggtactaatttggtctcttcggttctagtttttttcattgacttttaaagacttaattaagagtatgcttatttcattgttaaatactatagctagatcacaggataagtaacactcatctcaaaggggtgtgtgtgtgtgtgtgtatgtgtacacacacacgagtcatgcagtacaaccagtgaattaaggcacagagtcaaataccatttcgtttatgtgactgtttgttttgtgtttttgagaagtgaattgtatttgaaatgcaaagacaatacagtagatggataattgaatgatattttaaatctccttgaaagtttaataatcataacaattttttgtgtaattaaaatatattgtcaggccaggcgcggtggctcatgtctgtaatcccagtactttgggaagctaaggcgagtggatcacgaggtcaggagatcaagaccatcctggccaacatggtgaaaccctgtctctactaaaaatacaaaaatattagctgggcgtggcagtgcatgcctgtaatcctagctactcgggaggctgaggcaggggaatccctcgaaccagggagttggaggttgcagtgagctgagatcgcaccactgcactccagcctatttgtaacagaggaagactctgtctcaaaaaaacaaaaaaagagaaatatatatatatatgtgtatatatgttataacatatatacacatatatttatacatatatgtagtcagattgtttaaactgaaatccagctatgaatgtgtaaaatataaagtgaaatatgttttttctcatttaagaaaacaaatgcattagttgaatctctctctcctctttcggaatcccaggcatcacacttatctagacatctcacttatcagaattatgtttcacacagtgatacttacataaaggatataatgcattccatctccgt

SEQ ID NO: 10971 - DNA, 1010 bp, Homo sapiens
ataaattcacaagatctgccagataaatctgagtgatgaaaaataaagggtagataactcaaccttgtaatgaaacatgttataaatctactgtaattaaaacagaggagtatgtaaataatcatagttacatttgagctgaagttgtgacctttgatttggatggctatagaagtaaaattgtgtcaatcattgcaaaatgcagatttaccccagtatattttaaaatctatgccatcctccttatctttttactttttgccccaattcagatttatgtcacctttcttctggaaattatagtaactctaactgctgttcatacttacagtattttcttcttcaagtttctcctaaaaccttagccaaaatgattgatcataaacacaaaatgtgtcaactccttacataaaatagtttaatgcctcttcattgcatccttggcaaatgtcaggcatggtaacatggaataaaagacaatttagggcccagccttggcctccctcttcagcctcatctctagcactgaaataactctgagagcttcctcttgtcccctcctgatatggttttattgtgtccccacccaaatctcatcttgaattgtagcttccataatccccacatgctgtgggagggacccagtgggaggtaattgaattatgggggtgggttttcccatgttgttctcgtgatactgaataagtctcacaagatttgatggttttataaagggcagttcccctgcacacactctcttgcctgccgccatgtaagatgtgcttttgctcttcctttgccttccaccctgattgtgaggcctccccagccatgtggaactgtgaagtcattatacctctttttccttatcaattattcagtcttgggtatttcttcttagcagtatgaaaatggactaatacccctcctatacacctggccatttctcactgcctggaacttttacctttttgcactcatttcctagcatcctatatatataattgatg

SEQ ID NO: 10972 - DNA, 1023 bp, Homo sapiens
aggtaggtaagattcttttacagaagaggaaactgagatggccatggcatagtagcttgctaaattctcacaaatagtgagggacagagtgggatttctaagccctggtaaattatataacacagtctcaaaatctgctgaaataattaaaactttctaaagattgattgtgcacacttattgtacatattctcagaatatttatttccttgctgaaatagttgttgtacttgaaaactgttgtgcttatttacattgttgttgctaagctatttaaaacacaatgtaaaatcaaaactttatttaaatagaactttggcttttatcctcagtgtattcatttaatcacaaaaagtaatgttaatgtgtttgttcctaaagtcttttgtattgctgttttgttaaatctatttgcttactgatttaattaatgatttgtctatgacagacctaattggagattactatgcttaaaaaaatgggataaagtcaaagaaataaagctgtagaaacaatttagtggaagagaaaatgctttgacaataagcagtagtctaaaaattttaagtgcgatatatattttttatctatgttttcttgctaagttaaaattaaaatgtgctagacttgaaaacagacaaaacacccctgaggttcttttacctggttttataccacagtattctttgatattagtgaattatttcagtttgcttctttgcattgttataggaatgattaacctggtgttctcctgatttattagtgctatctgaaaagcaccaatactttattatctccctggaattctttttcattttgtaagaatcattgagagactgagctatataatacttgtatagagctgtgtcttcttaaagatttaaggttaatcattataaattaatagtcattgatttcacatagtggaccagtcattgtagcaaactgaatgtacagtaaacagcctatacctctattgtccacctttcagttaacacaccacaattcactgatttcttt

SEQ ID NO: 10973 - DNA, 1048 bp, Homo sapiens
gtactccagcctgggtgacggaatgaaactccgtcttaaaaaaaaaaaaaaaaagaaagaaagaaaaagcattccagcatttcaaaagcattgaagaatgtgctctaaaggctcagaggcagagcatttaatgaaataatcagagaactgtaccatcacctctgagataattagaaatgtgtgtatgtattggatggggcttggtcctgcaaattttaggtgttactggcctttaaaaggggtggagggtactaaatatcctgtaatccttgggtggattctcttgatcaacttatctgatgcaccccaatagggtgtttccctgtggaattgtaatagaatatattagagtgtgatacatggaaggacaggtggtggtggaggatgagaagagatgttggacagtagagagatgcaatgataaataatggcagatattttagaaatagaatacatttaacctggagaccaatcagttgggtctgaggtcaggcaaggttgtgactgccaccttttagatgtgagtcactgtgtggatagtggtgcttctcaatcagacaggaatatatggacagagcagatgtgagcctgtgggagatgttgaatttatttttgaacaggttaaattttaggggtctatgggaaatattcaagtataatgtccagtataaaactgaaaatagaaatctggacttcagaagagagattgggaatggagatagatttgagaatcatgggttaataataatgaacattatagtaatgaaaagttactttaaacaaatgtaatgattcaaggaaatatatatttttaatatgatcaaggagagtatttagaaatttcaaatttccaatttattttacatagtctctccttggtctgaaaattactaggggtcaaggggtcaataatactatgatataagatgtttacttcttaattagttcttaataattgaattatcttatttctgctgacctttccttttttttttttttttttttttgagacggagtctcgctctgtcgcccaggctggagtgcagtg

SEQ ID NO: 10974 - DNA, 1110 bp, Homo sapiens
gaatattctaataagaaatcacattagacataaatttaattctgctacaattagagaaaagattgaggcttgtgaaagcttgttgaattaggatcacactcagagagtattagaatctgggctagaaccatttctcaggcttgcaaactaaaattcttttcttcatatcagtctgtcatcctgtattctttccatgaatggtcactatgtatattttttactttggctttaggataatttgccgagaagcttaattttgaagtaaaataaagtcaatgtctagtgttatttatttcttttataatgttgttcttgcaaatattctgctagatatgggaaactctatatatttaagagggatatgttcttatttagacagcccagacagaggaaacctgactatttatctaatctgtgctgatgcagaaagtcctcaattcaggattagtcaatgatagtgtaaataagtgggaaagatatgtattgctgctttcatgagcaactgagctgcagaattaataagcacaataggcacctataagctgtgggttgcctatggccctacccaaggagaacggccagttgtaaaattggttagggtgggtggtgtatttatgaggtgtccaaaaaataaaatatgagatctattataattatttggtaatactaattatttaataatatcaattttatatgatttttaatttttgtttaaaagacaatttaaatggtcttgatctgcaccctcttccttaatgctatgccgagggaaatacacacatagcaatttggacagaacacatggcaagtggcagaggaggattagaatctaagtctccagggctcctggctccttagatttctcagaaaattatgcttgtaactttatatggtcaagtaaatttactggaggagaaatctggttatccagatactggaatactaattttggcttcacctccaacccttcatataaacttttttctcatatttatttcttatctgcaaaataatatactgcagatgttatatggaattgtgaattattcacataattcggaataaagttgtttctaaattgccttcaagtatttgtgctttaaagataga

SEQ ID NO: 10975 - DNA, 1031 bp, Homo sapiens
atgcatagttccggtgtccatatgcacattaagagaaatttgtatgcttttttcccctgttagtctgtcttttgttacagaagtgtcccagctaagaacctatgagagttagggaaagaaattacacattttgtccccgtcagcacctacttgtggggaaaaaaaaaaaaaaatcaggttgtatatgtaatgtggaaccagatcatgaaacactttggactctgacatcaacattttaaacttataagaaaaacaataatgcccttatctctttctgtcactctaaattatgccttactctagcattcttcaaagagcataagccaagctgtgtcatcctttagtacttcttttatgtggcttcctcttcctggaatcactcccctgtctgccacctggaaaatatctactcttgtcccagcacttagatgaatgaaacattttctgaccttctccttccccaccccttcagggaggttattctagtttctcctttctgcttgctctgaatctagtacttatttttatcacagccttataacattattccatccattcgttcaaatctttttctattataatgtagtactattagaccgcaattacttttgcaccaacctaatacattagaaatgtaaatactagggaagtggtggtaagggggaactcatttgcataaatttaggtcatttctcttatacatacctagtaagtgttccacaattcaaggttttacccagatgtgcgtacaacctgaaaatcttcaggatgctggcaaaataagaaatttagtttaataaccctatcattgtacaatgaggaaaccaactgagataaataggatcattgagcagcactttgcatgaatattttttagttatgcctgtaagagacagcaacattatttttgtattgctgaagtgctttgagagtaatgccctggtgacagcataaacaaaatacaaaggccagtttgtttttatatataaatgggggattgttggtgaagagttgtgccagccagtacagag

SEQ ID NO: 10976 - DNA, 1051 bp, Homo sapiens
accttgctttgattatctttgtctttgtcttcagtattttactagtaaagccatgtttcgaatcctgtcaaaattgtttggagaaatgctttagagtcttgatcccacttgtttaaaatttccattgaaagctctgctgttatctgcagctgacctgggtgcaatggtttgggtacctgagtggaaattttgctcaactttaatttttcagtcagaattgtgtaagctgaaccaattgatgtatctatcatgttggctactgtttcttctgttaattgtagatctcttcagttagggcatgaacaagatgaatgttttcctcacaaattgatgtggatgttgtgtcactgcaggctttatcttcaacattgtctcatcccttcttaaaatgagttattcatttgtaaactgcccgtttgtggggaggcattgtccctgtaaactttttgaagagcatcagtgatttcaccattcttccacccaagctttaccatgaatttaatgtttaattttgctttaattttagcagaattcaagttgctctgatagggtctcttttcaaactgatgttttatccttcttagtgtctcaaactagatcttgcttagacatgttttaacaagctagtacaactttattttgatgcaaaaataattgaaacccatgcttagattttcacaatatgcatttttgaagacccccttgtatgtaatttggctaagggtctgaatttcagaaaagaaattttggctagacatataagtttgaatttattatatatgatctttcaagttacaagagtagatgagaatatctagggagagaacatgaaggagaagaggagaggggaagagggaagaggagaggaatgatgagaaggatacaggaagggaggagaggagaaggaaggggaaggagaagataggggagataacttttggaccatagatctttgagggaatataaagtgcatccactttaaaggcattaagctgatcttaatacctgatcacttacacgacaacaagctatgattcacttacaattacct

SEQ ID NO: 10977 - DNA, 1047 bp, Homo sapiens
acctccgcctccagggttcaagcgattcttctgcctcaggctcccgagtagctgggtctacaggcatgcgccaccatgcccagctaatttttgtatttttagtagagacggggtttcaccgtattggccaagctggtctcggactcctgaccccacgatacacccgcctcggcctcccaaagtgctgggattacaggcatgagccaccacgcctggccacaatgattttttgaagttattgaatgcaagcaaaatcacaaatattgtttttttgtgtgtgttctttactgaaagtagaatgtagccctcacctatgaaaatatgaatgcctttaagcaaagccttcccttaatttaaattgaacctaaaaaaatgcttcttgcagtagtgaaaaaaatatttttggtaatctaagagtgatattatttagaatttccctctctaatccttcaccaagaataaaatgaaatcttagaaacggaagaagtcttataaagattgtgactaaccctttagtttttacaggtagaaactgaatttctcatgattgattcttgctgtctaaggacctactatttatgcatacccatgcaatgaaaactaagtttaaaagcataaatagttaaaagtgtaataataattgaaaattgcagtaacgtttttcttaattgtataattattgattcaagtttaatgttctttatgtgaattacatttttagtttgagggaaaatattttttaatgaattgtttttgctttgctaagtgatctatttcaagaaacagtctttctccagaaaataaaggaaatttcaatgaaagaaaaagcactcttctgttattccaaacatgtatatttcttagatcttaaccacggaagagtaatgttgaaagaaaatcattcatgagcattgattaggaaattggtgcccattgagatatgctcagcatcaatataaacgtaatttttctttaaaagagctagttgtatgtcagttgacttgctgaaaatgcttcggttatattattaaaaacagaaatttcagt

SEQ ID NO: 10978 - DNA, 1040 bp, Homo sapiens
attttctacatgcattcttttcatcatcacatcagaaagttagatccctgtttccagtctatttataacactatccctatcagttaatgctctgattatctgcagcatgtcttatattgttatgatattatgtggttggggagaaaaagaattgttcctctttttcactttattaaaagtaatcttagagtaatgagaaaagacataagtgaccactaactctaggctgaggaaaatccagatttacttgtatatttgtggctcggaataaatttttaaaaacccaactgacttttatcattttcaaattgtgtgactgacctctagtggtcagaatatgtcacttattgagcagaacccactgtcaattagtttgttttattgaaaaattactttgaaatttagagtcagatattgatattttgtattttatttatggtagaacaatgcttttaatactttatacagtatatctgcatatgtatgaatctaactggtgcatagatggctatcaattacatcccaagaaatcaatttatggagaaaaactcaacaaaatatttgtcacttgagatacctcacaaaaaaaagacaaaatacgtcatgtactttgatgtttccttgtctgtacttgagctaaattacaaattatggtcctagagactcagaatcatagagtacaaagaaataccacctgaatcatattcttaattgtctgacttcacatggagccgtacccaaattattttagaactgtgttagctccgtagagtttctaggtctcatgacctgtgatatgacctttgtgtctttttctcatagatggagaatgaataatggggacgttgatctcacaagtgatcgatacagtatggtaggaggaaaccttgttatcaacaaccctgacaaacagaaagatgctggaatatactactgtttagcatctaataactacgggatggtcagaagcactgaagcaaccctgagctttggatgtaagtaaactgtaacttttaaaaaagggcaagcgtgtttaggtg

SEQ ID NO: 10979 - DNA, 1030 bp, Homo sapiens
cccagttatgcagaactgtgagtcaattaaacctctttcctttataaattacctagtttcagatatgtctctattagcaccatgagaacagactaatatattacctattgagaaaattcatctcaaaatattattttttcagtccttctagattgtgggttcaagctcatatacttcagcatcatttgagttcctagaccttttaaaattccttgcacactcctggagctttgtcgtaatatggtgtttgctcaagctaaactggtccaatttaaatgccatatttgcctcagagtgctatagcccttacctacttctaactaccgtcctcatcagtcactctttcaaagtacccattttgatttggcttatatatcattatttatttatttgtctctttagcattttacagtgtgtggtacacactcaatttgtgatcctaaacaatgcctttcacctttctaagcctgattttttctgtaagcctgaaggattaatacatctttcaggactgatgtgctaaataaatgaaataaagtgtctagtttgaagagtgctgtgttgtctgagtaaatgttttccttctttccctctctccttctctcttttcaatttgtttccctttgcctttatctctgtgggcatttcttcttttctccttagtttcttgccttgcgtctttcttttctactctcttctccttcttctctttccttctccctcattttctttctccaccttcctgagttccatgcagcactgatcacaatgtttgacacatatctgttgctcactaaagacaggattttttttagtaaattgagtcacaatggttatgcagctgtcagaacgagccaatattattgaaaatactgagaagttatactatattcatactgtgcataaacaaacaagtctatccattatgatatgacctgtacctgtacagagaaaagcttccatgttggagcagctctaatcctgtagaattaccatgtttaagaataactaatattgtgcctaataatta

SEQ ID NO: 10980 - DNA, 1032 bp, Homo sapiens
atttcaatatgtgttgctagaagataaaaatgtttgggggggatgggcttaatacttttacttttatattaatactttcattttaaattaaatgattttatgtgaaaatgagtaaattttaatgacatattggaaaagaaatatttttaaagaaacatggtaattcatacaatttttacctagttacttatgagatttaacaacagtgtggattttttttttttttttttgagacagagtcttgctctgttgcccaggctggagtgcagtggcataatctcggctcactgcaacctctgcctcccaggctcaagcagtttttgtgcctcagcctcccatatagctgggattatagatgtgtgccactaaacctggctaattttgtgtatttttagtagagatggggtttcaccatgttagccaggctggtctcgaattcctggcctcaaactgatctgcccccctcagcctcccaaagtgttgggattacaggtgtgagctaccgtgcccagccagtgtgaaaaatttgatacagatttttatattgaatcaaataaccatcaacttggtgcttttacttactaaaatgaaagcatttcctgtaaccgataggtatattggaatgtatggcaaattaagaagtagctgattattttctaacaaaaccatttcaccagttggaaaactaggtattttattctgaccagattctcattaacgtaagcaaaccaaagaattcttattacacacacttagagggtcttgtagtagtaatcttaggggtgagacctcatccctaagatgatgacagatttgaaagtttaaatttcattgaagtataactttccaaaagtatttaagtttatgtgcaagttttttttttaataccctgccagagtaggtaaattatcattagatagacctttcattttaaatgagctacatatactttttatttttggtctgactgatcataccattaatactaacaccattaatactaactttggagtagcaaatccaataaattct

SEQ ID NO: 10981 - DNA, 1132 bp, Homo sapiens
atgtaaaatagcttaccaaatttttttaatgccaattacatgttggtaatactttggatatattgggttaagtaaaataaaatgctaaaattaatttgacctgtttctctttactttagatatgactacttcttctgtggcttggctatatttctgttagataatattaatctaaatctcatctttccttaagacctggatcagttttccatctatttacaaagttacctttgtagctttgtaccagccttcttaaacatttggtcctcaccccctctcaccctactcccccttcccaatatacttagcttcttcaaagcaagagtaattccctatagtgctgttcatatggtggacactatatacattatataatacacacacacatatctgaaaaaatggctaatattaccactttatcaaaaaggatacttatgaaaattgaggcctgttgtgatgtttttgcttaaattggtggggagcagaagaaggattgatgtgaaggggagaagagacattattctactctgagctattgacatttgacacttgacatcccccaagtgtatcctgccaccttaggccactgatagctctgtactgctgtgattttactgccatctggtgtcagattaggaaactgtagttcagcattttgtctcttcaatagaggaaggtaggcaatctttcctctctatcctgtaagcaagttaccaataagagctcatataatttcaatgtaggaaacctttattttccttgttggaatactctttccttggcttccatgataaatgcattctcctttctaatgtttctctgttctcccattcttcgacagcccatttctctcttcatggtagagtttttttagccccacgttctaggcctgctgttctttttttcctttgctttcctctataccaggctttaagtactgcctatttacagacaaatttatattgatagccaaaaatgtcctctgagtttgagactagtatctttagttgcttacctagatattacacaaacatcttaaatataacatgctcccatcaaaatgtggacctctcacctgcatcctcatttcttaaatttatttttctcatttcattaatctatcatgccagaa

SEQ ID NO: 10982 - DNA, 1023 bp, Homo sapiens
gtgggattacaggtgtgagccactgctcctggccagccttgtaaaatttagagtgaaaacctctcttactcttttccaacccccaattttattttatttttatttttattttattttatttttatgtttaatttgtcatgcctgaacctacatgacattctgtacaatcttagcatgtcatgctggctgagttgcttagtatgtgtttgaataaattaatgacacaactacttttctagagaaagcattcttatctttctagactctgcagcctgcagtagagctcgttcacataacagttccttgtgccttctatgtgcaaggcactgtgttaatattatacaatgatgtccctgtcactagggaactagaatatatgtttatatttctcaccagctaataccaactttatcaatatgtttatatataactttgatacaataattgatatgtcataaatgagttgacatgagcatgtcaaggtgagaaaaattaattcacactctgaggatgtaagaacatgtcataaaggagatgacattgggctcagccttatttcagatttctacaagtaaagaattgtcttctagttagaaggaattatgagccaaggtgcagaaatcagaaaagtccaggatatttccttttcaacgtccttctcattaactgtctttttttcaaataataagagttttaatttaacagcctttgcctcttacatgatgaaagtgatggaaaaccatttggagtcatcagattgtcttcccttgaagctgttgcaagattcttgagtttagcaaacatttattgtctactctttgcagagatagatagagtggggcttcccaaaaaacatatttttggatacaggtatattaatgatgatgcaggagataagaaggttattttaaggatttaaaacaaacacaggctgggcacagcagctcatgcctgtaatccttgcactttgggaagccaaggtggaaagattactcgagcccaggagtttgagaccagcctggg

SEQ ID NO: 10983 - DNA, 1028 bp, Homo sapiens
aactttttaacaaagcatgagtaaaagaagcttgaggttcttacttgaaagcttgtaatgaagttattaaagatagttattagtgaattagtcttattttttatcctcaaaaacagaaattttgggggcgagcatcttctctctgttgacctgctttgggcctcttaatggccaaaactctaagatcttgagatgaaatgtggttgagccgtaacgtgatgctcctgtcttaggatctccaatatccttcactcatcctttgagagctcatacctttaatatttggggtaatttaaaaataaagttggtagactaaaatatggggtaaattgaatgaaacagagcatatgactttattaatgcctgcatctagctatctatctatctttctctttctttctttctttctttctttctttctttctttctttctttctttctttctttctttcaagttatttagctttgaaagtaaagttctttgatcaagaaaaagtttgttctgggaaaactccattttcaagtattccttaactacttgggctgaactatgaaaattttttctattttcccttcctgttttcagaatagttacataagataatcttgcaaaaaagtgaatggaggtcatattttaaacaataaatgggaaaagtaattattttacctatttcagataccagtttttgctttaaatgtcacaaatattgcagcacctggctttttttcaaaagaggactgagacacggggttctgcacttatcagtcacttaagctgggataattagccacgtgttaaaattaagttttctagtataaattgaaattttgaaaaagacgtaaaatattattataagtataaataacaggttaaaataattatgccctcattaaaaaaaattaattttttcctttttgttcatacttttagattaatttttcctattttaatgatcattattggtttgtctatagtgattttactacatttttaaattcaactgcttatttcccattttgtgctcaca

SEQ ID NO: 10984 - DNA, 1100 bp, Homo sapiens
gcttcgtcggacgacaggagccccagacattacctgggggatgctgaagaagacaactcaggaggctgagaggatcctgctccgaacacagacaccattcactccagaaaatttgttccttgctatgctctctgttgtacattgcaactcacgcaaggtattggtcctttttattctctcactttgcctgttacccgtacctactataccctattaagcccattttctaaatctgccttttttcagccctattcccttcccagcgtctagcagtgtgactttttagctaggagggactaacatacccccagtggggttcctcagtaacagccatatggaaggatatgcaaaaaaaaatctctcctagaaagacccccactcctgggggtcgcttcttagttagaaaagaatattactaattatactcatgtttgtctcttgttgtttactaattctaggatgtaaagccagaaaacaagcagtaactgctatgcctgacaaaactgttgctgcacacatctgtactcgtcaatcaacaaaacctgatgcaaaaaacagaaaaggggtgatgtaggagatggtcaggttggtaggagaagctataaggaaagacgcaattggaaggtcgggaggttttccaaagcttcaggagagaataaagctgaaggcagctttattaattaattctcttaccctgaggctgagggcgaacagtaggtagcaagggagtgtaaaggaatttatctagataagtttgtttacttatgccctccggaaatcatgcaagactgctccctgcaaaggggggcgacaatgttcattactcacaaattgtgttggcttcaggcctttggtattctgtctctactgaataaatacaaatggttccagcctatcaggactgcactctcttctcggctgcactaaagctggcactcccccagccgttctcatgcaaaatacctgtgtcagaatactcctttcatccatcactcagccagagtcttcaggacagactccgcatgggacttgtccaaaaaaactctaatcaaaagaggaaaattttggaatatgccaggaatagtggaattttatttttt

SEQ ID NO: 10985 - DNA, 1048 bp, Homo sapiens
ttctagtcttgtttctccttctccccgcttccctggggtttttccttaccataagtattctggtccgagggttcagttcctttagtcaagatgtcacaagtttaaaaacaaaacttgagaaactaccaaaggctcaggagttgtccactttgttgaaatccattaaattagagaagtctcactaacagatgtatttaaatataggtacaacaaataatttctttttctccccttccccaaattacagtcagcatttaaagctgtttatggcttgccatcagcattattctggtaggcttgttagtgttaaaatctatttgattttttttttttttttttgcctcttaaagtctaattttaggatggatgaattcagatgtttaccagagtgtgtattttacataatgttcttgattaaaaagacttgtttgtaaattatccgttgtttttgcatatgcccagttgatgtgataaaattttcattgtcttgccatataaagccttggttatcaacaggtggaatgtagatattgtaaagctttttgtgaattaaaagtgcaaaataaagcaaccacatttaagtagattgtcttttctcttattttaacagggttaacgtattttgctaaaatgtgagctttattactctgtactgcaagattacttcttagtcttcagttcacctactcagcagcaggatagaggaagtgtgagaattgaaaaactacagcagtgccccctcatctgtggttttgcttcccatgtataagtaaaccatggctaccattgtccaaaaatattagatggaaaatttcagaacaactcgtaagttttcaactgtgtgccgttctgaatgaaatcttgcagcaccgtgctttgtcccacgtgaatcatccatttctctagtgtatccacactgtatacactacccacctgttagtcatctgtaccatttactcctgacatccagccattgactatgtcatggttccatgatccaggatcacccaaagcagatgatcctccttctgatgtatcgtcagaaggt

SEQ ID NO: 10986 - DNA, 1050 bp, Homo sapiens
ctaaattagtaagtgaaagaatgaataaacaagtgaaatatacaaggaaacttgcaatacaatataagtgctacaataaaggtatgaacaaaatgttgcaggaacagaggagcaaaatgctgaaccttcttgtgaagactttatggagaaatattattcaaatggtataattaaggacaagtatttgtctattaaggacagaaatttgccaggtgaaaaatatgaggaagggcattccagaaagaacaaagagcatgtgtaaaggcattgaaatacaagtacatgtggctggctaaggaattgtgagaagccaggtgcattctgaatgcaagggctgcatggagggttgttgcaaatgatggggctggagaagtagtgagggtcagagatgaaggtcgcaagcgcaatgctggaatttatccttaactcaaatatacaatgaaactgacaaaaattggaaaacaaaatactttttatactgcagataagatcctgtcatttctttatagttagactcctcgttacagaaatcaaactttagtgacaacttaggcattcctaataaaataacagacattttaaggttttaaataatatgtccattacatcatttgattattagacatattgtatattcctcattgtaaattttctcaatgtctaacaaaaatctttgcacgattatttagttattaactttaagaatattctttgtggagaatggagatgccaaatagtcgtttactttttgtgtttgtgatttttttacttttggtccaagaactttagtaaaccaacagtttagctcatgatgctttcatgaattaacccacatatttcataaatctaggaagattcctagagttttaaaaagatttcctagagaattgttcaatatttttcatggaaataataatagactaagcccatgccttttcttgtgtgtatgtgtagctctctatctacctgaatgtttgtgtgtgtttgtctatctctctgagtgttgtgtgtacagctgtgtaacacacacacttacatatacagtctttt

SEQ ID NO: 10987 - DNA, 1023 bp, Homo sapiens
aaatgggacaatagtacttacttaagttattgtgaggattaaataaaacagataaatcacttgccacactgcctcgtttatagtataaattcagcaaacgttaactactcatgtttaaaatgtgccagtttggtggaaaatgggacacttactgttttaatttgcacttcttcaaatatttatgagactagaagaaattgatataatgaactgctagaattgtggatcattttgaatgaacaaaatgaataagcacttaaataataaaacacttatcatgtgccagatacgtttctaggctgtcatgtttacatttgctcatttaattgtctcagcatccatattacatactgttttctgcatttagcagataaaggagctgaggctcagtaaggctgttaacttgcggtaggtcacatatccaggagggggcagaactagactttaaatttaggatgtataactctgagccctgttttctttcgtcttaccacagatgctgccactttattagattgtaggtctctttagttttattactctcaagtatataaagacactcaaattaggttataaataatccagtgtgattaaagatcaaaaacatgtaaattagatgtgattcaagatcatgtctgtaaatcagtgctttgagtgtgttagaaaattcttgacagtattagcataaaaattcaacggacttcttgaaatcttatttgtgccatcattgaaaattgggctaaagaaagtgagcatcagcctagtccttaaccaaacttatcacaagttccaaaaatctgaattatttagcttttactgtaaaatagaaagaggtttggccagctgtagtggctcacacctgtaatcccaatactttgggaggccaaagtggtaggagcacttgaggccagcagtttgagaccagtctgggaaacacagtgagacctcatctttacaaaaaaatttaaaaagtagctgagtgtggtgtacaccagtagtccaagctacttgggaggatgagtt

SEQ ID NO: 10988 - DNA, 1050 bp, Homo sapiens
aagtttgtagctcttcgaggacattccagtgggaccctcattggttccctgcaggatggtggattttctgtcagccgccccccaacccccaccaggttcctgagtccgtccctcgcctgcagctgccgctctgcagaggcgggccggcccgggcaggctcggcccgtggcgcacgcggcccgcgggctggagtcagcccgtggtgcgggcgagagggcaggggcggggagaagccatgcctccagctgcagaggttgcacacagctggcatgatcgcggtcacctgcgcggcgccggtgcccttgcgctcgcgttgcccggcccgcggccgcggactttgcggcgggagcgcggcgcggtgaagcaccggcgcggagggcgcccggcgtaggcggcggcgggtgtgggccgagccggtatttatagctccgtgacagcagcagcggcagcgacgccgccggcccgtctcgccgcgcttcccagcgaggccgccggcgcgccgagggctgtgctcgaccgcgaatcccgtgtgcagtcgccccgcgccccgcgcgacccttcgggtgagtacgtgggcccgggcgttgggcgagcctccccagccgttcggtccagccgcagcggagccctcccggccctgccgcccgtgtcccggctgccacctcgtcactgcccgcgagtgcggaagcagccgcggaaccccggcccggcccccgaattctccggcgcctctgctcctgccttcctggggatggcagccaaagaggcagggtgaagtgtcaaggagggaggggggacgcgccagccctctggctaagggcagaggagactcccgggcgaaaggctcttggtgggagtcctcaaactcccggctccagtgtgtgtgcagagatacggcgggagagcagaccttgaactttccttgcttcagcgattcctagcctaggaactgagtaaaagccctatttttcttaattaaattaacaggttgcagttcgtaggtgttgttcttgggaaaaaaacaaagacttgggtgtttgggtgtttgct

SEQ ID NO: 10989 - DNA, 1028 bp, Homo sapiens
ttttttttagtttaaaatggaatctttgggtattaggatttataaaagttaaattccattggaatgtcagtttatactcttccagtacctctctctctcatttgcttggatgattctagtttttttttaaaatgtgttttaataatgcatcctagcttttggggggattatactttagacatatccatgaatagagacatccaaaattcttatgcctacaattaggacttatattcaaggagaatttaatttcttgagcttattcaagaaataatttttattccaaaaaggaattgaaattatttgcaacatacatgcataatacagtagaagtagaaaatcaggaccacggaaaaggcagaatcaaatttgttttgatttcatgggtttcaaaaccttgcttggttttgagcttcctcagagctgagcacaaggggaaactacatcactgtcgttatcagcagtgatgaaaattgtaagttcaacagaggtctttttctttgcaccaaattgtagaacttccttgctataaattttggtaaagcatttcttttttcttgtgcttggtacaagagatgctgaatggtgaagtggcaaatgcagaaatggatttcatattcttgtgtcttaaagcaaacgttcatcaaagtgtagagtataacatttaaccagctgggcgcggtggctcacgtctgtaatcccagcactttgggaggccgagatgggctgatcacgaggtcaagagatcaagaccatcctggccaacatggtgaaaccctgtctgtactaagaatacaaaaactggctgggcacggtggctcatgcctgtaatcccagcactttgggaggccgagtcgggcggatcacgaggtcaggagattgagaccatcctggctaacacggtgaaaccccgtctctactaaaagtacaaaaaattagccaggcgtgttggtgggcgcctgtagtcccagctagtggggaggctgaggcaggagattggcgtgaacccgggaggcagagctttcagt

SEQ ID NO: 10990 - DNA, 1026 bp, Homo sapiens
cagttgatcagttttctgggtgctctcttaccttaaatggtagatgctcaaaggttatggatgtgagtaatcatagctcactgcagctttgaccccctgggttcaggtgatcctcccgcctcagcctcctcagtagcttggactacaggagtgagccaccatgctcagctaattccttttttactttttaatttgtagagatggggtcttgccttgttactcaggcctgtcttgaattcctggcttcaagtaatattcctgcattggtctattcctgcctttttagcggagtgagatgtgactaaggcatttcaaagcactctatcttcagaactacctgctacctatctcaattgcaggttcattattttctatttttggcttatatcctgtagtaatcaaagattggcttgaaaacaatattggcacagaccatcattatgagcacgaatactattctaaaaataaatgaaaaaggcgtctgtacctctaactacagaaaagctatgatgaaggcattttgactgttcggccagtggaactcagtgacatagcaggtattaagaaataacttttctgtaagatactttcttttgggcatctaatttgctcatttttagttgagaatttcaaatacttattttttcagagcttttgtatgtattttaatgttaccagagaattagcttattcaagaatggaagatcataaatcattacatgacatattgtacaggaagacattgagcataatttgttgataatgcccactcacaaaggtatttttgaatctttccatcttccagttatgacagttaagataatagtgtgctttcccactctaccatcaagtagtgtgtcgtgccttgtggtacaaagaaattgtcatgaaataaaattcaaccagtctttgaattcttaataccttaatagcaatatgaaatttctgtaaaatccacagattatagctttcttttttcccctcttgattcttattttgtggcaaagagagaaagataaaaaatga

SEQ ID NO: 10991 - DNA, 1032 bp, Homo sapiens
atttgttgagtgcataccatgtgttaggtattcttcaaggtgcatggaatatgccagtgaacaaaacacacagaagtacctgtcctcattgagcttacagtcttaacttttccagattctgtttctgttcttaaggcatcttctaacatttcttttgggaaatacctcttgaatttttttttttttttttttttttgagatggagtctcaccctgtcacccaggctggagtgcagtggcgtgatctcagctcactgcaagctccgcctcccaggttcatgccattctcctgcctcagcctccccagtagctgggactacaggcacccaccaccatgcccggctaattttttttagtagagacagggtttcaccatgtcagtcaggatggtctcgatcccctgacctcatgatccacccgccttggcctcccaaagtgctgggattacaggcatgagccactgcgcccagccagaaatacctcttgaatttttaagctttctaactgctttctagaaaacactcatatcctcttattttatataattttctccttatcaggctaccctaaaactaccatactcatatttttttcctctattgttttaaagtagtctgcacttactctcagcttccttagttctctattattccttaacctcttgtgatccaatgtctttcattagaagtttgcaaaactgtcccgtggaaaatatactttaaaaaaatccattttttttgcctccactgctacactgtcaatatctctctcttggaccattgcaatagcctttttccaaactggcctctttgtcaataattagtcatcaaatctaccttataagctgctgtcaaaatactcctggtatcaggaggtcaagactacccctagttttaatgactcatgaggagaattcacaggcctcagcatatattaggactcatggctgggatttattatggagaaagaatctaaaagaaagtcaactaagggaaaaggtgcgtggggcaaaatcctggggaaattaggcaca

SEQ ID NO: 10992 - DNA, 1027 bp, Homo sapiens
atttttttatgtcttgtttctttatgtgcctaatttaaaaaattgaatattagagataatatctaaagaattgtagaggttcatgatgatacaatcttccctagagaaaattttattttcttctggtctgtagatactgggttcaggctttctttggtttgatctgtttctgatttgtccttactcctatgatattgcctttcatatatcacatcctaaagcctgaactctgcccataattcttctactttgatgttccctgaattctaatttttgtttactcagcatcatgagactaaaatttatgcttagttttttttgcttatcagcagttctatgcttgatcttacctcacctacatagtttagtaggtgtcagcaaatgatctatgggaaattgtgttagaatttcgggtcatttcctgagtttccttattttttctggtattttgttccctcatgtcctgattgcatttgtggacatgaatttcaatttttatctctggcccagtgacactgcctcaagctctaagccacagttttccatatggtccctatgacactgaaaatcagcaaatctcccaaggggaaaaagatgcaataaatttggctcatctaagtgcattttctttccttagtgatcttggcctttcaagtcttgcctgccttgcttgctttttgatgccttcaaacagtggccttcattatgataaatacacttgctaggtacacagctatagattgatagttatttcctcttagcagtttgaggcactgtcttatgacatccgttgttgctgttgggaagaaatcagtataattattgttcctttcaaataatctgcctttattattgtctgattttaagatcttttttgtcttttaagataaataagccctgcagttactacagcttacttcctggagagttttttggcctcattgcaggaaggaggaaatcaggcagaggccagggtcttcctgaatggaagagatagagctgggtgtgtggggaggccaaaacagct

SEQ ID NO: 10993 - DNA, 1115 bp, Homo sapiens
acattaaaagattcattaaaataaagcaaagatccatgaattttgagttacagtgtacattaatttttaataatatttgtatttcaggtcagttgctccgattaaaaatgtttcgagaagatcatgggtcgtggatgacaatgttcttcagcacaattctctttctcttcatattttctcacatatacaacacgattcttctaatggatgggaacatggggtaggttttctttcccctttctactgtggtgagtgttatgtttgaaacttgtaagaatttaagagttttttagcttgtagtagtctaagtctgctttacaaatattctaccctaagaagaaggagtattttatgtatttttcttacctaagacattaacattttttttttccaggaagcatatagtacattacaatatttagattttgttctttatcctttaggacttttatatagggtggtgggagggcaggtactaatttcattatactgacaagggggtatgagaatcaggaaatcttattgatttgcatatattcaaatgattcatagagtggggctaagatgaaggtttccaggtttgcaatttcattggtctgcaatgcctggctaaataaaagtggtacaggaggcattttctttaactctcttgacagtcctgagagagagagacctttgttataaataggttgttttaaaagtgggccacagctgggcatggtggctcatgcttgtaatcccagcactttgggaggctgaggcagcggatcacaaggtcaggagatggagaccatcctagccaacatggtgaaactccatctttactaaaaatataaaaattaggtaggcgtggtggtgtaggcctgtggtcccagctacttgggaggctgaggcaggagaattgcttgaacccaggaagcggaggttgcagtgagccaagatcgtgccactgcactctagcctggcaacaaagcaagactccgtctctaaataaataaataaataaataaataaataaagtgggccaccctgtattaactcctagcttgtgatatatacttatcaaatcactaagacatgaaatatgtgccaacaagtagttgtataatttttct

SEQ ID NO: 10994 - DNA, 1042 bp, Homo sapiens
actaaactcatcattttataaatgttgagggttctgctgaggagaaggtgctgattctgggcatagttttgcatgtagccattttatgagtaacttctttttttttacaaggtggcagactaggtaacctgaagccttgcctactacaaaatctttagaacagctggaggagataatgcagcttggtatactcctttaaaatgcatagctgagtttacccaaaggtcaggaaaaatcccagaggacaaaaatgcagaaggatctgaaaactcgggcggtaagactaacaactgattgatactgagatgctcagtggaggtgacttaggcacttgaattttaacccttatgtagggaccagaaacaaggatttggctcatattaattgaaaaattgaaaatagaaatttccacacagatgatcccgcaatgggctacagtgggagggggaggtgaaatggaaaacatgtaactgttagcagcactgaatccatcggatctgcagcaaactggatttttgccttgttagaggaaagaattcagctaagggacataaggcagagtgagagactgagacaagtttcagagcaagagtgagagtttattaaaaattctagagcaagaatgaaaggaagtacagtacacttggaagagggccaagcggacaacttgagagatccaagtgccccatctaacctttgacttgggtttttatacattggaatggttctgaggtttgcatttcttctccgctgattcttcccttggagtggactgtttgcatgctcagtagcctgccagcacttgggaggtgctgcatgtgcagtgtgtttactgaagttgtgtgcatactcattcaaggcatttttcccttagcagtcaagtgttcccagaggaaggtcatatactagttaaactccgccattttgtcagttactgcacatgcttgagcccactagcccaacttctgagatcttgtcgggaagctgctgatcaccaagagtttgctatctgttgggagactgcctttccctggcactggct

SEQ ID NO: 10995 - DNA, 1047 bp, Homo sapiens
tctcactctgtcgccctggctggagtgcagtggcgggatctcggctcactgcaagctccgcctcccgggttcacgccattctcctgcctcagcctcccgagtagctgggactgcaggcgcccaccaccacgcccggctaatttttttgtatttttaatagagacggggtttcaccatgttcgccaggatggtcttgatctcctgacctcgtgatccgcccgccttggcctcccaaagtgctggcattacaggcgtgagccaccgcgcccggccaaaatgcatggtttctatgtgctgagggggcagcaaaagcaagcaaggataaataggaaaaataaatgagggagagactggcatagacttcgaaggctgaaagaaattgttcaagatccaattaaagtccatgcaccaagctgacttaggccttagcctctggagctcttacatttatcccgatttttgaaagaatcactaatacagtggttcataagtatgaaaagactctctggtttgtagcttcagtttctgtcgtcacagttgtaggcttcagcacataatttttctcaaggctgatttatcatttagtggaaaaaaatcagggtgaacttttactttaagcagtagtttatttttaattaaatttttgttaagttcaccattttcaacaccttcagtaatgctttctgatcccttacacaaacttttttccttttctagtcaatattgattgagtagtagaagcccaggtgcacatttttactgataagaacagtgattttcacttcttattgctcttcaagtaataaggtggtcagcctgcttccattgtttacaccggtagcttccttccaaggaaggagtgtttgtgtgtttgcttctttgttttatttattttgggaggtgatatttgtttgttttgggaggtggtatttgtttaatttattttgggaggtggtaagaaaaaaattaaatttaataaaatataagtgacctaaactgatgaaactattgaagtacaaagctaccaactgtagcaaattaaaaaaa

SEQ ID NO: 10996 - DNA, 1064 bp, Homo sapiens
agtgatttgactttaagccacagttggaagagaacagtttcctgcctttgtcaggttctggaaagatttatttgtttcactacctatttcttcacttgacacagagtagtggcacgttattgttttttcttggagactgcagtgtctagagaaactctaattgtacttctctagttgaatcccaatattaaagtcttttaagtattttataaaggcttttaagtattataaaggctttagcattttaaaatctgactttattcagaaaacttttccttttataggagaatattaatattatttatttaaaatgaagggatatatagctgggaattatcctttagaaagtatgttttgtaaaggacttgttctatttctgagttcttgtttctttcacatgttttaagaaagtgctgaatgattgattaaataaactttagatcggttaacacctgatagtgagaagactgctccttggaatttctgttttaatttctctttatcctcttgtctaataactatgataggcaaaatttatgatctgtctctctatctcaacttaccttgttccagatgtacatttttgatgtctgttattccagttatcatgtatttaatataatttcctcatttgctacaacatggaaataggcttttttactaaaaattataaagtaattatgtcttctatgtttatattcttaataatattgacatatctgttaataatatgtaatgctaatgaataatttagtttccttagtgatagtttccatgatgttataactaacatccctacctatgaaaatgtagggagctgtctgaagcccaggaaggtcaggaaggtgttaagaaccaggacaatgtatttaacctatcacaatcaaaatgccattcagcctttgccctcaatatttgacagcaaatgaatttgtcattttctcacaaatatcctgccttgagctaccacttgtctgccttgtaactcatcttttccatgacctagttcttaacctggtttttgtctttaagttgtcactataaaatctctaactgggagatat

SEQ ID NO: 10997 - DNA, 1096 bp, Homo sapiens
gcttgcaaaaaataattgtggatgattatttcttactgattttattttcaaatgtttgtgtatggaacattgttttggaaggaaagatttagcagcatcactcagcttataattagtgtcagatatgttaataaaaactaatcaagatgttggtaagcaaatgctagaaactgaaaatgaaggtgattaaaagaaagtaatttctgaaacaagctaggattaactgaggatggaatcccaacaggatttctgcttttgttcattggccttgcccgtcactgctaacataatatgtcatgctgaaagaacaaaccttcactgaggggtccagaggacatacttcaagttgaaagttctatgtttgttggttcaacaatgctgagttaattacattttataattctgctatacttgaattctaaattgcagtcccacgtcttgtcttaaattgttattattatttttttggtcacacattttattgggaaagaatcaaagtctgaatgaatgatatttattctagtgggctctgagatgtaatacaccaggaaagaaaaattactgattaaagtgaagaaaatgactatgaagttattctgttcagttgtcttaacaaagatgaatgtgttttaattaatttttttgtgtaaatgtaaattgttaatgttaaaatgatagaggttaaaaaaatcaactgattacagaaatttttgaaaatacagaaaaatataaagaagaaataaaaatcatctacagttaatgtacttagaagtactcatgattaagtttttgatataaagtatttttcttttccttttgcattctcttttaaatgatagtataactggatataggattagaatttgactattattttccatcagcactttgaagacattactttgttgtcctatggcatctattattgctgatgtctttatgatttttttccttccattactgcttttaagatctccttgtatttgaagttctgcacttcactacagtacatctaaatgtggatttcttttcatttgtcttccttagaacttcgtggtattcctaaattttagaatcaatatctttcagactattg

SEQ ID NO: 10998 - DNA, 1047 bp, Homo sapiens
tacccagtacatgggatatttcttatggcacactcaccaagtcatgcacatgctagagtgattttttaatgtgacttttatcattttttgatgtctttaattctgtttaacatattttaatctattttctagctttttatttctgttatcttgtccctatgatactcacattgtcttgtttagaatgtacattttactgtgaattaacctctcaatgaagcttttagttagttttttttttttcccttgggagtcttatgtgccctgagtcagttgaaaacatattaatctaatggacaaaaaattgagtattattttaatttgtgttattttaggtactaatgagttagaactttttcatgtgcttgttagcatatgcatttcttctttcgtaaagttaggagcagtgttcatatttatccctataaaataaaaacatgtacattaatcatggactacattttgttctgatgattcagtgttattgatttctgagctctgtaatatctgcaagttataagtctttcttggcttcctccaggaagttgaaaattaatatttatttctatatttgtcaggaaaacacatgaatgtttgaagatggggtgggatcttgtttttaactctatataatatctgcagttaatcatggcaaaccaccagtttcaatttgtcagggtattgttatcatattctaattttgtatcaactaaaataatatatttctttttggttgaaatgcctttagaatcttagaacaagccttaggaaagacattactacctatggaaaacatgaaaatttgaaatattgtaatagaaaggtttcatttaaatatctttttataatagagtaaaataagatactgtgtggtaataagccttcacagaattgggcacgttggattcacctatatattaaaaaatgtgtgtatgtattagatgcctggcagcatctagtaaaatgagatctacatgtgtgaatttgtgttatttaacccttggcttaaaagtaccactcacagaagtagaagtgtgagtgttaagg

SEQ ID NO: 10999 - DNA, 1067 bp, Homo sapiens
gtttgctagattggatgttcagaatagcagagcttctttgtttttgagacggagtctcattctgtcacccaggctggagtgcagtggcacaatcttggctcactgcaacctctgcctcctgggcttaagtgatcctcctgccccagcctcccaagtagctgggattacaagcgtgtaccaccacgcctggctaatttttgcatttttagaagtgacggggtttcaccatgctggccaggctggtctcgaacgcctgacctcacgtgatccgcctgcctcagcctcccaaagtgctgggattacagacatgagacactgtacccggctagaatagcagagattcttaagcaggtcagaactttaagggtgatgagcaacttctaggcactgagaagttgatatggagatgaatctctttcctcatcagctctctcgactctgcctcagtctctttctctgccttgcctttaaaaataaaatctaacattgatgaaacaaacatatgttgtggcattgtgcttgttaggtacatgatcttaaggaactttcaatctggtagaagaacccttaggagatctatcgctaatatagttctaaagagtgatttcttaaaccatttttgtctgtcaacttttgtttcacaaagaatgtcttatattcccttaagttaggaatttacatcagtaaagactgaagatttaatcttactgacagccccaaggacatgcaagggcaatatcgcccatgtcctaggaagtttaggagtaagactgatggcaggtattaaggatattcagattgcagctccttctaaatgaaaatttattatttcattattcctaagacttcatttattacgatccttgggatttgagataattgaagacaacaataataatctctttatgtgttacatagtatggagtcattcattttgaaacatttccaagtgtgttgccaactgcatataaaattcagagtgggaagctcaggaatggtgaaggaaatgtgtatagacatacacatggatgcccttgaagtcctgagaggaccttgtggcctcaaaa

SEQ ID NO: 11000 - DNA, 1935 bp, Homo sapiens
caatataacatactatcgataaaaaggtacttaaatatcattatactaattattttaattatttaaaatacaactttaaaatccaattgtgtcctaaagtgatatttcacagtaagaggcaaatgtattatatgaagcatgagctttccctgttgtgtctttcattctttccctcatctgtatcagaaaaggtcacaatctggggataattattcacttcaccttttctacctggtgaggtggcttgaattcccaagatctgtccttttcagggcttcatactgggatctcaggcccccatgctaagcctaatttacttatcgacttcatatatttatagtggcataacaatgaccatatggattctctgctaaatatactcttacgttgttgcttcctatataaaaaagcactcaatcctactggtaccatcagaccagtgctccccaggtgatgtgaaagtttatctgaaatccagtttctgaagaataagtaaactttatatgagaggacttccctgaaacgcttgcttctctgtaccatctaatataagcagaatttctgaaaactacattcagctagggttgctgtgaagattcaataacagcacctgatatataggaagttttcattaaatgttaccagtgaggaaaatgatgtgattttgtattgttagaaatcttgacacatttggcatcatccatgttttgctattaattcgtaagactacctcattaaacctttattttgaatgtacaaacatttctcatttgtagtctttggaggcctacttttacacgtgttttgtttccataattacctaaagctaatttgacaggtactttgtctcattttttttttctactacagtgtctagaaatgtgctttacatagtgctcaataaatgtttgattaaattaaaacaatgttaccagggcatctgcatattataaccacagattaagaaatgtagatacagaacatgtattcatttgaacttcaaagtacgaatccaaataataaagctggtatcaaggtggctagtggttctggggctctggtataatcactctgtctggtttgctatcactaaattaccaatagggagcttgatctgagaacacatgcaaaagcagatcaccttcagctcccctctacaggggttcaagagtccattttcagcaatgcagaaaatacattgagaaacatatgtttaggggaaagcaaaatggtgttttctcacctgcgaaaggtagttgctaataatgcattttaactcttgtatgccatctcactaaatctgtactactttgaaattatagaacatgttttcttcctggaagacagaaattatcttctttatccccatgcctgatcattactgaacataacaattacaaaatgtataaaaacactgtctctttgggctccttctttagctatttttttttctagagaagaataagaataaataaagcagagcttctttcaaaattacaatttcttctggaatcacggtttcagaaaaaagagaagaggatgaagagtatgagaaaggagagagagagggaaggatacagagaatagcacagggttttaaataaatttaagtattctcctttaccaaggtttcttgctataagtcatctaaggtcaatttactcccaacatcagttttaacaaagaaaagtgaacaagaaagctaacaacaatggaaaatgatgctagactttgccagagcttttatttcaacaggatattgagtattaaaatgctttggcttggagtatcttggatgttgcttccaagtcttttttttttttttttttgagatggagtcttgctttgttgccaggctggagtgtagtggcatgatctcagctcactgcaacctgcgcctcccaggttccagcgattcccccgcctcagcttcct

SEQ ID NO: 11001 - DNA, 1068 bp, Homo sapiens
caaaaatcatccaaaatatttattttcctttaaaaatattttattgtatctttcatttttatttatctttatgaaaaggcatcatagtggcattttcttttccacgtgatattatattgccaaattttatcacattagtgtctttgtctataattcattgattttgactgctgaataaaattctattaggtgaatatatgcaagttattcgttctcattttgaagagcatgtagtatgctttcaagtttttgtgattattaacagtgcatttatgaacattcttgtatgttaatttcctaatattaaaataacctacataatctggtataaacagaatttagtaatcttgcatcttactctccatatattgctagattcaattgccaatatttcttaagagtttttgcctctaggttcatatatgatattggcctctatttttcttttcttgcactatccttgtgtctctatcccgattatgctggcatcataaaatcagttggggattgtatactcttttccttctcaggaagggtttgtataaaaatagttattgatttcttgaatatttggtataactcaatgaaggcatttgggacaagagctttttctatgagaaattttctttattaattattcattttctttagttgttagaggatgatatatagtcatattctatttctgtcttcagtttgttttgatgaattatacctttttcagcatttgtccagttttttctacattttcaaatttattgcatgaagttgttcttaattttctcttagtatctttagagtctgcaggatttgtagtgatggcttttttatcattcattcctaatattggttatgtgtgcttcttttcttcattattattttctatagtttttcaaattaattattcatttaaataaactaatcttggtctttgttgattcattttattgcatgtttctttattttcttaatttctgctcttttttaattctccttatttcctacattttttttgctgtttcttttcattataccttgaagtgaatactgaaataattacttcacagg

SEQ ID NO: 11002 - DNA, 1063 bp, Homo sapiens
actaccattgaaattcttcacagaattagaaaaaactacgttaaatttcatatggaaccaaaaaagagcctgtgtagccaacacaatcctaagcaaaaagaacaaagctggaggcatcacactacctggcttcaaactatactacaaggctatagtaactaaaacaccgtggtactggtaccaaaagaaacatatagatcaatggaactgaacagagacctcagaagtaacactacacatctacaaccatctgatcttcaacaaaccatgtaaaaacaagcaatggggaaaggattctctatttaataaatggtgctgggtaaactggctagccatatgcagaaaacagaaactggacccattccttacaccttatacaaaaattaactcaagatggattaaagacttaattgtaggacttaaaaccataaaaaccctagaagaaaacctaggcaatacgattcaggacatgggcatgggcaaagacttcatgactaaaataccaaaagcaattgcaataaaatccaaaattcacaaatgggatctaattaaactaaagaacttctgcacagcaaatgaaactatcatcagagtgaacagacaacctacagaatgggagaaaatttttgcagtctacccatctgacaaaggttcaatattcagaaactacaaggaacttaaacaaatttacaggaaaaaaataaacccatcaaaaagtgggcaaaggatatgaacagacacttctcaaaagaagacatttatgtggccaacaaacatatgaaaaaagctcagcatcactaatcattagagaaatgcgaatcaaaaccacagtgaaataccagttcgcaccagtcacaatggctattataaaaaagtcaggaaacggtagatactggcgaggctgtggagaaataggaacgcttttacactgctgatgggaatgtaaattagttcaaccattgtggaatacaatgtggcaattcctcaaggatctagaaccagaaataccatttgacccagcaatcccattactgggtatatacccagaggaatataaatcatt

SEQ ID NO: 11003 - DNA, 1044 bp, Homo sapiens
attcctttttgtcttttgtgtgtctactagaggttttttctttgtggttacaatgaggcttgcgtaaaagatcttataacattccattttaagttgataagaacttgacttcagttgcatacaaacactctacacttttactccccagtcaacgttttatgctattgatgtcacaccgtgcatctctttatattgtatatctttaacaaactagtgtatctatagttatttttaatacttttgtttcttaacttttactctaaagttaacaagtggtttatatacaactattacaatattctgaacttgactatatttttaactttactagggaatcttatacattcagatatttttattttgttaattagcatcttttcagttcaatttagcattaagttctaccttcagcattcttttaaaagtcagatctagtggcaatgaattcccttagccttagcttctgtggaaaagtccttctctctcctacatttctgaaagacagccttgttggatatagcattcttttttaactcttcgtttcctgaacactttgaatatatcattccactctctcctggttttcaaggttttttatggagatgttcaccaatagttttatcagggtacccttctttgtgatgagtctcttttcccttgctgctttaaagtttccctctttattgaagactttagtcaatttgatcataaagtattccctctctatctgtgaggaataaattctaagattcccagtggatgcctgaaactgtggatagtactgaatccaattgccatcagttggaacctgtttctgttcatgtcttctacaaacaaatttaatgccttttccatctttgcttatcacacattgtgaccataacttctgcagtctgaagtgcaacagcaaatggaaactagtatgaatttccattttttcttcttaatttcatgggtagaagatttgttcttaccatggatcttgggaaactcagcataccattttttttctttctttactaagtcaagagctttcacctttcc

SEQ ID NO: 11004 - DNA, 1001 bp, Homo sapiens
gttcacacaaaaggctaaccttgggaagctcagtgttgcctttttaataagtatgccagctaactaaagaaataaaaccaagaactgtgttactagagataataaatggtcataggttgtcttaactagttggagcaaaacaatgactgtataagtactaaaaaagtaacagcggcgtttacctgaagatgtttcacatgaaatgggaatgaagaggtgacatttcagacaggtttttgaggctaatactaatgtctgcattgctgaaacaaacttggatcagaagttttattccatgctctccaaatagtaattctttcccaatttcatctaaagaaaatgtttaagataaagacagaagaaaatatgtcagaattattcttaactttattatttatttatcgagatggggtctagctctgtcacccaggctggagtacagtggcacgattacagctcactgcagcgtcgaactcctgggctcaagcattcctcttgcctcagcctcttgagtagctaggagtataggtatatgccaccatgcccagctaattaaatttttttgttgttgttgttgttgaggggtcgtcttgctgtgttgcctaggctggtctcaaatttctgacctcaagtgatcctcccacttctgcctctgaaagtactgggattgcaggcatgagccactgtgcccagccttaacttttaaaaatggagaagatacagtacagcctttatggacatgctctggttacttaaaaaaaaaaaaaaaaaaaaagagacagtgtctcactatgttgtccagactggtgtcaaactcctgggatcaagcaatccttggcctcctgagtagccggaactacaggcatgtgtcaccacacctggccctggtactttctgagttcatataataacaaaataggctgggcatgatggctcatgcctattatctcagaactttgggaggttgaggtgggaggatctcttgagcccagaaggtccag

SEQ ID NO: 11005 - DNA, 1033 bp, Homo sapiens
atataattatttttaactgtcaagacctcctatacaggtactgttattgctcatttgctaaagtttttattcagtatgaaatatggtaatgataagaagtactaacacttttaatcctcacataactataaaaggagttatcagaaaatgttttttttataatgtgggtagaaatctgttcatttagagtttgagggccctaaaataagatcattctaccatattttactactacatattccaaagcatcaccctaaaatattgactctgatggtgaagtataaacactttgtgcactcctaattaccttccttgactccagagcagcagctcttaaaggaggaaggtgggtgggtttcatcacccttcccaccccacccttaggtctttgctcaccatgctttggtcattggctgaagcagcctcatgccctgtatgtatcccagctgtgaggggacagaactcagttgtttacagcctgtattcattgattatgggccatctgaacagtgtcatttttatgtacaggcacacaggaagttctcaggcaatgcaattttcatgccagcccattagaggaccaccttcccaagaagtatcccaaaactagggccatttcctcccatatttcactgacagtctcactcccaggtgaacctccctaacaaagtgattccccagttttgttttcttaagccacatcttccctgagtccccagccaaaacaacagaagttggcagtgcctgtagtttaggctctggatgagggaagttactgagcactgtaggctctagagtcaggtagacccgaactccacttcccagcactgtagctctgagctgcatgatcttgagccaggccttaccactccagagccctattttattatttgtaaaattattaattccctaccacatatcataagaatagtacataccaaccacagtgttagggaattcattgagttaatgcatgaagcctcgtttctattgaatgttagctgctgttattttatcatcttcattactcatc

SEQ ID NO: 11006 - DNA, 1022 bp, Homo sapiens
tggggaacctgtggagaacttcagaacggaatgctgtaggcaagaatgtgatctttgtccctggtgaggactcatctgccttctctcctaagctctctcttctgatgtgctctttgagccctcgtcaccgtcaccgttaagattcaaggagtttgatagcagttctcacaatagggaggctgccttgcagcattcctgaggggagaaggagaactgaccccacccagagccttcggattccatggagcattcaagcataaatgaaggggaaatcctagaataacctgctgtggctgtgaccatttcattttatttggggagatgttttcctttggttatgaaacagattttacaaatgctcttaatagcatttccatttcccagcagaaaacaaagataagacaggtagccctttaaaccccttgcctcattcccgaaaacagttcagcacatgggatcctttacaatgctggaatgatttgatttttgtcactttaccaactggaagatacgcctgagatcggtcttgcccttcatttctcataatttcacctgttcttggccataatcaaacctagttcttctaattagaaccacttcgcacaggaactcaagcaagtagactgtgattcctaataccgttcagggtggataagcacatttatgttacaaaataccctgccattactttctttcttgtcattgtcgcttgaggtgagtcagagtgataaatcgctgtcagtcacctaagaggaagctgcaggtaagaggcctgctctgtggtacagaacatgctacagccctggaaacaagcgacagcactggctgcaacaaaattcacgggctgaccacaccgctgggctttttctcccctactttgtctttaaatcaaatcaaattttaccttcaagtattttggttcctttgggacaatcaatattcaccattgcagggctctagcttcaagatcaaaatcttacagcaacccttttcccaggactgggatagaagaggaaggaggg

SEQ ID NO: 11007 - DNA, 1048 bp, Homo sapiens
tttttatttaaaaaattctttaatgtatctttttgtaataacgtgtgtgttgctgtacagtttatagtttatttttacaaatatttatctcagtggatttttgcaacaactctaggaaataggtattatcctcttgtagatcagggaaaaagcctgtaagtaccattgctagtgcagaattagagtttagttttgtgagttatagtgtactgctcctagtttactatcagagtcttggggtcaaggattttttttttttaatggcaatgcactttttggcatctgatacattgtagctgaactgaattaggatctcctgtcacttggggagcttcttatgaactcaggtgggtatggtaggcctctcagcaagtgggaaatctaatttgggaaattctgaaagaattgaaaatttctaacttacagaattaatagtatagcatttcattcgtctgtccctaaagcttaacatttttttgtgtggttttattaaacaagcatcaagagtcagttgtagttgtagaatattaattaacattgtggtaaatgtgtcattttgtgcaattctatgcagtacttgaagttgtttttaagtaaaatagacactaatgtctccctatctgtcttcacaagctacaatatgagactagagagtcttgtgtagggtaagatttgagagagtaatacagacatgcctgagagatgctgtgggtttgattccagaccaccacattaatatatatgatagtaaaatgagagtgaattttttggtttcccagtgcacagacaagttatgtttatattatactgtagtatattaattgttcagtagcattatgtctcaaataacaatgtacggccaggtgtggtggctcaacgcctgtaggcccagcactttgtgaggctgaggcaggaggattgcttgaggccaggagtttgagacaacctaggcagtctcaagctgcctagtgagtttgagacgtagtgagaccctgtctctacaaaagaaaatgttttaagtagctggttatgatggtgcatatctgtg

SEQ ID NO: 11008 - DNA, 1035 bp, Homo sapiens
aatctttttactggtgaaaggtcttgccttgatattgatggctgctgactgatcagggtggtggttactgaagattggggtggatgtggaaatttcttaagacaacaatgaagtttgctgcatcgatcaactctttctttcacgagaggtttctctgtagcatgtaatgctgtttggtagcaaattacccacagtagaacataatttgagtcagtcctcacaaaccctgccactgctttatcaactaaatttatatactgttctaaatcctttgttgtcatttcagcaatgttcacagcatcttcaccgagaatacattctatctcaataaaccattttctttgctcatccctgagaaggaactcctcattaattcaggttttatcatgagattgcagcagttcagtcacatcttcaggctccacttctaattctagttcttttgccatttgcacatctgcaatgacctcctccactgtaatcttgaagccctcaaagttatctacgaggattggaaacaatgtcttcaaaactgttaatgttcatattttaacctcctatgaatcacagatgttctcaatggcatctagaatggtgaatccttttcagaaggttttcagactactttgctcacttccatccagggaatcactgtggcagctataactgtacaaaatgtatttcttaagtaatagactagaaagtcaaaatgactccttgttccatgggctgtagaatggatgttgtgtcagcagcatgaaaacaacattcatctccttgtacatctccatcagacctcttgggtgaccattgtcagtgagcagtaatattttgaaagtgatctttttttttgagcagctggtttcaacactgagctcaaaacattcagtaaaccatgctgttaacagatgtactgtcatccaggctttgttgtttcatttatagagtacagacagagtagatttagcataattcttaaggacccttggattttcagaatggtcattgagcattggctttgacttaaagtcacca

SEQ ID NO: 11009 - DNA, 1030 bp, Homo sapiens
tattgctaaagaagaaagtccaaatatattagtaggtcgtaaaaggcccttcattacttttccattcttaatctccttgccatacccttgcacatcttttgaagacagatactatgtctttttttctgttttaaagcttggttaatgaacagtcagtacacgttggtagaattagttagtagaattagatccagccatgctgatccatttatagttctccaagcatgccaagtttttctcacctttctgcctttgcatgtgccattttccctgtctggaattcctttccttttttcattgcctgacatactcctacctatctttgaaattgaacacaaatgtcaccttttctaaaaagccttttcttatctcatcaagcagcttgaagtagatccttctttataatcccactttcctcctcatttatatctctattacaaacactactataacaacttttttattgtctgtttcttctgtgaactgtgagcctgaggaggtagggacttagtattgtgtattttagtagccctaacatcataacacaatactaattagtgcataggagttacctaatgtgtggctaatagaatcaatgaatgaatgcttgcaaggataattggaaataagaaaagtaggaaatcacttttgtttgagatagagaggggcctatggaagagccctcaagcttgacattgaaagactggttggattcagatagaaacaataaaaaggaagatgggggactttttagatatgaggaaaatggaaaatgagagtctgtacagtgtattttaaacatgtaaatgaactctgctgcatcggaggcgttaacgcatgtgattggtggaatataagacctggaccaaaaattggttttagactgtggaggattttgaaaatcaaattaacatatttgagctttattctgcatatagtgaggatgtgagatttgggggaggttttgtagttgttatttgtttgttttttagcagaacactgttttgatgaaagtgatgttttgggaaca

SEQ ID NO: 11010 - DNA, 1045 bp, Homo sapiens
cttaaagtttctgtgagttctgaatctgggcacaatttagttctagcttagactctagctaagagtctgtcactgtcaatctgttgcaatcaagactgcagtcaatggttggcctgggtttcagtcatctcaaagtttgactagggaggagtctgctttcaaactcactcagtgattgttgacagaattaatttccttgtggcccattgaaatgagggcattggccaggcacatcaaattttatcaattgagtactcagtacttgcctagtataactaaacccttaaaatataacatgttgattatgttttggaataaaggtcagattatcattggtcattacttgctagccttccggtaagtaccaagtcttacaagagtaatggatatattttcgccaagttgaggaacctccacttttctgttataatttttcttggaagtactttacttggattggtttgaagggcttcaccataactctgcttttcaggcttttaaaaatggaagtgattgttgctgactgaatttcccagggctgtatttcaccaactgcctgtaagatatggataggtttgtaggtgggagtttaaggaaggatttgtgaatctgacaaaagctgcttattgtatcctatagattcacaatgcacattaacatactttaagtgctcttagctaaaggaacctgtttaaacccatatttctcagagttaattggtatggaatccttttatggtacagtatctattaagattttgaagaacaaatattttgtgggccagttgtgggagaacaattctagtacaagataaaacttgctgtttcctcagtaactgttaaatgaccagtaaaggggaggtataaaaagttaatataaaagttatagagaattaagggaaaaatttgaggatgaaggagggacactagtaagttttttttaaaaaagagagtagatttaaaaagatgacttgtgagaagggctataaattgaaattgtggaattggatttggcacatgctacaaaattttataaaaatagaata

SEQ ID NO: 11011 - DNA, 1044 bp, Homo sapiens
atgttaatcagttcattttagccattccacaatgtatacctatttcttttcttttttttttttttttaaagacagggtctccctctgtcacccaggctggagcacggtggcacaatcgcggctcactatagcctcgacctcccaggctcaagtgatcctcctgcctcagcctcctatgtagctgggactgcaagcatgcaccaatatgtctgggataatttttgtttattattattattgtctttttggtagagatggggtttcactgtgttgcccaggctggtctcgaactcctgggcttaagtgatcctcccaccttcgcctcccaaagtgctgggattataggctgagcccctgtacctggacagacgtgtacatatacatatttcaaaacatgttgtataccataaatatatacaacatttatttgttgattaaaaaatagaaaatatatcactgctataatgcctttactaatcttatttttaaaattatttaactacctaaaccttatcttttctttaaactgtaaactttttaaatgaatagacataaaactaggctgttagtatatattatcctaattaagcttcagaataattatattaatatagggatccttatcctcattttacctgtgtgtcaaagtcactttgaatggacaaagctagaatttaggcaagatttaaggattcaaaggtcttctcttgttttcctaccctgcctattagaatatattttcactccttttgcttttctaatctggcaagcattcatagggcacattaagcattcattcattcttttctatttaaattgacggatagcattgtatgtttttgtcgtttacaacatactgttttgaagtatgtgtacattgtggaatggttaaacctagctaacaaatgcattacctcacatagttatcatttttataatattcaacatttaaacgtagaactttagagagatcatttgtctttgattctatattactttgtattgagaacatgagcattactattaatgctattaattgataat

SEQ ID NO: 11012 - DNA, 1049 bp, Homo sapiens
aatgctagcaaaccaaatccaacaacatatcaaaaagacagtgcaccatcattaagctggatttatcccagggatgtaaggatgcaaatcaataaatgtgatacatcacatcaacagaatgaaggacaaaaatatgatcatctcagttgtagatttgtcatacgtggcttttattgttttgaggtatgtttcttctatgcctaatttcttgaaaatttttatcaagaagaaatgttaaattttatcaaatgctttttttgcatcttttgagataatcatcataccaaataggggaaaaactgaaagcttttccttgaaaaactgaaataagatgaggacactcacttgcaccactctcattcaacattgtattggaagtcctagccaaaggaatcaagcaagagaaaggaataaaacttcagtaaagttgcaggatacatttcttaaaaaaaagacttacaaatggccaaaatatatatgaaaaattgctcaacatcactaatcatcaggaaaatgtaaatgagaaccacaatgagatatcatctcaccccagttagaatggctgttgtcagaaaggcagcaaaataacaaatgctggtaataatgtggataaaagggaactcatacactgttgatgggaaagtaagtaatatagccattatggaaaacggtatcccactactgggtatttatccaaaggagaggaaatagtatatcaaaggaatacctgtgccgtcaatgtgcattgcagcattattcacaatagccaagatatgaaattgactgaagtatccagtaacaggtgaatgaataaagttatatatatacatatatatatatatatgtatatataaaatgaaatactattcagccctaaaaggaatgaaaatgtgctatttttgtagcaatgtggttggaactggaggtcattatgttcaatgaaaacctaggcacagagtgagaaatatttcatgttctcactcgtatgtgggagccaaacttgttgatattttggaggtagagtagattggtggttaccagaggctagg

SEQ ID NO: 11013 - DNA, 1066 bp, Homo sapiens
cttggatctgtggtttggtatcttacgtaaaatttggagagtttttcacaatcacttcttccaatatttttctttcccctcttgttttttttgttttgtttgttttagagacagggtcttgcttcgctacccaggctggagtgcagtggtacaattatagctcactgcaaccttgaacacgtgagttcaagcaatcctcctgcctcagcctcccaagtagctgggactataggcatccaccaccacacccagacccctcttcttttcctggtactacatttacagtctggtctctgaatccatgggttctgcatccatagatttaaccaatcacagattgaaaatatttggggaaaaaagcaatttaaaaaacagtaaaaagtaataaaactaaaaaattaaaagaagacagtgcaacaactatttacttcacgttacactgtattaggtatactgtatttaaagtacacaggaggatgtttgtaggttatatgcaaatactatactgctataccattttatatgaggaacttgagcatgtggaaaatttgatatctttggagagtcctagaaccagtccccacagatactgagggatgactgaatatgtatattagatcatgggggtgttccacaggtcactgaagctcttttcagtatttttagaccttttttgttttctgtgtacttaattgtggatattttctattgttatgcattcatcttttctagttaagcaaatcttgtatattttctttatttgcagatacagatggtccccaagttatgataaacttagtttttttgactttactatggttttattgggggtattaaatgcattacgatgttttagacttactatgggtttattgggacataaccccatcataagtcaaggaacatctgtattacattttccagctcaagaaattttatttgattgtcctatattatccatttatttgctaattatgttcatatttttatatcactgaacatacttaatagttttttaatgtcattgttaattttcttgttatctttgttatttcactatcttatt

SEQ ID NO: 11014 - DNA, 1078 bp, Homo sapiens
cgagtgtataagatttgatcctaagaataaatttcaatgtgcagtatagagaactgatattttacagtatagtaggccaaagtggaatttggatatgtactctaatttcttagatattatacattccaggagtagcaggatcaaggtgagctcataggaagaatagtataataggaaaattaagttcggcaggatttagagtaatgtgatgaattagatattcataattacgatagctataagtgccccaataggcatattatttgtgattttggtcatgggaaattgacatgccaggaatagattattcatatattaccttatgattttctcaggtgatcatcaggacgcgtaagtataatacttctaatgtccttaagtgttggaaccaacaccacagaatcaacagcctaggagaagacacatgcacatatgtatacacacacttacaagcatgtatacctgcatttatgcacctttcctagtgtctcttagctcaattctgtttagctcaactgtaattatagtacagacatgtctaataaccagacttcagtccttgaactccttccactggctcattatgagtcatcattttttatattttaccacccttaacctttttttggagtgctttctctaccttggtttatactaaaaatacatatttcatctcacctacccttccatttcctatcctctcacctcctgctgtccccaagacacttaatctttctttatattttttgaatggaggatgctcgtgttctcaattgatcttaattctcactttgcaattaatacagaggctgtgtagaatgaatttcttcaattttttactccttcagttacaaacttattagcatctggactcattttcctttagcttctgctcatttcagaaagagatgctaatttcttctgaaacttactctgaatatcagtctttcccatctccatgttcccatatcttaaatctctttttatttactcactttttcctttcagctagaaatgcgtttaggtctcttatcctccctcgctagccccaaaccaaaaatttcattatccttaatct

SEQ ID NO: 11015 - DNA, 1035 bp, Homo sapiens
ttatttacaaatatatgattcagacttataatttataatatgactttatacttttcatgttttccttagttcctttgtataacataggggagaagaaaaggtaacatacatcatttttctacagatctcttcaacatgttagaaaataataggtgatttactcatttattcattgaccttgaaacttttagaatatgtcatagatgcaactttagaaagtatgtgtcttaagattaatagctagtacatttgtatacaaccaggttgcctctttcaggaaaaaagtataattcaaatttattattacaacagatatcttctttttttcttccccagaaaaattatggaaatccttttttgaatatgggactttaaattagttcagcttttgttcactgtattccaaaaattttatatatgccacttacagagttattaatcttttaaattagggagtgaagccataatttcagctgcgttctgcttccgtagctaaacggaaagatgctcaacttacgtgttgaactgtatgaccctgggccagttttttaaatcactttgagtctcagttttcttatctgtacctacctcacagaagaattaagtaagcagatattgtaaagtatttagttcagtgtcttgcccatgggaataacagaggttatattaactaaatcatccatattaattgttattattttaatgattgtgaggttaaacaaaatagttcatatgaatcctctaagacagtgcctggtatgatatgtgctccattatatattaggtttgttctcaaatgtgtatactttcatatgtttatacaccttttaaaaaggtattcattgtgttaatgggttcaatatccataaaaaaaagtatggcaaatagtgactaacttttaagaaatgatgtagctaatgtatttttttctttagcttccagagcagttgtagcgcagcatgttgctccacctccaggaatagtggaaatagatagtgagaagtttgcttgtcagtggtaagtggtttatttcta

SEQ ID NO: 11016 - DNA, 1059 bp, Homo sapiens
actatttccagaagccctgccctgttccactgttcatgaattggtatctgttggaaacatatttgctaaatggcatactaaaaataaaaaagaatttataaaatgaaagaaacttagatacaaaaacttaacataagacttggttttttttcaggatcatacaaaatacatgttgaacataatctgttagttatctgttaatcccataatctgataacatgccaaattcttatacataaaaatagtttaaggatatacatatttaagatatttaacatatgcctcgcctcaattcagagtgtaaatcattcctaataatggtactgtgtaacatggaatattggtatcttactggtaaagagcttgagaaagttactcaacccatcagaaaatagattggtagcctcaggcgggggcagcatttagttgtagccataaaagaacagtttagcaagagccacaagaatatcacttttgtttttctaagagtactgccactcagatttgtagaccaatagcacattataaaactaagaaaagtattacataacttttttgtttatattttaatgtgttcttataaagtagtgttggcatgtattgatgatctaaatttatacttaataagaggaaaaaacttggtaatttaagaaaatgaggaaatgttagagctgaagggtctctgatattatatcttggccaaaactcctacttttaagagttgaagtgaattgtccacattcacaaaaatctcttttccagtgatttctattactgtcttaattctcttctctgaagacttatacatttagctaaatgcatctctctctctctccctctctctctctcttttttttaatacagagcctcgctctgttgcctaggctggagtgcagtggcacactcttggctcactgcaacctctgcctcttgggcttaagcaatcctccttcttcagcctcccgagtggctggcactacaggtgcacactaccacacctgtctgatttttgtattttctgtagagaccaggttttgccatgttgcccaggctgatctc

SEQ ID NO: 11017 - DNA, 1025 bp, Homo sapiens
taaattttactttgtcatggcatatatttcttttttatgcattgtttgatacaatttgctaatatttttcctgaggatgttctcctctatattcatgcaagattctgggatgtagttttcttgtaatgtctttgtctgattttggtaatagggttatgctgtcctcatagaataagttagaaagtgttccctctgcttctattgtctggtagggagtagggattgtagagaatttatatcattccttcctttaattatttgttgtgaattcagcagagaaacctgtggtcctggtactttctgttttgaaggttattaattattgattcaatttctttaatagttacaatgttattcagattatctgttgctccttgagtgagttttggcagattgtgtctttcagggaattggccgatttcatctaagttatcaaatatgtgagcatagagatatttctgtttctttattagcatccttttaatgtccatgggattggtagtaatggtccctttttcatttctgatattaatgatttgtatcttctgttattttttcttggttaggttagctacaggtttatgtattttattgaattttttttcccccaaagaaccagcttttggttttgttaaatttttttctttctgttgatttcctgttttcagtttcattaatttctgctcttttattattttttttcttctgcctgctttgggtttaatgtgctcttctttgtctagtttcctaaggtagaagcttgcattattattttagatctttcttcttttttagtatataagttcaatgctaaagccttccctctaagtactacttttactatatccagaaattatgattatgttgtattttcattttcctctagttcgaaatattgcaaaaatgtgttatttagactccaaatgtttttggtattttctagctatctttttgttattgatttctctattaatctgttctcacactgctttaaggacatacccgagactgggtaacttataaag

SEQ ID NO: 11018 - DNA, 1066 bp, Homo sapiens
tttaaaaacattttaaaacaaagtccctgataattcacttttatattttactatgtaaaataagtgactgcttcacagaccggcgggttaatagcacttgatgtgggaaggtcaaagagcaaatacagaaatcttttcctgtaataattattaggaggaaaggaaaggagtcagaactgagggcagttggtttggatcatcccccatatgaaccccttcctatatttgggatatttcctacaatttcagtcttactaggaggcagggcccatctttgtacaaaagccccccaagaaggccaaatacttgcttcctcccctattgcctttggcagctacactagtcaatcagttgttcccacctatgacttttaatctggattgacggtagcacagaagctgagactggagaattcattcttgtaggaacagcaatattttgtttccaagaataccagtactgattttcagttttccagtttgtatttataatgtttcatcatgtattaaggaaataaattaatttctctttaatagtgtagttagtactttttttctattttgaacttttgcaactagataaaataaagttgggttagcctctcaccaaggttgttggtatattttttccccagaattttagcagcttgttactaagtcttatttgaatatataataatgcttgcccttgatatttcttttgtcatagaatatatatatctaaaacagatgccaagggttgaggtacaagttcatggttctgcaaccaataatagagccttttttaaaactaaaatatgtttgcagtatgaattttttggatgtatagtctcacatatacatttatgtgcatttattaacatttatgtgccatctttttaactagaatattcctgcaaaaaaaaaaaatcccttgcattttaagtcaggtgagtttgtttgtttgtttgtttcagtaggaaggctataaagaaggatatggaatactctttggccaccaaagaaaaatagcctgccaagaccttgagtaaataagaaaactccaaatgaaactatctgtattgtcc

SEQ ID NO: 11019 - DNA, 1047 bp, Homo sapiens
cctctgcctcctgggttcaagcgattctcctgcctcagcctcctgagtagctgggattagtagcctcccaagtagctcctgccaccacgcccagctaattttttgtatttttagtagagatggggtttcaccatgttggccaggctggtctcgaactcctgacctcgtgatccgcctgcctcagcctcccaaagcgttttgtaaatttttaaatcaatttttgtacaactaatttttcttttccagaaagatcttagaaatttcatactttattttaaaagttgttaaataaaattttaaagaaaatcataaagattttataaaacagaagtgtaaagttcagtgaattatcacaaactgaaccactcatataactatctgtccaagttaagaaatagagcaatatcagttgaaatctttcatgttctctccaatctttactccatcctcctctctataagggaccactatcctgatctgtgacaccagaggttcattttgcctgattttgaactttctatatgtgaaatcatacaatattattttcagcattatatttttgagattgattcatgttgttgcatgatagtattttattcatattattgtatttttttctctgcttttgatgggcaaatgggttatttccaatttggggctattaagagtaatgctgctataaacattctaaaccatattctgttttttggccatatacggaacatatttctgttgagtgttttcaaaggattggtgactcataagatgttaaaagtttgctacatgatgccaaccaattccaaaatgattttatcaattgacactctatagaaatgtatgagagtctcagctactccatgtacttgccaacatttggtattgtaattaaaatgtttaattttatccactcttttgagtgtgtgatggtatgtatatatggaaactacataaaactgaaatggcccaaaaaacatgaaaagatgcccaactgtttattcttcagtctcattttttgctcatttcttttcctttgctttactatagtaa

SEQ ID NO: 11020 - DNA, 1050 bp, Homo sapiens
gtaagagctcagtaaatagatgttaaaagaaggaagaaaggatggaaggaagggagaaaggatgatagcaaggagagaaggaaggaaggagggaagtaaggaagaagggaggaaggaaggatagatataagaatatttgtgtcattgacttctttttgctttgttttgggtgttgtgggactgctgctttcttgtctgtatggtctcaaaccaccctaaaggtttgtcaactccagtggaactttgggaatctcagacgattcacctctacctctcagattttactatgaatggcagtaaggattttcataaccgataaatacattctgtaaatgcatttccttacagaattcacaatggtacttctttaaatggtaagctctgattgcatatttgaagtgaatctatgtaaggtgtaaaatgagatgtactagtatattatgggtagcataaaatattagttattactggatctttaaaattctattggcaaagaaagatgaggactgatgccctgaaaagataaaatattatgtttttttcaggcatatgagtaatcaaaaagcatttcactggtttgtgaagaaatgggtattctttttaaatagtaaatagtcatatgcactaagccaatttttaaaataacatatattccctagagcatagaaaacatggcagctcttcccatagctggaagaatgtgtggttaccctggcaacaccattttagttcctgcttccaagtaccacctggtgatttaaagtcttaacagctgtgcagcatctacatttccattgaggaaataaaacgcattcatgcatcatctaatgcagaatttaagaagaaacgagcttgcaaatttggggaaggagggaaagaaatagcacacatgccagcaaagccgactgaggtttaaaaaccctagctgcagtcttggaagtattcctgaagcagctaagtccactgcattaaggatatgggattataggccgatttcccatcagaactctaatgtacacatagtctcagtagcctatgaacattttgtta

SEQ ID NO: 11021 - DNA, 1027 bp, Homo sapiens
gcagtatgtaaataaacacagtccccacaccatttaaagtattcagcactgacctaaacaggcctagacataaaatgccagtccagacagacgtttgtgaatatacacacataacacattgcaggaagaacttggtgcctttttccaaatattttattatgtacacatttcagattagaaacactttcagtgttcatagtctgagcaatggaaaacatttttaatcagtcctagacagcaggaaaacttcctgcaggagttctacaaggtttattcttcatttaacagatgtttgtttatagtagaaggcaggaagctgtatggtatgtctctagcttcaaagagcttaaaatgtggtagagacctttaggggagtttggtcatcagggaattaaagataactttcatacagctatgtgagaaaagtataaaatcataaagaacaaagaggaggccacagttatgattccaaaatgacaaactaaagaagaacgcccaggcaagaaccaagaaccaacaataccatgcaataattattctggtgtctcctatgttacagaatgtgttccaatgaactttgagaatctaatgaaagtaatgggcccagaatatccatatatcctcaaacatttgcacaaaatgtcagggattttatgtccttgacaatgtctgagtccatgggctttgtattttaaatcttttatagttacatttaccatggttaatgtgttacaactatttatactcctgtctcctccactagagtacaagcacttctagcacagcagtacattatgttgtatattttatccacacccctttctgttttgcattgtgcctgatgcatagaaggtagtaaaaatgctgaccactcacttgcctacctacctcagtgttcaggtgttaggttaatgcagcatcttccaaatatcagtcatttgagtaacaccctcacaatttttgcagtagttgcttaccacctgtattattttacaagataatggtttttggtgatagacagcattaa

SEQ ID NO: 11022 - DNA, 1036 bp, Homo sapiens
agcaatagaggtgtagaagcaagtcctgacttttgaactttggcagttttgatggataatgatatcatttatcgggcagggaacagtacaggatgacactgtttggaagaaaaggtcatgaatttgatttgggcaggttgaagttgaggagccttgaaggtatccacgtgttttctagtaggtagttttatatatagcttaggagctcaggaagaggttagggcagcagacagacagacatttgtgggtaattccaggagaggcggtaattgtgcccataggcatgggtgacagggtctagggagagaatctttgtattttcactgccccttcctatgctttcttctttctaatttgcttctgaggagtatgtgtcctttttctttgtcaggttaacccctctaactgccagcctgattcccttgacctttccccatcaattcttcccttgtcatttccatcttcattctataatcctctatcaaactccctaaagtccatttctgtgctgtgtacctactcatttttcactatcttgaatgctgacttttctattctcagccccactaaagtgtctttttcagaggcaactgttgacctatgcactggatccaagtgctcatctcaggctatgcgtctctggcttcttcttagcatttgattgttgcttctctcatttaagcatccccctctctgcttccctggcattcttttctcagttctcctttctctttacatacttctctttctacttctctatacatgtacgtgtcctccggaatgttttcttcttcctgcttctagacctacacttgctacctcagctatcttgttcaatcctgtggccttaaccatcactcccatgaggatagtactcatatgtatctttcttgccaggacccgagtacctcagacccgaatatccaactgatggctagacaccaatggcatctcaaactcagcatggcccataccaaatattttcttttcctctgaaacaagtcagtgttctacactgtcaatttcagttgagttc

SEQ ID NO: 11023 - DNA, 1092 bp, Homo sapiens
aggctgagagacagcctgggcaaagggcactgactgagaggtagcccggttgtattagtctgttctcacaatgctataaagaaatacctgagactgggtaatttataaagaaaagaggtttaattggcttatgattctgcaggctgtacaggaagcaaggcagcatctgctcagcttctgaggaggtgttgagaaacttacaatcatagcagaaggcaaaggggaagtgaggcgtcttacatggcaggagcaggaccatgagcatggagggggtgctacatgcttttaaacaaccagatctcactggaactccctattgtgatgacagcaccaaggggggatggtgttaaaccatgagaaaccgcccccgtgatccaatcacctcccactaggccccacctccaacactggggattacaattgaacatgagatttgagtggagacacagagccaaaccatatccctgagcaaaggttgcgggcgtaacaaagagtttgcatgggggttgaggctgaaactcaggccgaaacactgtggaagaccctcttctttagggatttaggacttgattctgtaagcaatagggaggttctaaccaaggaaggggcctgaccacatttgtattattgagagatggccttggtcaccgtgaaatctatggattggtgggagggagtgcatagagagtgatcacaggggcaatggtgcacagttttgaccatctcgtgtctctggcatgtcctagtgcttgagagtaccctacaaagaggactgtgtagaagctgtgtctctatagcttgcaagaacctcaagcagatattttcttgtgtctgcatttcagatgtttgttttttaaactataactcaaagccaggaagacctattagcatcagggaatgcaatgatctaagtcttggataatttagataggattatgcataagtgctattatttgtatattcctattgaacattttcaggatattattaactcatttgaacagcccatcaacacaagaactaagaataaggtaaaattttgttaaactccagtcaaaagtaattgctatcctattactgaatcataatgtt

SEQ ID NO: 11024 - DNA, 1051 bp, Homo sapiens
tagaccacactccccactattacggcatatttatgatataattaactttcagaaagccatatggctttcattacaaagactaaaggaatgtgcttttcataacaaatggcatatggcctccaatagctctttgcttgcatgttttaacaaaatgaacatgtacatgaattagatgcctcaggtcagttaacaaactgaagttgattttcttttgctctccctaattacagctgcatttctgacaaatatcaaggagttttttggcagcctgtaggtgcaaaatacatagcacctttttctcttatggcattgctcctttaaagagtcaacatttttctcttattcacagtggagtgtgccgtttgtggaaatggagtatttttgatgaagctgcatgctttcagaatggtggaaaatttaattgacttaaatgatacaaaaggcaaaggaaaaaactaaatgaaaatcattgagacaaaagttgacatttatctttggtcacttacatgatgcagaggagagagtacatgatagatgctcacatgctgaactaatttaacagcagttaagcgtgagggctcactcttaatctcttagagttatttagaagcctttctattttaggtaacatgccttaaagttctgctcccttagttcgcactgtgcctcatcctattgtttatttagcaggttttttaatagagtctgagaatgagcttcttgcaactttcacattatcatattacaacattcaccactgattatctgtactcaaggtcaatgacattatctcattggaattccctggactctggatttataataagatagtccaaaatgctcttgtctgtgatggaaaaatacaacacaattactgtaagtcagttggttcttaaagtgtttgagtttcaaatttggctactcatcatattggcaaattgcttacttttcttttaaatgcttgtacttatatgacaccaataaaattttcttgattaatgaagtggaaatatatctactataaaaggaaatttaaaacatatatatttct

SEQ ID NO: 11025 - DNA, 1035 bp, Homo sapiens
aaaaaaagttctactatttaaaaaaactatttcttcccctttgtttactcctgaaacttttattaatcaggtattggacctcttgatccatattgctaagcttttctgtttatgttcgatctgttcatcttactgctcgatgttcaggaatatttcctcaatgtcacatccaaaataacaaatttcaccttcagctatatccgtttcatttttcaacttgtcagctatttttctcaatcatgctcttaatttctaataatttgctcttatcctctttctcttttttcatatcactttttttgttttatggatactatattttctcagatttttctaaggatattgatgtgaggttttcagaagttccttttgttccctaaattatacgtttcttctgaagttagttattctgtttgttccctttggtccttctcttccatgctgctcattttccttagtttcaagtgttcctaggttatctgttcatatttgtgaatgacagagcgcatcgattagcttggacagctggtactcagagcttctctgaaattgtgtgggcccatttcactgatgggctgctcccttgtaggttctgtgtaagtggctcttctgctgcttgtctgtgggaggagcatcccactcccagacacagctgccactctaggagcagttactccgggggtgaagcattttaatgtatcttctttttggtagagcttccattcctgtttgttatacctctttgtctgcagtagaggccctaatgcttatcctagcatcctcccttgaggtttctttacagattggatcacagctttatcttatagtcaaaaatggtatcccaaacagaccatgatgtctaaactgaggttccttggtggatacctgatcactggttgcccatgatctatgcctcctctttgtctttatcgacttaacttgaagctactgcagggctccctatgggaaaagcacacttatcttggttccttttctcttagattttccaaccctatcttctttctgccttctagg

SEQ ID NO: 11026 - DNA, 1027 bp, Homo sapiens
tttatgattaatgctttttcatttgcttattttctatttaacaaaggattgctgactccaaggtcatgaagatgttctactctagaagttttattgtttcatctttcaattatttctgcaatctgtctggtattgactcttgtgtgtaatgtgaaataaacattagaatacctttttttccacttgaatgttgaattgacacagcacaatttatctgaaagattatccttttccctactgcattgcaggatcacctttatcataaatcatgccaccatatatgtgcaggtctacttctggattccctgttgtgtttcattggacagttatctgttcttgcactagtaccacacagttttgattgtcataactttataataatagtttctgatatctcacagtgtaagtcctgtatatttattcttcaagaataacttgatgatttccaacttttacatttgatatgaattttaggaaaacttgtcaatttctggaaaaagaagaacctgtagcttagattttgaccaaaattgcatagatgaatgtattaatttggagagaactaacatctttacaatattgagtcttccaattataatgatgcatatacttccatttatttagctctcctttaatttttctcaataatattttagttttcagttagagatcttgcacatctttaattagatttatttctaggtgtttgagttttttgatgctattgtaaatatgttttattttctatttgtttattgccaatatatacaaatgcaactagtttttatatgttgactgtatatccggttcccttcctatattctcttattaattctaagaatttgtccttagattctctagaaattttgaatgtgcatgatcttattgtctggaaatgacaattttatttcttgctttccaatctccatgacatttatttctttctctgaccttttgcattggctagacctccttctacaatgttagactgaaatgatgacagtggtcattcttgacccagttccag

SEQ ID NO: 11027 - DNA, 1050 bp, Homo sapiens
caaaaacttagagacagttgatttcactcaaggaccagagaggatccgtgctcacttgagcctctggtaacaggcccaccaactgcagacctcacactggacccagcagcagtcacattgcccaactccaaccccactcaactgcaatcctggtggcaattccatcagcccatggacctaacaagaggtctttacctgctgaaatcaatctataaatactggaaaaggtgtttgctccttcaaatgcacagacaccaatgcaaagctacacaaatcatgaagaatcaggcaaacatgacaccaaaggaaactaataaagctccagtaaccaacccccaagaattggatatctatgaattgcctgacaaattattcaaaattattatcttaaaaaagctcaatgagatgcaagagaacacaaacaaatgcaatcatggaaacaatccataaacaaaatgagaagtgtaataaagaaataaaaaacatagaaaagaaccaaacaaaatcttagagctgaggaatataatgacagaatgaaaaaaaatcagtagagagcttcaacaacagacttgatcgcgcagaagaaaaaaatcagcaaatcaaaaacagattatttgaaattagccaattagaggaaccaaaacaaaagaagaaattaaaagaattaagaaagcataataaagaagccatgcgatactatcaagcaaatgaatttacaaattatggtaacagaagaagagagaaagaggcaaaaaactaattttaagaaattcatacacaaatcaatacatgtgatacatgatgttaacaaaaataaaaataaaaactgtatgatcatttcaatagaagcagaaatgcattgacaaaattcaacatcctttatgatgaaactctcaacttattaggtatagaaacaatttacctcaacataatagaggtcatatatgataagcccacagctaacatcatacccagctgtgaaacactgaaagctttacctctaagatcaggaacaaggcaaggatggacacccatccttgccaattctat

SEQ ID NO: 11028 - DNA, 1088 bp, Homo sapiens
gagcaagtaaatgagttggtggctttgatcccacacagtgatcagagattgcgccctcagcgaacgtgagttacctgcttctcacctgttaatacctacttctgtccctaatctctttctgtatgtatgaatgccagttaattctttgaaaactacacatgttcttataagttccccattttccttataactgtttgcccaagcaagatatctctgcccccatcacaatctggggaaagaaacttgaagctggaaatgctttgaaggtcaaggaatggaatcagaagaaactgggaaagtggagtgttctgggaggtgtgggactgtctctgtccacatagctcctttcttcagcttttcttcccagagtgcaaacagtgtttaaaggagttttaaaaggtttctcctgcttcactgcttcttaactggtttatggttcctggctcttggaacttccctttcagctcccttctctttcctggttttgtgtttaatcttgacacattgaaccttgatatctgactgcctgggtcggtcatgtgctgtgtcatttgcagtaagcaatatgtcctcctgtccatcctgctttgtctcctggcatctggtttggtggttttcttcctgtttccgcattcagtccttgtggatgatgacggcatcaaagtggtgaaagtcacatttaataagcaagactcccttgtaattctcaccatcatggtaagccttagggtttcattccctgggttgtgcacctgccaggctgggacccaggacacttacacttgtttcctgacttgccctgatgtaggccaccctgaaaatcaggaactccaacttctacacggtggcagtgaccagcctgtccagccagattcagtacatgaacacagtggtcagtacatatgtgactactaacgtctcccttattccacctcggagtgagcaactggtatgctgttcttttaggaatcttgccccacaggcctaagagaagagtagggggctgtaggaatgccatagctgtgtcactttcctttttgtctcctcatttctacttgtaggaactggtgatgaggaagacctgttgg

SEQ ID NO: 11029 - DNA, 1048 bp, Homo sapiens
gcagtctcggtctcctgggcttcagcgatcctctcacctcagcctcctgagtagctaggaccacaagtgtatgccaccacaccctgctaatttttaaattttttgtagagatgaggtcttgccacgttgttcaggctggtcttgagctcctgagctgaagtgattgtcccacttcagcctcccaacatgctgggattataggtatgcgccactgctcctggccttattcattttcaaatgttgaaccagccttgtatacctgggataaattccacttggtcttggtatataattctttttatccagtgttggatttgattttctgatatttaattaaggatttttgcatctatgtccatgcaaatattggtctgtagttttcttttttcttttttttttttttgtagtatctgtctggttttggtattacggtaacactgatctcatagaatgagttagggaataatccctctgcttctttcttcttaaagagatggtataaaattgggataatgtttcccctaaaagtttggtagaattcaaattagctaggcatggtggcatacgcctgtaatcccagctactcaggaggttgaggcaggagaatcacttgaacccagaaggcagaggttgcagtgagccaagattgcaccactgcactccgggctggggaacagagcaagactccatctcaaaataaataaataaatgtttggtagaattcatcagttaacccatctgggcctggtgctttctgtttgggaaggttattaattattgattcaattattattattattatttgagacggagtctcgctctgtcacccaggctggagtgcagtggcgcgatctcagctcactgcaacctctgcctcctgggttcaagcaattctcctgcctcagccacccgagtagctgggactacaggtgcgtgccaccatgcccagctaattttttgtatatttagtagagatggggtttcaccgtgttagccaggatggtctcgatctcctgacctcatgatctgcccacctcagcctcccaaa

SEQ ID NO: 11030 - DNA, 1072 bp, Homo sapiens
ctgaaccccagagcactctaacttataaaaattaggaacaggatctagtagtgtaaagtaaaaggagcagacagtgatgttggaagttaataatggcctgggtgcagtggttcacacctataataccagcacttggggaggccaaggtgggaggattgcttgagcccaggagttagagaccagctctggcaacacagggagatcccttctttacaacaaatacaaaaattagccaggcgtggtggtgtgcacctgtagtaccgattacttgggaggctgacataggagcccacgaggtgaaggctgcagtaagttgtgatcgcgccactgcattccagcctgggtaacagagcaagaccgtgtttccaaaaaaatagaagaaagaaaataatgaagagtttagtattctggaaaccaaatgaagaaagtgtttcaagcaggagcaggtgataactctgctttttgaactgtgctttctgggaggctgggtaacatggggtctgagaatcagctgttagatttcactggtgacctgggcaagagtggcttcagtggagcagtaaggatgaattaaggccttattggtgtaagttcaagagatgattcatgacaaggaagtggaggaaggagaatttaaaaacttttttgaggatttttgctttaaggggttagaaagaagagtaataaccaggagagctggatagggatgttcaataaaaggcggggttttctttttgtttttgtttctaaggtgggagctattttagaatatttgtttgctaatgagaaaaaaaaaacaaaaggtaaaatccatgttgtggggaaaaggagcaaagctttagagtagtgaaatggaaaggcacccagtgcaccatggaggggttcaccttggaaaggagcacagtattcacctgctgacacacaggaggaagccagaattcgaggagcgattaatcggttggcagttagatttagtggtggaatctgtggaatttctcttctgattatttctgtttttctcctctactgcagtgaactagaaaatgggtaatttcagccagggatggtggca

SEQ ID NO: 11031 - DNA, 1151 bp, Homo sapiens
agtactaaggagattgcccccttgggaactccgtgtagctcctggcttttgtgattgcaatagcatcagtaaaagcctgacactgtggaaagacacaaacatgcaaggacctgcttatctctaaccttgcaccactcactgaggcaggagaatagggactagaggcagggaacctaaggacttcctagaactaaatcaaatgaaaatgaaaacacttcagctatgacaaaaaatatcctcctcatttacatagggcgtacaccaagtaaccagtgggaacctctagaggggatgtaaaccccagaaaattcttttttcttcctttctttctttttttttttttttttttgagacagagtctcactctgacacccaggctggagtgcaatggtgcgatctcagttcactgcaccctccgcctcctgggttcaagagattctcctgcctcagcctcctgagtagccggggttacaggcacccaccacgggccatgcctggctaatttttgtattttttagtagagacagggtttctctgtgttggtgaggctggccttgaattcccaacctcaggtgatctgcccaccttggcctcccaaagtgctgggattacaggcatgagccaccacaccctaaacccaggaaaattctgtaactgagcccttgagcccctatgtttggcctgctcccaccctgtggagtgtactttcattttcaacaaatctctgcttttgttgcttcattctttccttactttgtacattttgtccaaatctttgtttaagacaccagggacctggacaccctccactggtaacatcatgacatgtatgcaaaaattgtccgcaaaatttacatataaacgattagaatttaagaattcccaaaaccccctttagacagggtttcaccacgttggcaaggctggtcttgaactcctgacctcaggtgatccgtccaccttggcttcccaaagtgctgggattacaggtgtgagccaccatacctggcagggaacttcattatttaaaggagaaagagcaagcaggagggggaaaacgggaggtagggtaggtagtgaggcgaattgttacattcttgtgaggctctgattagcctcagtaaattgacattttacatgtgaaaagggga

SEQ ID NO: 11032 - DNA, 1025 bp, Homo sapiens
ctctcaccatgttgtccaggatggtctcgatctcttgacctcgtgatctgccctccttggcctcccgaagttctgggattacaggcatgaaccgctgcacccagcctaatttttttttttaatagagatggggtcttcctatgttgcccaggctggtctcgaactcctagcctcaagcattccacccacctcagcctcccaaagtgctgggattacaggcgtgagccaccatgcccagccccaagttttttatattagacatgcaatgatcattcaatattaggaaatcttttaaaataactcattatagtatgttgagggggaaaagtcatatgttaatctccaaatattgctgaaaagacattccataaaattcaacatctattctgattaaaaattttaatagtatagaaataatgtaaatattctcatgttgagatactttccatatattgagaaaaaaatttatttatatatttatttagagacaaggtcttgctctgttgcccaggctggagtgcagtggtgcaatcatggctcactgcagcctcaacctccccggctcaagcgatcctcccacttcaacctcccgaagtgatgggattgtaggctcacacctgtaatcccatgcctggcccagaaaaaacttataaaacatgtgtctcaaggccaaaaactacgttccaattaaagatataataagggataggatgagcaccatagccagcattatttgttgttttatttttaaatatgaaggaaataatgtacacatgagaaataaaacttataatggtctcaggataaaataactttttgcagttaattttttttacattttagttattccaccattcttttttttttttttcttgagatggaggctcgctctgtcacccaggctggattgcagtggcgcgacctcggctcactgcaacctctgcctcccaggttccagcgattctcctgcctcagcctccagagtagctgggattacaggcacatgccaccatgcccggctaatt

SEQ ID NO: 11033 - DNA, 1067 bp, Homo sapiens
gctggtggtatagtatgagaatagaattctccaactgtaacccataatttcaagtcatgtcactgaatgggaacaagatagatttggggacttttagggatatttagcaggttgatttaccaggtttgggaacagatttaataaattaaaaacagggtcgtgcatggtggctcacgcctgtaatcccagcactttggaggccaaggtgggtggaccacctgaggtcaggggtttgagatcagcctggtcaacatggtgaaaccctgtctctactaaaaatacaaaaattagctgggcgtggtggcaagtgcctgtaaccccagctactcaagaggctgaggcaggagaattgcttgaacctgagaggtggaggttgcagtgagccaagatcacgctactgcactccagcctgggtgacagagcaagactctgtctcaaaaaaaaaaaaaataattaaaaacagtaggctgggtgaggtggctcatgcctgtaatctcagcactttgggaggctgagacaaaaggattgcttgagcccaggagttcgagaccaacctgggcagcatatcaagacccccatctctaccaaaaagaaaaaaattaactgggcgtggtggtgcacgcctattgtcccagctacttaggaggctgaggtgggaggatcgcttgagcccaggaggtctaggttgccatgagctgtgatggtgccactgcactccagcctgggtgacagagtgagactctgtctcaaaaataataataataggccaggcgctgtggctcatgcctgtaatcccagcactttgggaggccgaggcgggtggattgcctgagctcaggaattcaagaccaacctggacaacaaggtgaaatcccatctctactaaaatataaaaaactagccgggcgtggctgcgtgcgcctgtagtcccagctactcaggaggctgaggcaggagaattacttgaacccaggaggtggaggttgtagtgagccaagatcgcaccactgcactccagcatgggtgacagagcgagactccatctccaagaaaatataataataata

SEQ ID NO: 11034 - DNA, 1050 bp, Homo sapiens
ttggcgcccctggcggaggcggttagcagaggtgtctcccccgccggtggtggggctaaacgctactggcttcacggccacacctccgctgcctccgtctggttcagcgtctgctaactgaggaggcagattaggggcgcggagtctcttcccttgggtgcataggtcccggttggtagaggctttgagtcctcatcgccacagctgacggctgcgagggactaagagcaggatatatctttagaaatgagttgcacaattgagaaggcacttgctgatgctaaaactcttgttgaaagattaagagatcacgacgatgcagcagaaactctgattgagcaaaccacagctctcaataagcgagtagaagccacgaagcagtatcagaaagaaattcaagagcttaatgaagtcgcaagaacatcggccacggtccacgttagttatgggaatccagcaagaaaacagacaaatcagagaattgcaacaagaaagaaaagaattgcgtacatccctggaagaacatcagtcggccttggaacttacgatgagcaagtatcgagaacaaatggttagattgctaatggctagcaaaaaagatgatccgggaaaaataatgaagttaacaaaagcagcactccaaggatacaggcacatgttgaccagataaatgaaatatggcagcagtaatgaagaaagccattgaaattgacaagcaacaggattgcaaggaacaagaactaatatttcaacttgaacaagaaaacaaaggcgttagagagatcctataaataactcgagaatcacttttgaacctaaggaaagaagatgtgtcggaaagtacttctttgtcagcattagtgaccaacagtgacttgagtctgaggaagagctgaagagcttctgagtctgtgagcttcttacatggctcccagtggtcaaataagtgaatgaatgaatgaacagaaaattcaatccattatttttttctctttaaatatgtacagtgtactggctatgagatagcaacaaaaacgcatagttaatggt

SEQ ID NO: 11035 - DNA, 1021 bp, Homo sapiens
aaattcatccttgttgtatcatcagtagctcctttttcattgctgtatcatattcttttttttgagacagagtctcgctgtcacccaggctggagtgcagtggcgccatcttggctcactgcaagctccgcctcccgggtacacgccattctcctgcctcagcctcccgagtagctgggactacaggcgcccgccacctcgcccagctaattttttgtatttttagtacagacggggtttcactgtgttagccaggatggtctcgatctcctgacctcgtgatcctcccgcctcggcctcccaaagtgctgggattacaggcgtgagccaccgtgcccagcctgtatcatattctattctgtgaatgtgttacaatttatccattctgtagttgattgatgtttaggtttgtttctggtttttggacttacagataatgctgctgtaaacattcttgtacatgtcttttagtacacattataaatgcatttgtgttgggtattacttaggagtggactgctgggtcatagggtgtgcttatgttcagttttagtagattttgctaaacagatttttatactcccactagcaatatgtaagaatcagttacttcacatcctcctatggcaaacaataaagttttttaaaaggtgaggctggtctcattcctgggctcaagcaatctgcctgcctcagcctcccaaagtaaacttttcaaaaaatagttatcaaatatatatgtgtgtctaaataatatattgttttagcattagttgtattttttattaaaaaagaatcttatgttgtatgtaatctggaattttctacttaacattatattgctaagattaatccatatcattgcatatagttgacacatttttgcagcagtacagacatttagtgaatacatcacagtttattctcttgttaatggcatttgggttgtttccattttcttaactgttatgaatactacgtgttttctaatgtaccatgagcaagaatttctcttgtactt

SEQ ID NO: 11036 - DNA, 1051 bp, Homo sapiens
gagccaccgtgcccagctggtgttaacagatgtttaaattctagctcctttgtgggaggtattttataagggattttttgaaactagaaaagacttaaggaccatattaaaatgacaggaagacaagcagctagggtgatgttttgagacttagaacttgttcattatacttatttttagtaactgtctagatctgaaatatgacaggaagtgttcatgaaaagaacaaaccatacatgctttcttgctgcctgtagactgttccctcaggttatacctaactgtgtctctgttcacaaatttagtctagtcacttttgccacaacatataagagatagaggagagtgtaggtcccctcagtcctcctggtctctggaattgcagaggagtagttaatcaaaatgaaataatgcctccaaaaagttaaatcatcagaaccaaaacttactttggggctagataattcatcttagtctacccatgccttgtcctgaactctaagttttacttttcaggttttatggctaggaatttaatgtcatgtcttctgtttttctttgtttgtttgagacagggtctggctctgtcacccaggctggagtgcggtggcacggtcatggctcactgcaacctccacctcctgggctcaagccatcctcccaccctcagcctccctagtcccctagctgggactacaagcatgtgccaccacacctggctaattttttaattttttgtagagatgaggtttcaccatattgcccaggctggtctccaattcctgggcccaagcaatcctctcatctaggcctcccaaagtgctgggattacagccataagccactgcgcctggctgtcttctgtttttcttgacacatatttttgctcctgccagattactcattgtctcaaaacttaacattcacatttcctcttccatctactagttaatgccactttcccagcctgaaaatgttctcctattcctctgtatttatctaaatcccaccatttctccaaactttccttaaattaaggtctaacttctgg

SEQ ID NO: 11037 - DNA, 1029 bp, Homo sapiens
agtctgtttattaacatcatgcgtaacgattatcaaacctatgttctctggcacttccctataaaagatttgctccttgaggaaatgaccctgccttagacatttttgtatgtctcacactatagtctccacattaactactttgtgctaacataactatgtattgagctaaattgaattagagcgagagagaaagagtgtgtgtgtgtgtgtgtgtgtgtgtttgagtgtgattacaaccagaaacaagagtggaacttttatttaccctgtagttatattccccttcaaaaggagaaatcagaatgaactccaaatttgaagaaagttggaacattgcatgtttgtgcaagtattaacattctagatttttttttctttttgccaccacaaagcaaaaccgatatggtaaggaaaattattttcatccagaggttgaatactagggtactactgtctccttatacattgaaggctgtgggctcttttataacaacatggaaaagctttatgtgcctataaaccatttatatttgcagtggaaaaaattctaattgcctatttaatgttctttttctgtaaaaagcctaccagaaatctgtaattccatccttcctagttactattatgtgtttctcagaaactagcacactatatgtctatcttttgactactttgcattctaagtactaaaatgtaagtggacttggtgcaaccatggtcagctgttgaagacatacaagtcctaatcatggataaatttactatgccctagtggggatattgcttggtaaaaattaattagatgcaaggccatcaaattttatagaccaaaatataaatataaaaagtatgagtacaggccgggcgcggtggctcacacctgtaatcccagcactttgggaggccgaggcgggcggatcacgaggtcaggagatcgagaccattctggctgacacggtgaaaccccatctctactaaaaatacaaaaaaaatagacgagcgtggtggcgggcgcctgtagtccaa

SEQ ID NO: 11038 - DNA, 1030 bp, Homo sapiens
ggtctccatgcctttgcgcatgcgtaacacttcgagccagattctaacccggtccggcccacgcatgcgcagcttttcggggcgccactggggcggggccccaaacttggggggtggtcgtccccggcggcactctgcaaaactccatttcatccccaactcctctgagaaccctcagaggcgaaccgcgaggtctcaccattcctagactgccagatccaacaatttctccgcggcgacggtagcagccgcagggccaaagccggcttccgtgaggtacgtctacttccggttaacgaaccagggggctggcaatctcttccggttcgtcttggcaacgtgtgtgaagggggcgtggccatggtacggaaagtgtaaatattttaccaatagcggaaagtaaaggctttcctagttgggacagcatatagggaaacgttaaggattataggcaccggagaggtaacccggcttgaggggttggttaaagggaaaggcgagacttagggcgagaccgagcggggctaattgaggcgacccggggaggggcgggaccgcggactggatttcgacttccaaattcccacgaggtataggagtctgagggttgcacaggaccttatgcattgtttgactcctccagagcctttagagaaacttctatcaggcccgcctgctaggcactagtcggggagataatgtagccagggagatgtggcggacagaaagggcagagaggctctctgaggagcggatggaggatcgtgggccgctttactgagaaggaagagaccctgcgagaaggagtagtgtcgacttggtcccgtcagccggaccccacctggacggctggggccacttgtggtcgccgggaggtaagagagaaaaccaatggaagcaccttcagaggagagtgccttggaaggaatcttggggtgggagaacgaacctgtcggaaaaattgggaatttggggctgtgagagatgttccggaaaactagaaagactgttgtctaaaagaggaattctg

SEQ ID NO: 11039 - DNA, 1027 bp, Homo sapiens
taaaaagtaaaatccagaggacactagcacacgcataaacattttgatcaggagaacataataggctgggcgtggtggttcatgcctgtaatcccagcactttgggaggccaagttgggcagatcacctgaggccaagagttcgagactagcctggaaaacatggtgaaaccctgtccctactaaaaaaatacaaaaattagcctggcatggtggtgtgcacctgtaatcccagctactcagaaggctgaggcaggagaatcgcttgaacctgggaggcagaggttgcagtgagccgagatggcgccactgccctccaccctgggtgatagactgagactccatttcaaaaaaaaacaaagagaacataatagtccagaagtagacctgaggcattaaaaagttcagtaaatgataaagatggcattgtctgtcagtagggaaaagatggatgatatactaagtagcactgagacaattgtgtagtcacctggagaaaaataatgtagtgtctcttttcagttcttacactaaaataaatccatatgaaacaattatgtttaaataaatgtaagaggccaggcttggtggctcatgcctgtaaccccagcactttgggaggccgaggcaggcagatcactcgaggtcaggagtttgagaccagcctggtcaacatagtgaaatcccgtctctactaaacatacaataaattagccaggcgtgttggcaggcacctgtaatcccagctactcgggaggctgaggcaggagaattgcttgaacttgggagacagaggttgcagtgagctgagattgtgcaactgcactccagcctggatgacagagtgagactccatttccgaataaaaaaaaaaaatgtaaaagagtaaaaccacaaatttataatgtcacagtagagaaagtgttttctagaatggcacacattttctcatagctttaaaaaaagacaaattctgtcaacataaaaatctataatttctacagagtgaaaaacaccataaacaaaga

SEQ ID NO: 11040 - DNA, 1036 bp, Homo sapiens
catttagtgtgagggcattttaagatgttaagtatcattggggtgaggcctccagaaaagaaagagcctgggacccgagaggctggaaacagcccagggccagcacagctgtgctgtgcatgtgtcctgcatcatgatgccaactccccttcctcccacactaggcatcctcgcgatatcttaagctgcgactcagaaaacaaatcctactcctggcatcatccacagaaccagctgttcacaccccacatcctcctcagctttctggagtctcagccttaggctggaagcaaggatgggcgccattcctgaggaagagaaccgctggacatgggttctctgaggatggggtaatttcctatttgtatgcctgttccctaggccaagggtgctggtgagtggagaaggacagggtgggggagactcagcagggaccaggcaagcagctgtgtgtcaagaggagggtgtgtaggtgctcgtgagctgattgaactaaccgaattagtgtcttaactgaactgacagacgcttgccagagacggcctccttagcccacaccgtctatatttgaacctcatgtctccatgtcttccacctttgtcctcagagacacgctcacctttgcctcccaccttatgacacctggctctggtctgtatttggtatctccttttgttctcaccttctgagctttcatgcagatcactggcatgtcagtgacatatctgtccatattttgattaaatgaagagttacacctactaagtgccaggtgccaatcacagctatctcggcatgtttgctcccaaaggacacagacaacactcagagggttctaaaactgagttgaggaggtgtgggtttcagcaatgagacagaattttaaaataaaccaacctctattttattaaaatgtagagtttggggactgcaggagggaagcagtgtttctcaaagttctaggagtactcagcaacccccagagggtttctttaaaagcaccagctgggaacctgcattttgaccaagttctctg

SEQ ID NO: 11041 - DNA, 1057 bp, Homo sapiens
ctgagctggcacaagagagagcaaaagcacaagagagagcaaacctaccaagggctaagggcttggggtgggcaggaaatcgggcttgaagaccctcctgaattttgtgctcctttttcatcctcaccacttctgcttcccttctgcaaaaagcccatctctgtgcccatcctgggtcctatgacttttctctccctcaacagtcggttcccgattctggtccccggcccccagcagcgcctgcccccttcccaccggggccccccatgatgccaccacccttcgtaagttttatgtctttccctgggcttggcttttccagcctgcacccccaactccccagcccctagccactgctgcatcaccagcacagttttcctgtaatgccccttttgctgaccttggaagagggatggttttacttgagcattgggttggggagagctgttgtgaagccctcagtacataacattgacaattccccctttgtctttttgaccttaggacacactggggctagaggtaggagaagtggaagggaaaagaccccattaatgtgagggcagggtgggactatctatctctttcactactccttacctatgctctttaaatatgccacagaattcgggctggaatggcattggtggtcatgagttggagagaaagggatgggaggcaggggactggggtacttgggtacctggatacctgccttctgccccttcatctgagaggcctctttgggggagaattgctgaagaggtggagccttccagtctcagtctggtgctgttaaacctcccttattcctttcctttcccgttacaattaagaagctgtgtgcttgcctgttagaccccagttgtcagtctttctcagtggtgaggagggaggcagtttcatgccttgtgcttctcaaactaaagccttggaattgcctcagagcagggtggagggttggggagggaggtggtggatatttcctgacaggtcctctctacctctgacaaggcgatgtcttccctgctcagtatctcttcctttactcatttcc

SEQ ID NO: 11042 - DNA, 1050 bp, Homo sapiens
tcatgttatggcttctaataactgaattcacaagagctgaatacttgcttatttattcttatacaattaatgatcccctcttaagaactaccattgcagtggctgctcccacagagccccctccaggcccttcccccaccaccctgggtatccctagcacctgtaggacagcatcgttgaaacattaggggtgctggggtctgagagggtatcctgctgggacaatgcccgcggaacctcctgcctgtctttagacatggacaaggaagatgcactgatctgttttgaggagcacatccgagctttggagagggaagaggaggaggaacgggagcgggcccggcttcgggagcgacgccaacaacgcaagaatcgggaggccttccaggtatctttgctgtcctttctagatcagagctcagctctgccctagagcacaacctcttcacccattccctgcccccttctggatacgctgcctgttctttctgtgcctagccctgtccaagctctatgagacctctctctgcctgcagtctgtttctgctgtacctcctcaattctggactgtgctcttctagggagactagatgtatgcaccacccagaaactgccagtagagagcaccctacaggcatgacttggcagctaggccatgtttatttcccttggtggggcacccgacaggcagagtttattccctcagcttgggggtggcagtggtggtggtagtgctaggggttactgcaggcaggtttctgtttctttgcatcccgggactggcttgttctcacctttttgttctgtccctctctgtgtatttactttctctctttttgcattgttctcagccttccatctgcatctcttcatctctgcctctcttgcctgcatttcctcaatcttgattgtccctgcctcttcctctgccattccctctcttccccctcagtctgtggctctgcctccctgtctcactctccctataactggcctctccctgctcagaccttcctggacgagctgcatgagacagggcagctgcactct

SEQ ID NO: 11043 - DNA, 1044 bp, Homo sapiens
ctcctgacctcaggtgatccgcccacctcagcctctcagaagtgctgggattataggcctcagtgagccactatgcccagccaagggaattctttagcatcttgaaacaatgacataaaattgctttatgtgccaatgtctaggttcctttaactagattgttaattgagaatttcttttataaacttactgccttttaaagtggcaaatcacctgaaagaatagaaatcagatgatagtaacaaaatagtttgagggagaagaagatgcattcaattcctctgtcgtctttaagatggttgactatgattgcaaatatattgtaggacacataaaaataaaaatggttgtgttagggctgtagaattttaggcaagttttcatctttctgaacttacatgttgcttttttttttttttataagctgttcgtgtgattctgtatgacttaatgactctaacctttctttattctgcagagtggagactgctgcacggactctggaaccatgaacatatttgatcgaaagatcaactttgatgcgcttttaaaattttctcatatgtaagtgttttgaccttgactggttttgtactgcatttcttttcatatctctttgtcccttttctgcatttataacttttgtgtgtataagctaacaaattaacttggccagaatccagaggacctgatgaaaatgtccaaattctacacgttgctgtgtggttattggaaaggcatttattctagtttgggtactgattattcataattttgggcatttggtcttcctcagcatttaaggttctgttaacctattttcaaaatattattttttattgtaatatgctttcctaaaagtatttcaaactatttgtaacagaacttttacatattcccaggaagggaaagagagaaatgattcttcttagcttaaatatgagattgatctgggactgattgctcttattcacattcttttcttagaaccccgtcaacgcagcagcacctgaagaaggtctatgcaagttttgccctttgtat

SEQ ID NO: 11044 - DNA, 1053 bp, Homo sapiens
ccacctcggcctcccaaagtgctgggattacaggcgtgagccaccatgttttttttaaagtgaccaaagggggatcatttctatttgttctacagatggaatgtactttaagcacttgtcacgtttcattcatcctttctattttttgggcaagactcactcatagtttgacttgggtagttgtactgtagttgaaggactacgcaagccagaagagcctccagcatccaccatggtcctaactctgtgcttcaaggcttctgggttatctcctcagccccatccctgagaaaacactactttttctcctgcctccaggttataagcaaatgttaggaagttcagacgagtgtttgaacccaataaaggtctcttgcaaaataaatttgaaactttcaagtgtttaatgattgattgattctgactctaacaggctggcctgctgtctgccttgggctccctgatattgatgatttggctgatggcaacacctcatagccatgaaactgaacagaaaagactgggacttcttgctggatttgcattccttacaggtacgttaagggatttgtctaattttgaggggtgagctatattttcagtatctcttaattagttcccccccctttttttttcttttttttttttttgagacagagtctcgctctgttgcccaggccagagtgcagtggcttgatcttggctcactgcaagctccgcctcccaggttcacaccattcttctgctttagcctcccgtgtaggtgggaccacaggcacctgccaccacacccggctaatattttgcatttttagtagagacggggtttcatcgtgttagccaggatggtcttgatctcctgacctcatgatccgcccgtctcggcctcctaaaatgctaggattacaggcatgagccaccgtgcctggccctttttttcctttttttttgagacagtgtctccgtctgtcacccaggctagagagtgcagtggcgtgatcttggctcactgcaaactctgccttccgggttcaagcgattctcctgcctcag

SEQ ID NO: 11045 - DNA, 2261 bp, Homo sapiens
gcttgctctgtcacccaagctgcagtaggagagtggcactgtcatggcttactgtagactcaagctccctgggctcaggtgttcctcccatctcagcctcctcagtagctgggattacaggcacatgccacaatgccctgctaatttttgtagagacgggattttgctatgttacccaggttggtctcgaactcctgggctcaagcagtccacctgcctcagcctcccaaaatgttgggattacaggcatgagccactgtgcctggcccagtctcttttctctatgctgcatgacttcgatgagtctaaaggatctcagacaccagagttttacttccttagttgggggtaaagtgtgggagaagctggctcgtgggggtaggggtggggtttatattctgcatctttgtgggcttgtggataaaaaagtctgaagtacagatcctaatctggttcttgcctttcaggcactgcattgatctcttcttagatttcattactgtcttcagaaaactcatgatgatcctggccatgaatgaaaaggttagttagcctacaacccaaagatgagacaataatggctcctgagcttggcatgtgtgtatacttcagatttgaaaacttgctcacacactgtgttaggtccagggtaactgtaaggcaggccactgagtaagaggtaagccagaagtcttcagttgttagaaaaaaagcagcaagtgaaaaaaaaatttttttaactaattcctgcgtttagtatgaaagggaaaaaagcttcagtggcagtaaacacaacctgctacatgaataatttaaaggctatatagttgtgactcagagaaaggtattgtggaggacgttgtaaatttcagaagtagactaattttatccatttgttaatttttttttccaaggaagcattctatatagggctaatgagtatctaacgtagttgagtcaagcagtgggggaaacaaatgaaatgagcttttctttatagaccttatggagcttagagatagcatagtggtagcgggagtagttgaccagataggattgctggctctgtctgggctatgccatggttggactgagcactaggcagatgtacaagtttcagaacaagcaactgaattttcattccttaatacattgggcttccatccaagattgaatgaagaattctgctggaccaaattatttctgaatgtcagtttatgccagagtcatgctcactttgcagggtggagcacttctcgcgcctaatggttggttggtggtcttggcctctagtttcactctttgaggatagagtgccatctgcagccttcactgttgggatctgagctgtagtggctgtgaatagcctagagtggtcaggcagcccacctcggcactcctggggtgggggtggggacagctgcttaacctttattcttggtcggtctgtcggcaactttgggaaccaccagtaggatgtggttaagattcagttcttgctgagctaaggaagcatttctcatttctttttaattgtctggctcacttctagtccctaactaaatgctcactcaagagttttagcttgaatgtcaaatgtcaaaaaattaattgggtgatttttctccatttctaggataagaagaaagagaagaaatgaagtgaccatccagcctttcccaattagacttcctctccttccacccctcatttcctttttgcacacattacaggtggtgtgttctgtgataatgaaaagcatcagaaaagcttttgtactttgtggtttcctctattttgaattttttgatcaaaaaactgattagcagaatatagtttggagtttggcttcatcttcctggggttcccctcactcccttttttgtcaaccccatctgtagcctcttcctctactcaggcagtcgacccgccacgatgagaagtgggaccagcagagggcgccaacttcaggagtccgctttcccaccaggcttcattcacccagtggacctgaactgtttggtagagccacccggcccttccttcctcattgttgtttggtatgcgcacagttcctgtgggactgggccgtgagttttccattggaaagaagttcagtggtcccattgttaactcagcctcaaatctcaactgtcaggccctacaaagaaaatggagagcctcttctggtggatgctttgctccctctgagctgcccatgctggtctggcaaacacacctttctgctttgccttcacaaa

SEQ ID NO: 11046 - DNA, 1540 bp, Homo sapiens
tccctttcccaccccttgcctgaccctcagggagtcagcctgcttccatccatgggtgggaagacttcagcacaaaggaaagactaattcttgtcaggcatttttgaaaaggctgattatgtgtatcaaggtacagcatcgtagggttcccctaaacttgccctgtttttgtttttttagtttgttatccccttactgagcggcctctactaggtggctgtgattaaatgtcccaagcaaggatagggaaggggaatggttgagcctctggagatcattgtaaccaatcctgccagacctgtttggggcagtggggagcaaacctagataaggacctgtttggggcagcagggagcaaaatctcctttaacaaccaagcagttcctcattcacatcaacagagcgaggctgtgataacttaggaggcagcaatcctaatagtccttcagtgcattttagtctgtctccaactggacaccagtaggtagtgtcaagccagagattcggggcagtagataaatgttcattttactgatgcactttagtttttggtctgttacctgttttccagaaatttgtggccttttaggcgggagttaggcgaccaaaccagtgagagccccaatccctgcagttttgtggcttcaagtgtgggtggacagtcctaatggggatctccagctccttcctgtgggctgccacagacagctacccccagaagggtcaatgttgggagtggttgtggctctgagctgctctacagagcttcagtgtgagaggatcgagccattgaaagctcattaccagtaggacataatttttggctctccctattcacaaccagtgcacagtttgacacagtggcctcaggttcacagtgcaccatgtcactgtgctatcctacgaaatcatttgtttctaagttgtgtttattcctggagtgacatgccaccccgaatggctcactttcactgaggatgctgtcctctgatttagctgctgcctccagcctctggcttgagaacttactaaaggcacttccttcctgttaaacccctgttaactctccataaatttggtgattctctgctaggcctaagattttgagttaacatctcttgaagccaaactccaccttctgtgctttttgcttgggataatggagtttttctttagaaacagtgccaagaatgacaagatattaaaaaaaaaaaagaaagaaaaaaaaaaaaacacctacttttaaagaaaatacctaacagatttttaatatagttatctctaccactttcttttctagtttcttgattttcagctcaggctgcattctaactcatactgtgaagacaaaggtgtttttgattcagaaatatatgaaatctgcatagtcttaatttgtaaaaaataaagaaaattccttaacctttcctggtgtttgtgttaaattcaagggtacagctggtcatggagcttgtgatactgccagggtttgctactgggggctgggagtgggacacgattgagttcgtgtcataagtat

SEQ ID NO: 11047 - DNA, 1026 bp, Homo sapiens
gccttcagagcagaggttcttcactgaggaaagaaggtagtcagggaagagaggctttgtggttagggctttgcttgctctttcagtagctcaggaagaagctgctgggccccatccaacaggattgctgtgggataccaccccccactgtccaagaccttgctcaatgcttttgcaaagtatagcgtgcgggggcacgtgtggactcttttgtagatttctaagggcaaccctcttctcaacaataagaaccctgtttctcaaggctggttgggggaggcataagaagacaattcagggaggctactctggtcactcaaagaccccagctcccctgatgaggatctgcagtaacaggcatttctccagatgtgctcctggatctagctcaaccccagggaatagttggtggtcacaaagcatttggccagggtccatcccccaggtgtggctgagtcagcttgggagggtgggggtgaatatggggagcctgagctgaatctgggagagactggtttggaaatccttcgggactgaagagggagaagggcagggcagggagtatccccacagcaacctggctgggaaggtttcaatagctgcctcctgagcaaccacagtgacccaaccacaaggccccctcttcccggccacctccttttcttcctggtagggtgtgttgttgccaagacaatggggtccatggctcctctctcctgccccaccttgaggccagccaggccaaggcagggcagggattccatggaggggggctggggtgcagctgtctgctggtgtctgggtgggggccagagaagtgagcacagtcgcagctggtgccatcctccagctgcaccttatctgtccctggcagtgggagcagctgatgtggccagaatgctgagcagcagcaaggggagggggctggcagatggtcacccagtctgccctatgccaccccctcctccgctgagacctagaccctttgcctagcggagagagaagcaggaattcatttctggggcc

SEQ ID NO: 11048 - DNA, 1119 bp, Homo sapiens
cggaaaatgccaggttcatagaatatgttggtgtctccccagctaactaaatcaaccggccaattctctccggccattcttccgccttggccaacccctgcccacccccacccccaagctttccctcacttgtatgtttggggtggccaatgcagaagcctctaccttctgacctataacgtcccagtcaggacccttaggtgtgcattctgggaggcaaagctggaaggagacagcgagaatgagaaggggtgcctagctgggtggaggataggactgggcattagggctcctggtctctattttgggcaaagttccacctggccccacttcttagcttctaagcccaatctcctgtaaggaggttgtaaaattattctttattgaggggcagtccttcctctgggactctttggccaagcccacggtgccccatgtgtaatggatgtgcagcgccaacctacctggacacaggaattggacatcttcctcatagaatatttaaaaatgatcatgaagctgctgtgtattcacttgaaagggaagttcccttaaggaactgtaaggacagacactgccaccccaggctctccaaggccactctccagggagagggagggtcaattgtgatctttctgagatcccatgagttcttggatagaaaatgctttcccacccttctgcatgccctctgtgtggctgacagttctgggggcccaggaggttgggctgtgcagcttagtgccatgtgtctctagttggtgtcacaccagcatgccaggctgagaacatccctgggggtgagactgtggcagtggccttggccatggacagcagccatctcagacttcctcacaacaccctcatcacatatgcgccccgagcatgcaagcacacatgtgcacctctgtgtgtgtctgcaggggagtgtgaatgtagagtgtgaagtggaagcatgtggaggtgtatgggggcccatgcagcttggtgtgtgtggctgtgagagaaagcttctgtgtaggcaaacctctggttgcatgcagagcacatactagcaaaattaatcatctctttcagttgtgctttgcaatttacaaattccctttactttagctcacg

SEQ ID NO: 11049 - DNA, 1033 bp, Homo sapiens
tttgtatttttagtagagacagggtttcactgtgttagccaggatggtctcgatctcctgacctcttgatctgtccacctcgacctcccaaagtgctgggattacaggcgtgagccaccacgcctggctgctttcagctttgtggggctacaagagaggactaaattttgccaggaggcagtggggagtgagagaaggtctttacttttttgagatggagccttgttctgtcgcccaggctggagtgcagtggtgcgatctcggctcactgcaacctccgcctcccgggttcaagcgattcttctgcctcaacctcccaagcagctggaactacaggtgcgtgccaccatacctggctagagaaggtctttaagcagaagaatggtcagagtcacacaactcgaactaaaggtggggagaaactgcagggaggcagggagaccagttgagaggctgttgtttaggcaaaagaggagggcagtggcagaaagaggaggacagtggctgttgtttaggccagtctgagggcagtggcagaaggatggagaggggctagagctcaagactctgcttctgaggcctctttgtccctggcagcaaagctgaggccaaaggttccacatcactcagttctgctagaacctgacaccctgcctcacatccccaacacactctagggtctctgcaaatggagaagggaagatggtgggagcagggagggagaagagaggaggaggaaggggaacatggcctggggctaggggatgcttaaggaatggggaggcccaagcagacccacctagccccggtctagccccactgctcctcctctggccctgcagagaaagcattaatctgctatacctccctcccccgcttcccctcctcccctcgggtcaccttcttggccctggagacttggctgatggctcaagttcctcaaccagtggccctgagtaatcagaacacacagaggggccaggggcctgggggcagggaatggtaaattagcggtaggggagcctcagagact

SEQ ID NO: 11050 - DNA, 1067 bp, Homo sapiens
ggctgagggttttggtgggaaccccaagttggttcccaatactctctacctgacccaggtccccctgccccacccccagcactgatctcaatttcttccacccaccagagaattcctcgaacaaactaaactgttcggggggcggggggcaggccaaaaagggtagtggtgatctgccaggaagctttcccactgcaggagacagggtccctccccctagtgccgggaactggtcagaaatgagtctgtggtcagtgagagactgctgctaatggaacctgggctggcccacaagccacaggaggggtaggggagaggaaaggaaccaaaatacatctcagcataggtgggtaggacgagggctggtaatgctgtcctgaaatagagctggggccagggagggaggggaagagaaacagggtcggggactggaattggaggtctgagagagtacctggtggtggggcacggaggggctcaggtatcccagaggaataactggacgagggagaataagggagaggacccagaattgggatggggacactgagggatatgctgaggaacagattggaggatgacagagagcatgagtgtgtgttgtgtgtgtcctgggggggtagggactgtggtcgctgtgatcatcatggcagtgggtgcaaaggatggtgctaggtcccgtctcacctgggaggggtgggttccaggaatcccagccctaggcttttccagggtttccactctgtcctaaaccctctctgtgctgccggagctggtgacaggaaaggggctccagccccctgctctccatcagcctccctttcccactgccatcaattattcatcagcccagacacccgccctccctggcagggcaggctggtcctcctcccatgccccgccccagccacactgccacagaggccctggtgaggaaggacggccagctgggctgagatacctggctgacgggctgggtggctggctctgccggactctgcctggagtcacatcgccttcccctctggcaccttcccccttcctcctgcaaatccctggcaccagga

SEQ ID NO: 11051 - DNA, 1038 bp, Homo sapiens
tttctgggaacattacgacaagctaagagtccatcaaacccagtttctccttttgcagtctcagggaagataatacatcgtaatggcagtcatggaagctgctagaaaggaggatgtaataagttggggaattgagggagccaacgtccttacctttcttttaatgtctgtaaactgagaaaacataagggaccaatagaaggccaattccatgatataatagtgataaagcccacttgaaagaggctggaagagagaaagaagtagttagattaccggctagtcaaaggtgcattccatctctccaactttctctgccttggaggaccaataccccaaattattagacatctctcctccccattatctgccaagatatgcaatagctaacagactttggattggtgtagagacttaagcctcttcccttgctcctctgcacacacatcttcagctctcatcttgcagagatgagatacagttaacacatactgtaacacaatcaaatcagtatgtctaggattctgggcaattagtgcttttcacaggattaaatacacataggccttctcttccacccctttagcagttcctagacatatttccagtataggttacaaccaagatgctctactgggattccaagttacccttgatacaaaaaagacacctgaaccagaaagtacctcattaaataccagaaacttgcttttcttttagcccaattagggggaattaaatggggaaaatcagaacaaaaaactcattggatttcattgctatgggggcctcaggaatagatacctcatatgactcttagcagtgggggggaaaaaaaaatagataccctgaatatgacttaaagggactcagtccctaatccctcaatcccaaggaaacgcaccatctgtcctggggactggcaaaggaccctcactcactccaccttatacacattcaagacccctatcctgaaacgactcagatcctacctgaaatggatagttatgccagcactgtcggatgtcccagaaccaa

SEQ ID NO: 11052 - DNA, 1090 bp, Homo sapiens
ggctcatgcctataagcccagcactttggaaggctgaggtgggcagatcacttgaggccaggtatttgagaccagcctggccaacatggtgaaacctcatctctactaaaaatacaaaaaaaatagctgggtgtggtggcacgtgcctgtaatcccagctactcgggaggctgaggcaagagaatcgctgggacctgggaggcggaagttgcggtgagccgggatcgctccagtgcactccagcctgggtgatggagggagaccgtctcaaaagaaaagaacagaaatatttgtctaacccaaggccccagagattttctcctatgttttatagatttagaagttttatagttttagctctaacctatagttaagggtcagagtttttccatgtgaatatccagttgttccagcactattattgaaaagtctatcttttcccccattgaattacattggctgctttgttgaaagttaaataaatatatttgtgtgggtccatttttggaaattctgttctattccattttactatatgtctatgataatctttttaataaagaaaactattttactttggtgaaaagaactctgaagttatttttaggtattatgaaaaaaggctgaatctttttttttttttttttttttgagatggggtctcattttgtcacccaggctggagtgcagtggcacaatcttggctcactgcagcctctgcctcctgggttcaaggaattttcctgtctcagcctcctgcgtagctggtattacaggcatgtgccaccatgcctggctcattttttatttttagcaaaggtgaggtttcaccatgttggccaggctggtcttgaactcctgacctcaggtgatctgcccgcctcagcctcccaaagtactagggtgacaagctagagacactgcgcccggccaggctgaatgttatacgtgtgaacaattggcattcttcccaaacatctcttactctaaccggaaatatatgtgtatattaaaggtattttctgtaactaatttctaggatagtaagttatcattgtattgaatgtgcatttttatgcgtaagaagtaa

SEQ ID NO: 11053 - DNA, 1076 bp, Homo sapiens
tcagactggatttaaaaattgaggtctagcaatacactatctctatactatgagatacgcttaaaatgaaagtatatgggcaagttgtaagtaaaaagaagtaaataataccagcactttgggaggccgatgcgggcggatcacgaggtcaggagttcgagaccagcctgaccaacatggtgaaaccccgtttctaccaaaaatacaaaaattagccaggcatggtggtgtgcacctgtaaaccccgctactcaggaggctgaggcagaagaatcacttgaacccaggaggcggaggttgcagtgagcccagattgtgccactgcactccagcttgggtgacagagcaagactccgtctcaaaaaaaaaaaaaagatataaatagacatttcatcctaatatgaacacacactcacataccaggaacaaaccaggtagctatttcctatcagatgaattcaaactagaaatcaaggcaaaaagtatatcagggacaaagcataagaaataggcttggtgctgaccatcaggagctcagccaagtggagatatcaagtagatagttggatatatagcactagaattcaggggcaaagctcagaggcaaagtcagagctgagatatacatttggagtcatcagcatgtatatggtatttaaagccataagactgggtgagatgccgggcgtggtgactcacacccagcactttgggaggctgagatgggaaataaatcagactaaaactcagggaccttctacctccgtaaaatttctaggggtccagtggtgtggggtctgtcaagatattccttctaaagtgaaggataagttgttgcatttgcccctcctacaaccaagaaagagtcacaatgcctagtgggcctatttggattttgggggcaacacattcctcatttgggtgtgttactccggcccatttattgactgacctgaaaggctgccagttttgagtgggttccagaacaggagaaggctctgcaacaggtccattttgctgtgcaagctactctgccatttgggccatatgacccagcagatccaatggtgcttgag

SEQ ID NO: 11054 - DNA, 1047 bp, Homo sapiens
taacctttttctgtgaggcagatgggaaattggctgccctcaatgaatcagactgattgcaggccagtctttgtttgcataaaagtgtaactttgagacctggcgtggtggctcatgcctgtaatcccagcactttgggacggcaaggcaggtggatcacctcaggctgggagttcgaaaccgcctgaccaacatggagaaacactgtctctactaaaaatacaaaattagccaggcatggtggtgcatgcctgtaaacccagctactcgggaagctgaggcaggagaatcgcttgaacctgggaggcagaatttcaagaaccgagatcgcaccatggcactccagcctgggcaacaagagcgaaactctgtctcaaaaaaaaaaaaaaataggagtataagtttgtaacttcaccctagcctctgattggttgctttttgctgcaaccaatcagactgattgcaggctaccgctttatttacatgaggtgagcatgaagtgatcaataggcaacttctagagggtatttggacccaagaagattctgtatccaggtccttgagcagctgctcgggccactcctgcactgtggagtgtacttttgttctcaataaatccctgctttcgttcttctgttgcttcattctttatttgctttgctgggcattttgcccaattctttgttcaaaatgccaagaacctggacaacttgcagtcacaaccctctactggtaacattatgatttcccttcattaccaatcataaccaccttctaattcttcaggggtgtctgctggtttttagtttccttcattatactcatttatttcttccttctgaggcatcttcgggtttagactgggaaaggcagactgtgccactttgccatcatgttaggggcccataatgatgtccctttcatgactcagcctaccccagggttgttgaacctttgtgtttccagtaatgtagagcagaagatactctttcttgagtggtcatagtagtagcccagaaatgaagatgttcaacctgaagaactgca

SEQ ID NO: 11055 - DNA, 1029 bp, Homo sapiens
tcacttgaacctgggaggtggaggttgcagtgagccgagaccacaccattgcactccagcctgggtgacagagtgagactccatctcaaaaaaaaaaaaaagagtaataaagaaggctttataggaaggtgtcaagcagaattttgagggacagtcataaaaagattctccctttctctctctctccctactgccctcctataatgtattccaccacattttggtggtcctaaacagagttttgccatcctcattctacagaagaggaaaagaaatctcagcaaagttaagtgttttttctaatgtcccataattgataaatggtagatttgggaagcaagcccagaacttctttcttccacaatgccaatatttctcaaggtgcggactctgatcacctagactgaaccatatggggtagacgggtggggtgcttgttgaaaatgcaggttccaaggtccttctccataccttttgaatcaaaatcttagtggtaggcttcaggaatctgcattttaaaatctcaggtaactcttactttactaaagtttgaaaaccattgtgcttacggacagaacagggaagaaggggatgaggaagtccaggtggagaaatcccataaacaaaggtaagaaaacgaaagttatattttgagagtgatgagtagtctggggtttttgaccacagatatgtgaaaggatatagtgggggatgagactggaatggttggatagtgaaagatgaaaggctttcaaaggtatgttaaggagtttggatcttctcttatttttttttttggtagatgatggggacccatcaaagacatttttctaaatatatgtattttatatacatgcgtatatatatatattgcctcaggtgaatcagtgagatttacctgagattttatttatccatctctatctatattgagagagaagagagaaagaataattcttagctcttaggtttcttttgtgggttataatgaatactttagaacctactatatatatggatcatttaata

SEQ ID NO: 11056 - DNA, 1734 bp, Homo sapiens
tagcaattggggcgcgggcctgtgagccagttggagttgcggcggcgggaacgattgggctgagcagaggacgacatgttgcttttcgtggaggtgagtgcattatgctagtctcgtcctgctcttaggagagcaggagtgtagaggcgccggccggtcccaccgccatgtgactttccgggccgtacacgccgcggaaccggcagataggctgacacagcacctgggccgagcaggcctgcagcttccctctgcgcgctcacaacactctaggaagctatgggaggtgaggcccgtagtggagaagaattgaaggagaaaaacggagggctgttctggtgtggcggtgaggttcagaggaaggggaaagtgtcccatatggacctcctaaaggaggcagcattggggggttggggggcggagtctgagggaggagagggtaatcaggtgggcgcgttccgggggccgagcgcggcctcgcggggcccctctgggagggaggcgagcaacatgtggggccacggatggagaaaggtgaaatgcggtaagtattttgaaaagaaaattgaaaagttcttttgagcaacttccaccaaattctgcccgggccccgtccctaggtctctggaacgttctgtgggtgaaagcgagttactttgaatcgaggagaagccagtagggtttggaagccttgaaaggcaccgctttgaccttttgtaaaagttactcaagcagcagctgcgtgatgaagggttggttctatgaaccgattaaaagccctttacaaggaaaattccaagaatgagggaaacttattccgggaaaagccgttttttgtaatgttatttgaacaatgagacacttttattacttaaactagaacgtctgctgttggcctattttagttttcaagatagagttggatacctgccttacagaaatacgaaatttaatttcccttaattctgtcctcttgtgtgcagtgagcgtcagctgactgcctggctaatgctttgagtagattccagatcatattgttcttacattgtgaaaacgtcaaaccagcaaagctgcaacttcgcaacttggcatttgttaactatgcccataagaagaatcttttcaatgagggaaggaatttacgggttgtataatgaatctaggagccggggccagcctatggcagatttttttttccgggttgtgggaaaatcttactccgtaatattccagcataaagtaaataaatgattttacggtttttttttctctttaaactaactgatattgtgtcgccgataagcttgatatctttaaattagttttttaaaagactgctacattagagtgtatctaacattcataataaacattcattggaacattccggggaaatcatgaaaagacttaaaattactgaactcattctgtttactgttttctgtcctcattgttgttttccttaggcagaataagaaatcagataagattttaagccagtgccagccagtttttttaaggaatgttatgctatgtaaataccacaggttttaagtgtgtgttttgctgggcagaagaaagattgtgaagtttatattgacaggaactccacaatatacttttgacttccaaattgattcctttggctttattaaaatgtaagttttaataacagctccatttattgtttaaactaggtcttctcctgtctctaaagcgatacttaatatgttt

SEQ ID NO: 11057 - DNA, 1029 bp, Homo sapiens
ccccatctctactaaaaatacaaaaattagccagaggtggtggcacacacctgtaatcctagctactcgggaggctaaggtaggagaatcgcttgaacctgggaggcagaggttgcagtgagctgagatggcaccactacactccagcctggacaacagagtgagactctgtctcaaaaaaaagaaactaaggcacatataatttaaacttgcctaagtttatacagctagtgaacatggaagcttgtattagaactcatcaaccacctacttgtattggagtagaatatattgcagacaaggaatcaatcctatgtaaataatacttagatgcaactttttaaaacctggccttgggcccaatgtggtggcatgtacctgtagtcccagctactagggaggcagaggcaggagtttcgcttgagtatgggaggtcaaggctggaatgagccgtgattgtgccactgcattccaggccgggtgacagagcaagaccaactatattgacttcagtagattattggtttgttttatttttttcctcttgagaccgagtctcgctctgagaccgaggctagagggtggcgcagtctcagctcactgcaacctccgcctcctgggttcaagcagttttttttttttttttttttttttgagacggagtttccactcttgttgcccaggctggagtgcagtggcgccatctcggctcactgcaacctccacctcctgggttcaagtgattctcctgcctcagcctcccgagtagctgggactgtaggcgcatgccaccacgcccaactaatttttgtatttttagtagagatggggtttcaccatgttggccaggatggtctcggtctcttgacctcatgattcgcccacctcgggctcccaaagtgttggaattacaggcgtgagccaccacacctggcgggttcaagcagttctgcctcagcctccctagtagctgggacttcaggcatgtgccaccatgcctggccttttttttttttttcctgattttta

SEQ ID NO: 11058 - DNA, 1023 bp, Homo sapiens
tgcaggcttgagccaccgcgcccagcccatcttaacagtttttttgtttgttttttgagatggaatcttgctctgtcgcccaggctggagtacagtggcatgatctcggctcactgcaacctccgcctcctgggttcaagcgattcttctgcctcagcctcctgagtagctgggactacaggcgcgtaccaccacgcctagctattttttgtatttttagtagagacggagtttcaccatattggtcaggctggtctcgaactcctgaccttgtgatccaccctcctcggcctcccaaagtgctgggattacgggcgtgagccactgcgtctggccgaagctttgttttctttaaggtttaaactaatttaagagaagtataacttctaagttttcatctcagccttgttactaacatactctgatttagggcaagtcaaacaatttataattatttaaagttttttttatagttggagagtatacttttggttgggcaaataaaagttttaaaagaggaatgaagatggcagtatgttaaaatacacatttacttgcagcatttaaaggagtacagctgggcggggtgactcatgcctgtaatcccagaattttgggaggccgaggcaagtggatcacttgaggccaggagtttgagaccagcctggccaacatggcgaaaccccatgtctactaaaaataaaaatattatctgggcatgtgcctgtagtcctagctacttgggaggctgaggcacaccttgaagcagaggttgcagtgagccgagatcatgtcactgcactccagcctgggtgacagtgagactgtctcaaaaaaaggaaaattaattaaaggaatacaaatgttaaaatgcaaataggcactttgcacttactcttttgaaaaaaattataatgtaaaagtgtaagtaaatgtaagaaaaagaaacatctaagtatgtactcatctttcctgtcttacctgtgtccttgtcccaccacttgaaccaatctttggttcaca

SEQ ID NO: 11059 - DNA, 1072 bp, Homo sapiens
gggtttcaccatgttggccaggctggttttgaactcctaaactcgggtgattcgcctgcctcagcctcccaaagtactgggattacagatgtgaaccactgagcccagcctagggaccctagttgtaatctggcggctattttctatattcatttttgttttttcttttttcttttttttgagatggagtctcgctctgttgcccaagctggagtgcagtggcgtgatctcatctcactgtagcctctgccccccgagttcaagtgattctcctgcctcagcgtcccgagtagctggggctacaggcacacgccaccatgcccactgaattattgtatttttagtagataaacggggtttcaccttgtcggccaggctggtcttgaactcctgacctcaggtgatccacccgccttggcctcccaaagtgctgggattatagacctgagctactgtgcccagcccctagactccttaggtttaaatcctggttttgtattaatagctatgtaactttgggcagattactttaccttgaagtaaagtaactttttccttgtctgtaaaatgtggatgataataggacttaactgagattgttatgaagattaattagatgttccataaatgtaattactattctctgaatgagtgaagaattcccactttaattttcatttttactttttgtaaaatagccctaagcatcttctggtaggattctgaagttactttggaagaaatgacaggtgtttttttttccccccctaagtacttgtaacttagtagtagccctctcagtattggagatgtaaaaattgaacctggatgattgatggggcaaaatacatttaatcaatttatacattttatttctgttttacagcatttatggggttaagtggcatgggatttctgtttctgatagtaaataggtaagtaaaacaaaaggttatgtatgtccgaagagacggttttaccatatttatggtgattttcttcctaactcatggttctgttaccttaggtctgtaatttcttaggacaggaggataccattttcacaagaatt

SEQ ID NO: 11060 - DNA, 1042 bp, Homo sapiens
ctgaggcaggagactcccttgaccccgggagtcagaggttgcaatgagctgagatcatgccactgcactccagcctgggcgacagagtgagactgtgtctcaaaaaaaaaaaaaaattggctgtctagagtctaaatgaaaagatagattttattctagctaaactgacttaggggctgccagccatcagttaacttattagcatgcaaaaagacatcactttggagattgtaaggattttagttgtgtgtggatactatcatacacaactgaaatacactgtaaaatatatattttacagtatcacagatagtgaacatttcccatactttctaagattttttctccatttttcaaaactttttaaagataattcaatcttgccttgttcagggatacatcctgagggatgtgttacggatttcattatgtgaacatcagaaaatatttatacaaatctagatggtatacctacaacacacctaggctatatggtatggctattataatcttatgggaccactgttgtacatgcagtttgtgcttgatcaaaatgtcattaatgcagcacatgactgtaattatagattcatgaagttgcaaaacagtgtacaaagtggtcctgtgaagttgttgctcagtttctccttgtagtatcaccttgcgtaactatagtatggtataatgagcagcaaattaacattgatacagtccacagaccttactcagatttttacagttttccctaaatctggttttaaggatctggtatattctattttatagatgaactacagttcacctctatggtaggatgtttataaaattagtgtggcaaacatccttgtacttacatgtttttatatatctcagtttcttttgagtaaatctgacaagtagaatttttggatcaaaattgtgtatttaaggcttttaataaacattgccaactcttcagaagagttatataaattatagcaatgaactgatttttccttttcatgcttatcaaaatagtattgaatctgggccgttgaatagg

SEQ ID NO: 11061 - DNA, 1042 bp, Homo sapiens
ggcgtcccaaagtgctaggattacaggcatgagccaccgcacccagccaatgtgtgtatttatataagcatgtttgacttaaataatttaaaacacgtattttggacagggtgcgctggctcacgcctgtaatcccagcactttgggaggctgaggcggatggatcacgaggtcaggagatcgagaccatcctggctaacacggtgaaaccccgtctgtactaaaaaatacaaaaaaaaattagccgagcgtgatggcgggcgcctgtagtcccagctactcgggaggctgaggcaggagaattacttgaacccggaaggcagagcttgcagtgagtcgagtttgcgccactgcgctccagactgggcaacagagcaagactctgtctcaggaaaaaaagaaacagaaatggaaaatccttcttgagtcagttcacagttcagctacagtttttatcatgcatattctaatatcactgatgaagtatttataagatggaactctgctatatgtaatgttttgttaaagtgctacttgtaatattaaacctctttatgtatcagtataattgtccaatgttgtgctagatgtgtttgggaattgagatactgtaaaagttatattaactaatgtttatgtatatattacattagtatcttttgaattgaacttttaacaactttttagagttcactgaaaagtttaatgttatttctgatagaataatcttatttccatgcatttaaaaagtaggaaaagtgagtaagatacctcttgttagatgctttttaataattgcttgttttataggactattttgttttttcagagaaaatttgtcaaaggatctttacttgatatctcaaatggatagtgatcagttcatcccaatttggacagttgccaacatggaagaaataaaaaagttgactacagaccctgatctaattcttgaagtgttaagatgtatgtaaaaataccttttagctttttttttaatttttaaacgtaaaatgttatttcgacttctgatcatataggg

SEQ ID NO: 11062 - DNA, 1069 bp, Homo sapiens
tcaagttatctttacttataaggaagtatacctatggttttgaaaatacatggtgtgtttagtacatttttgcatgttacttaaaaccacttgtgtacagttcttttccatatatttgaccaatacaggttggtaatttttaattacagaaataattagtgaatactttttctaaaaatgcaaataaagaccttctggaccagcaacccaaatccttgtttccttcttgcttctaaaaagtgactacttctaaaaagtgactactgccaggcatttattattattattaatgttaacagctaaggacaaagtcttttttagagagccttttgcaatttttatattaacctgtgacagcccagtgatgatcactattcctacttagagagaataggactaactttcagaaatccaggcatttttctacctttcatactatctttctttcactttacttctcttttctgtcttttatcacttctttctttcttcattctttctctcttttgcctggatcgagattgttaagtccctctcagtgaagggtaagattatgagatctgagggctgtataaatgtagtaagttgtcccttaagcatattgaaatgtagtgtgaaagttggatgaaggacattttctaaacatatgcaaataccatatctatcatatcagttcattttcaagatgtaacaggtaatataaatttttttttttgagacggagtcgtgctctgtcaccgggctgtagtgtagtggtgcagtctctgcttactgcaacctctgcttcccgagttcaagcaattctctggcctcagccttctgagtagctgggactacaggcatgtgctagctaattgttgtatttttagtagagacggggtttcatcatgttggccaggatggtctcaatctcttgacctcgtgatccacccagcttggcctcccaaagtcctgggattacaggcatgagccaccatacccggcctttttttttttttttttttttaaagacggagttttgctcttgttgtccaggctggagtgcaatggcgggatctcggctcactgc

SEQ ID NO: 11063 - DNA, 1053 bp, Homo sapiens
acaaaaaattagctggacgtggtggctggcgcctgtagtcccagctacttgggaggctgaggcaggagaatggcgtgaacccggaaggcagagcttgcagtgagctgagatgtgccactgcgctccagcctgggcaacagagcgagactccatctcaaaaaagtttacgtcactttttaaaataacatctggaatgtaaaaggggcaacacttttacaacattattcttttgtgtttaacttaattttttgaaaaccccagtacaacaggagccaattttttacctaaggaaagatgtttttctgtctcgatttactgctttgtgtatatcattttgtatttcctatagtgtgaagcctcagtttaggtcatctggtggttcagaacactcaacagagggctctgtatccttgggggatggacagttgaacagatatagttcaagaaactttccagctgaacggcataaccccacagtaactgggcatcaggagcaaacttaccttcagaaggagacttccactttgcaggtggaacagaatggggactatggtaggggcaggtaagaaaataaagtacctgaaaacctttgataataatgtgatcatcctgaataattgaagaacatgatcttcataataattaaatgagcatttaattattggtatatggttatattaaataaatacgttattttcagaacatgagttggttgctttttataattattaagaaatagagtgcccatacagaatatagctctgaatcagaggtttataaagttattctgaagttccttatagctcatataagaaagaatagcttagaaaattaacatatccatttgccttatggttttaatttcttccagcttttaaactatagaagtggctgggtgcggtggctcacacctgtaatcccaacactttgggaggccgtggtgggaggatcatctcaggtcaggagttcaagaccagcctggccaacatggtgaaaccctgtctctatgaaaaaatacaaaaattagctgggcatggtggcaggcgcctgtaa

SEQ ID NO: 11064 - DNA, 1028 bp, Homo sapiens
gcttgttgcccttttctggaagataatctgtggttttcttatggttaacacaatcatttttatactttataatttaaagaatgtgtaccataaatgtttttttttatcatcacttcaaaggaaccccgaaagttaagttatgctgaagtgtgccagaagccccctaaagagccatcttcagttcttgtgcagccactacgggaacttcgctccaatgtggtgtctcccaccaaaaatgaagacaatggagctcctgagaactccgttgagaaaccacatgagaagccagaagcaagggctagtaaggattattctggcttccgaggcaatataatccccaggggagcagcaggaaaaatcagggaacagagacgccagtttagccatagggctatacctcagggagtgactcgacgtaatggcaaagagcaatatgtgccacccagatcaccaaagtaaaaaacaacaaaactattcaaaaacttcactctcttcccattaaacttgaactgtggctatattgaactgttttggaggggagggggtagccaggaaggaaacaagagaaagtacgtccatttcattatggattttggagttgtgagtgataggatcccaaaattcatctctaatgtggtttttaaatgctggaggattccaatcaatataaatatatatatatatatacacacacatatataaaaagtataatttttctatttttgtttttggttttaatttgcagagatttgctgccaggaatcaattttgagggttcagatttagcttggaagaaaaaaaagaaacatacatccttcagtataggagatgagggaatgagagaaaatattttttgaagaagcatttctgtaaaattagaaattactttttttaatctatttaaagtttggcttgaagaatgccatctctgactatatggccttgtattgcaaagcggatcagtggctggggtgcctgttgtgggtgtgagtgtgtacaagagcgattgaagccaaatctgttgtcat

SEQ ID NO: 11065 - DNA, 1708 bp, Homo sapiens
atcatttgagaagcacatattttgacatctggtgggcctgggttgaagttctgtctgtaccatttattagctctgtgactttggacaaactgtctaacctcccaggtatgagtttcatcaacatttaaaaaggaatgacggtggtgtgcagtggctcccgcctgtaatcccagcactttgggaggcggagccgggtggattgcctgagctcaggagttcgagaccagcctgggcaacatggtgaaaccccgtctctactaaaatacaaaaaaattagccgggcgtggcggcatgcacctgtagtcccagctactcgggaggctgaggcaggagaattgcttgaacccgggaggcggaggttgcagtgagctaggaccgcaccactgcactccagcctgggcgacagagcgagacaccatctcaacaacaacaacaaaaaggaatgacaccctccttggagttgtaaggaggtttaaagtaagataatagaaaagctgagtatagtatggcgtgcggtgagcactcagcacatgtaatctttattgctgctgatagtgaatggatgcgtggagacttggcagtttttaatatcttgtgttacttagtagaataaggttatatatgaagtgatgaatggaatcaatttgtgataaattttttgaaagtaagccttcactccatcatcagttgttcctgttggcacctataccctatacccttagtccagtacatgttgggtcactgcaagcagttgactagagcagaagacttgctggtctgtttcatacagacatctcgcatatgtacatttctgagcctacagattcaggcaaatgcctgtgacatataagcttggtttctgagacttagcatctacaagctatgaaaagggacatatggatgtttagaaccttcagaaacgatggtttttactcttccgtttcatatccctcacttgtcctcagtgaacatatccttccttttagttcctctttcaaaagttttctggctgggtgtggtggctcacgcctgcaatcccaatactttgggaggctgaggtgggcagatcacctgaggacaggagtttgagaccagcctggctaacatggtgaaaccccgtctctactaaaaatacacaaactagccgggcatggtggcaggcgcctgtaatcccaactactcgggaggctgtggcaggagaattgcttgaacctgggaggcggaggttgcagtgagctgagatcatgccactgcactccagcctgggagatagagtgggactccgtctcaaaaaaaaaaaaaaaagtgttcttgatcttcttttccctagagtttatttaccaccagcctccgtgagtcctctcagacttaattggtctgattgtagtctctttttagctctagattgatctttcatcttttaaaaatactacttttatttaaaaccattgctaaatctaaagctctgtcactcagttgtctttttttttttttttttgagacggagtttcgctcttgttgctcaggctggagtgcaatggcatgatctcagctcaccataacctccgcctcccgggttcaagcgattctcctgcctcagccttctgagtagctgggattacaggcatgcaccattgggcccagctaattttgtagttttagtagagacggggtttctctatgttggtcaggctggtcgcgaactccc

SEQ ID NO: 11066 - DNA, 1051 bp, Homo sapiens
tccgcctcccgggttcacgccattctcctgccttagcctcctgagtagctgggactacaggtgcccgccaccacgcccggctaatttttttgtatttttttagtagagatggggtttcaccgtgttagccaggatggtctcgatcttctgacctcgtgatccacctgccttggcctcccaaagtgctgggattacaggcgtgagccaccgcacccgaccaaaaaatttgttttaattagatttttttttttaaattaaatagagatggggttttgcattgtttcccaggctgatctcactcctgggctaaggtgatccacccgtcttgacctcccaaagtgctgagattacaggtgtgagccaccttgcccagtgatccatattctaatggatcactgagtcttgttgtttctacttcctgttctccatatcattccagtgttagttcaggcacttatttcttgcttagactaatgaggtagtctcctaactcatcagcctgtctcggtctcttctcccttcagtaggtctttctctaccctgtcactgattgatcattctgaaacacaaacctaattgtgttctcttccctgtttaaaagttttccttggcttctctcagtcacaggataaactctaagcatctttctttgtataccaagacctgcctgcctttttaccctcatttcctgctctgtctatatttgttgtctgctctctagccatgccagatgacttgcacttccatgaatgcactgtgctttttttcacttgtatgcttttgtatacattgccattctctaaaatgtccactctggtatgttcttcccctttttttgcccggttaacttctgtttcagtttcctgtgagtttccagttaacttctgtttcgttccagtttccttttctaagctcttttaagaagttaaatctctgtataagtagtcatcagttattgagagcttatgatgtaataggtcctgtgcttagcacttcatataccttgcctggctagtaagtaggtgctgaatacatagctcctattagcata

SEQ ID NO: 11067 - DNA, 1081 bp, Homo sapiens
aatgcacttagttttatattctagaatttaaaaaaatcaacttacattaacactcttttcctttggagaatatagaaaaagctaagggtcacatgagagatttgcattaataaatgtagaaagaatcagtgtaacttgcatgtgttaattacaatttttggaagcttaatgattttgtagaatcattgacaaggccatatgtatcaaataagcctatttgtaagttcttccagtcttgaattgtagtgtttctgtgaagtttgtaactttttaagcttcttttatttatttattttttatctaatatcagtcactcaaatttcctttgtcagcattacataggataaaggagacctatcaaaaacttttggaatccaaggacaaagaacattctttttttttttttttttttaaatccatagtcaccatcaacttctgttgggagaacagagaaagatagactaagagaaacagagatagaaaatgtttaatcctgtattgtggcttactgtagctcttcatattcccttgaattttagactagatttcctccaaaattctgtgaacttggggatatatatgattgccagatgtctgacacctttctagatttggaactgtctggaatctaatttcttctgctaacccatagtatatgaaagaaagtaacacacacactattaagacaaactagaaaatatcataaagaggctggatgcagtggctcatgcctgtaatcccagcactttgggaggccgaggtgggtggatcacttgaggccgggaattggagaccagtctggcaaacatggcaaaacccagtctacactaaaaatacaaaaattagccagacgtgatggcgtatgcctgtagtcccagctgttggggaggctgaggcacgagaattgcttgaacccgggaggtggaggttgcagtgagccgaaattgcgccactgcactccagcctaggtgacagagactctgtctcaaaaaaaaaaagagaccgggcgcggtggctcacgcctgtaatcccagcactttgggaggctgaggtgggcggatcacgaggtcagggatggaga

SEQ ID NO: 11068 - DNA, 1072 bp, Homo sapiens
tggggggatattgcctgagggatctgctggagcccatggcaggcaaaagccagcaaaaatttgttactgttattgtgactacatctgtatgcatgaaccacttagctctagaggaattttggttacataagcttagtggtggcttagtaaatggattctgcagttcttgttgtttctcccagattgaacttgcctttctgccatatgattggcactactgattgttgaatcatttcttccagaacaaggaaaaatgccaggcgtggtggctcccacccataatctcagcactttgggaggctgaggtgagaggatcgcttgagcccaggagtttgagattagcctatgtaacagagagaccccatctctataaaaaacaaaaaataaggaaaatacatacataaatgttagtgttatagatggtaaaaagtgaacaaatgtcaacacaatgcaatataaattatcacgtttcagctgagcgcggtagcgtcctaagcctgtaattccagcactttgggaggccaaggtgggaggatcgcttgaacccaggaattcgagaccagcaacatagtgagaccccgtttctacaaaaaatattcacaaatttcaagatttatggagttttattatatgatctagttcagaaactttttagatatgacattgttttgatcagtctcctgtacccttaggggtagcacaagtaataggaaaaacaaaataggtctagatgcagcagtgctggttgaagatgtctgggtgatttaagtttctgtgttcctgccaggggtaataattgagaatcatatataagggaaccttaggaaccctctattctaacactgtttacagatgtggaaatggaggtactgagaggtgacttggttttcttgaggccacactgtttgcagcactgtatttctgaacttgtattctaacatctcaagtagcaaaaagtggaaatgaaaaacaattgagggagctatcagtcagagatggtagaatgaatatctctaatagcccctgttttttcctcatacctcattaaatgacagtaagaaaaagcattaac

SEQ ID NO: 11069 - DNA, 1081 bp, Homo sapiens
aagtagtactgccatctcagcctcccagagtgtgggggttataggtgtgagccaccacgcctggcctactatgagaaatctgtatggtcagcacattcttgccccatgggcaagcctataatgggaaccaaatcatttgcttagtgagcatgcatttgatgaatcagttgtttaattgcagtaggccaagagaatgtggcatatccctcccccagtagggatggccttgcaggtgacctcacaggggaaatagaaggcatacgatgacaactccttcaacttcctgatgccacacttccaacatctgtccccttccatgattacttccttccttctggttaaaaagattatctgttcctcctggccaaggacagtccttctacctatgctttagatcccaacccctcctccttttccccaaatcttatactatccaatggcaccaaggatagggcagtgagagcagtctacctggttgcagtcagtaaggcacacagtatctgtagagaacttaaaaagcaatgatgggccgagcgtggaggctcacgctgtaattccagtactttgggaggccgaggcgggtggatcacatgaagtcaggagttcaagaccagcctggccaacatggcgaaaccccatctctactaaaaatacaagaattagccgggcgtggtgctgcacacctgtaatgccagctactcgggatgctgagacaggaaaattgcttgaacccaggaggcaaaggttgcagtgaagcaagatcatgccactgtactccagcctaggccacagagcaagactccgtctcaaaaataaataaataaataaataaaaatataaaaagcaatgatgaaaacgacaaaaaattggtctgctttttactaaaaagtatcactgtgtgcagcaattctaaatgctgtaataaagacctctcctgctgaggcagacagctgcattgcccccttggtatgccgttgctgtcaggtcctcatctctatcgtacagtcattctctctgtctcgtacagtcactctctcagccatattcgtccctcagcagttcatcatgcttattactgtct

SEQ ID NO: 11070 - DNA, 1050 bp, Homo sapiens
tttttggcctaaactacttaatacgtctttggggagattcctaggttgccttatggttgactttgattcacagctgtcaagttgttgagctgttcatactgatcctattccctgatccagattaatattaatagttttcttctcggttttggctaacttctcagagcatttgggtatgctgtgggctcatttactgtgtgtgctttttttcttcacatctgtggtgtcaacatgtttgaaagagaaatagctctgtggcttcaagtgtttctcaaaatgtatcacagggtacctctagccggctatcacagtaagacagtttgtgtctataatggtgcatacctcaaacctactcattgaaaatcttggatggtttcccttccacattagtacagcacaagttgggtcctcatggacaaagggggctctcagtttagtagctattcctttttggcagattacactgcagtgtggctgagggttcagttgcagtaaatggcaaagggtagggagcagcatgacatgtagttcttggaaataatcccctccaaagctgtatcaaagacatgcagtttcagagtaaataggctgcccttatggctttgggtgaaatgtgagaatgcagcaaagaccttgagaatgctcagaaggagtggaaaccttttttatccgcttttacaaaagtcactgcctgaggggaattcacgaactctagaaacaaatcgcagctgttcattgctgaatgagactgtagtcctttgaaattaactataggcctctgtatttctagacactaatgttctcctctgtctgcagccttgacgttgtggcctaatgttcttgatcatattatatgttttatacataataatttcatgattccaaagatacaatcctttctcctaagacttgtattcagcagaacagagtaataaaaaggttctgtacccatttatctcctgttctggggatctctgggtagtatctgagaaggcttcatgtgctgtgagggacatctgtgttgtcaaatagaagaggaattctctcaca

SEQ ID NO: 11071 - DNA, 1052 bp, Homo sapiens
ggaagtgtaacagtgatttattcattcaataatttttaaattatggataaaaccatatatctaggatttaatagggaaggggaatgagtgtgagtatggataaaatgagaatggccatttgataattatagagtgatgacgatagatctagacaaatagatctacctaagaaaagcttttgttgaaagagctaagcgttggtagctttgtagtctgtttttatgtcctgagactaatagtaataggttttgatcacatcagcttgttaatagaattaggtacattggtagactagatctggtcttagcccaatttataccgcagaaagcaacctgacatatgaggttaagatgagtatctgtttttttaggaatcactaaactcattgaatggtggacgtctttcatgatgtactgatgttcaagatgtccacgccagcaatagcctttccagtgtttttagcattgggtattgaccaggcacatgaaggtcacggtttttaacaggaatcttacctgaaaaaattgcattggcagaatagaactaacaactttccattaattactaatataaataggcaatagttgcttgtttgagtaattgtcacctttggaaaagaaaaataccagtaggtctttggaaatctgaaagagcatgccccagaatctgcattgaagcctaatggataatggcgataatgtcagctttcatggcaggaaacaatgcctactatatacatagtctgtccaaacaaatacaatacttatttagaaacacccatgtttattttttttagttaatctggtggtttagcgtctgggaatgtacaaagcagaagggcagttgaaacatttattatttaccctaaggcagcaaattggggagtgaaactatttcatgaatgttacgttagtagaaaaatgaatcaaggcattttaagtacaatccccagatttgtcattgagctataaaacatttatttcatatttcatttgcccatctaagatttgttgctcattctgtcccttctcccttccgtgcctcttttctca

SEQ ID NO: 11072 - DNA, 1023 bp, Homo sapiens
tatttatgtttatttatttgtgtatgtatttcttggttacccttcttcagaatgcaggctctttgccctatttgctcctgggttcccagtgcctagaagagtgttcaggcagtattgttggatgaatatttgaaccagttttggtcagtctggaaatgctctggatacttagttggaatcgccatctccagtgagttgggttttgcatttatttacaggtgtaggccctgcttccgtgatggttgggaatctggttgctggaaaacgtatagcacaagctgctggaagggatctgggacaaatagaagagaatgatttggtgaggaaggtaagtgttcctgaagtgttaccttcttacagtcaagtcaaggacagaacttactgcaggtagcagctgggggatgcattatatgacttgttataagttgctgaccctgagtcctttttctggtttatgacttcagcaccagtttctggcagagatcctacagtggcgagcccaggcgactcctgaccatgtactcttcatgctgttaaatgccaaggtattaaaaattcaatggtatatctaatcagctgactactataggaccatcttaggcactcttgatctctttctttcatcagaaaatttctgttgccatctctgaagaaggagttaatggctttctccttgctttggcatatgagggtaaactgtgcaatcactttaagattggactgagacctcctggagtgctatgtaatactttcttttcttatggtacaatcacgtcttctttattcagttctgataggagaaatggagccaacaatgcaattacatagatacacagatgttcacaatgtgttatgtcatacagtttttttacccagtgggacttttaattatttgatttctgccaggaagaaaatgaccttagaccagcattttaaaaaccctaagttatttctggtacatagttaaatgatttattgctaacagataaaaagcaaattgaaaattactcaaagagcacattt

SEQ ID NO: 11073 - DNA, 1031 bp, Homo sapiens
gcggatcatctgaggtcgggcgtttgagaccagcctgaccaacatagagaagcaccgtctctactaaaaatacaaaatcagccaggtatagtggcacatgcctgtaatcccagctactagggaggctgaggcaggagaatctcttgaacctgggagacggaggttgtggtgagccaagatcgcaccattgcactccagcctgggcaacaacagtgaaactcccatctcaaaaaaaaaaagaaaagaaaaaaattagatgcaagaattttcataaaatgaaaatttaaaatgtaatcataaaaatatattgaactaaactactttaaaaagtgttccaggctgggcacggtggctcacgcctgtaatcctagcactttgggaggccaaggcgggcggatcatgaggtcaggagtttgagaccagcctggccaacatggtgaaacccagtctctattaaaaatacaaaaattagccaggtgtggtgatgggcacctataatcccagctactcggaaggctgaggcaggagaattgcttgaactcaggaggtggacgttgcagtgagccgagattgcgccactgcactccagcctgggcgacagagcaaaactccatctcaaaaacaaaaataagtgttccaggccgggcgcagtgactcatgcctgtaatcccagcactttgggaggccgaggcaggtggattgcttgaggtcaggagttaaagacgagcctgtccacatggtgaaaccccatctctactaaaaatgcaaaaattagccaggcatggtggcacacgcctgtaatcctagctacttgggattctgaggtgggagaattatataaacctgggaggtggaggttgcagtcagccgaaatcgcaccactgcactccagcctgggcaacaaagtgagattccatctcaaaaaaaagaaaaaaaaagttccagaaaggagattaaattaatatctggctggggaatacatagggttaatttagcaagactttctgaagttagggagcttgatttttaaa

SEQ ID NO: 11074 - DNA, 1051 bp, Homo sapiens
tgaggcaggagaatcgtttgaacccgggaggcagaggttgcagtgagccaaaatcatgccattgcactccagcctgggtgacagggcaagactccatctcaaaaaaaaataataataaaatgaaaatagaagtctgcaagggcagccaggcacagtggctctcgcctataatctcagcattttgggagactgaggtgggcggatcacctgaggtcaggagcttgagaccagcctggccaacatggtgaaaccccatctctactaaaaattcaaaaattagctgggcatgatggcaggcgcctgtagtcctagtcccagctactcgggaggctgaggcaggagaattgcttgaacctgggaggcggaggttgcagtgagtgaagatcgcgccactgcactccagcctgggtgataagagcaaaactctgtctcaaaaaaaaaaaagtctgcaaggatccaaagggcagcatgaaagtagtatttggtggtgacttgatgggtcgttttgaagctgagagtaagaatctaggacccattccgcagatcaggaagagttcactgaaggatttggtataatgtcaggctctgtactagacattatttgggatacaaaagtaaataagtcagaggttttgtcctcaaggaactaaccatccagaagtaaatagaaataaacttggggaccacatgcagtgctcatgcctgtaatcctagcactttgggaagccaaggcgggcagatcactggaggtcaggagattgataccagcttgtccaacatggtgaaaccctgtctcgactaaaaatacaaaagttagcctagagtggcggcttatgccaataatcccagctactcgggtggctgaggcaggaggatcacttgaacccaggaggcagaggttgcagtgagctaggattgcaccactgcactccagcctaggtgacagagcaagactccatctcaaaaagaaaaagaaagaaatttggtcctttttctgggctgtaatagaagtttactgtacagtggggtggatggattgtctattgtatta

SEQ ID NO: 11075 - DNA, 1045 bp, Homo sapiens
tagattgtcaacatcacatatagtgtcctggtcaggctgcaactctctccaaagcatgctcttcacatgctttagttcaaaatgagtcattatatctgattgctgcgtggcaggctattctgctagtccttcctttcacatcccatttcagtaatggtgcttgaaattgtgcttcagtgtgtcttataaactttggtctgagagtcacttaagagaaagggctgactgtagtggctctcaccagtaatcccagcacttggggagactgaagcaggaagattgcttgagaccaggagtttgagaccaccctgggcaatatagcaagacccgtctctgcaaaaaaattaaaaacttagccaggcatagtggcctgtgcctgtagtcccagctactcagtaggctgtggtgggaggattgcttgagcctaggaggtcgaggctgcagtgagctgtgatcttgccactgtactccagcctgggtgagagaggggaccctgtctcttaaaaaaaaaaaaaaaaaaaaaaaaactgaaaaagaaaaagaacactgaggtagggaaatagtgtctccatctcttcttcctagtattcatgtctaccaaatgctttctttggcttcctctgaaagaagccagtttcagcaagtgagtttgtgattctttctcctttcaggtacctgtttcccaggcaactactgatcaggcatttctggaccccaaaacaacaaactgatttcttagatatctatcatgctttccggaagcagtcccacccagaaattattagttatttagaaaaggtcatccctctcatttctgatgcaggactccggtggcgtctgacagatctgtgcaccaaggtattcctgcagttaacccttcctacaaatgtggaatcttgttagattcagtgtgcactaaactaggtaagaggagtagtcaggactttcctaacatctacaaatctcttacctcttccaagatacagcgtggtacccacccagcaatacatgatatcttggctctgagagagtgtttctctaacca

SEQ ID NO: 11076 - DNA, 1030 bp, Homo sapiens
aaagttcaatatcaagatgctggctgatttgatttcttctgagggcctgcttcctagttcatagacagccatcttcacatggcagaagcaggctaggaagctctctggggttccttttataagggctctgatcccattcatgaaagctctaccctcatgacctaatcacctcccaaagggcccacataataccatcacattgggggccagaatttcaatatatgaattttgagggggacacaaacatttggtctcttgtaggctaggacaccgcaagaggtgggggagaattgtacaaaatgaggttggaaagggaggcagacaccaaatcaggtaggcttggccatatatacctctaatctttctaattgggacccttctagctttgcaaactcaagatttacctcctccaagaaggcttcctgtataatacataccacattgttctaattattattattttattttgtttgagatagggtctcactccttcacccagtctggatgtagtagtgtgatcttgtttcactgcagcctcaaccttctgggctcaagtgatcctcctgcctcagcctcccaagtagctgggactacaggtatgtgccaccatgcctggctaatttttgtatttttcgtagagatgaggttttgctatattttgcccaggctggtcttgaactcctgggctcaactgatctgccagcctcagcctgcctaagtgctgggattgcaggcttgaggcactgtgcccagccaatattacttttttttcttttttgagatggagtctcactttgtcacccacgctggagtgcagtggtgcgatctcagctcactgcaacctccacctcctggattgaagggattctcatgcctcagcctcccgaatagctacgattacaggcacgtgccaccacacctggctaacttttgtatttttagtagagatggtgtttcaccatgttggccaggctggtctcgaactcctgacctcaagtgaccagcccaccttggcctcccaaagtgctgg

SEQ ID NO: 11077 - DNA, 1084 bp, Homo sapiens
tgccttatgggccctcctcataggttgtctctgcatacacgaacctaacccaaatttgctttggtgccagaaaaactgagctatgtttgaacaaagatgtcgtgcaaactgtactgtgaacaacagttggtttaaaatatgaggggcaaggaggaggatgcatttcaaaagcttgattgatgtgttcagagctaaattaagaggagttttcagatcaaaaactggttaccattttttgtcagagtgtctgatgcggccactcattcggctccccagaattcctagactgggttaatagggtcatattgtgaatgtctcactacaaaatgacttgagtccagtgaaatctcattagggtttaagaatatttcagggatccttaatgttttgatttttgttttctgaaattggattttattttattttatcttataatttcagttcatctaaattgtgtgttctgtacatgtgatgtttgactgtaccattgactgttatggaagttcagcgttgtatgtctctctctacactgtggtgcacttaacttgtggaatttttatactaaaaatgtagaataaagactattttgaagatttgaataaagtgatgaagttgcattacacctcactgcaaggattctttacttagcttgtttttagatttcttctatatatattttatttatatcccatctagaattcagctaggtgctgctgctgctctgtttcctttgatgacgctttgaaataaaggcaggagtacaagcctaagacttgatcatttcatgaattccattccagatgttcaacttttcatcattttactccaacctcttacaaattttggaatttcggacctaaacttagaaatgagggaactattgattctcctaacttgctctaaagtttggcttgaagaaaaggttctggtatagcaatttgtatacgttgaggatgacctttagtttctccaatgttctatgtggagaaatactgaaaactcatagaatctaggttgccaagatagattcctcagctcttttatttattttttgagacagggtctccctctgtcacccgggctg

SEQ ID NO: 11078 - DNA, 1059 bp, Homo sapiens
tttaggaaagagagagcatttcaagttggtatgattagagacaggttgatggaagaagcatgatttgagctgggctttacagaatggttgggtagaacagtgtgagccaaagtgagaaggcaagaatgtacaaagtgttttgggggagcagtgagaatctccttgtggcagataagcctgcaaagataggatagagttagccaaatattaaggactttttgaagtttcattcataacatggagaatgtagaatttagagagtatagaatgacagatgatcaaagctatactgtagtgttttaggaatattgggcagcagtgtctaattggatggaatagagcaaggaatggacatccacttagttggctctttgatttgtcccagctgtgtagtgatgaagggttggagtagtgtagtggttataaggatgggaaggaaggaaagtaaatataactttgtatatgtgtgttacatgaatgtgtgtgtttaacgtttttctaatgttagaaatagtttataggaagactcagtagaactcagtgaatgactttacatgggagaaaagggagagggaataaagattattttactgttttaaagattagagatagagagtctcctattttgaaaatctggggaagtatgttctgtaatccatggtagtctggtccatagcattttggttaacaagctgtctttatttctaattttctaattgtttctctgcagagggttttcttgagcttttaatgttatttcttgtaggaaaacttgaatcttctgaactttattatctaagctctcactgataaagattatttaatcttcgtttgtgggtctctacccttgttttggagttttacattctgtccattcatagacacttaacttgtcattttcgttggcattctcaactcaccttcagtttggaggataaaggaacaagaattctatacctttttatagacttggtaaatgactcttttgtccttaccgaaactcagtatatttgattttttgattgtttgtttatatcccatgtgcttcatgacagccat

SEQ ID NO: 11079 - DNA, 1031 bp, Homo sapiens
ctgctatcaattatttttcagagtcattaagtaatggatggagcagctctgtccaaggattttagttgaatacagtgggagatacagggtagagtgggcttacttcatcttatctggagtgagaaactttggttatttgagagaggaacaaggctggcaggtgtgagaaaggtggtggctttgaggcaggttctcaaccttgagagatcaagtgactagattgacaggcctcgaggtcctgggaggagacaccctgaggaatgacttcagtatttttgatgcaggatgccctctcctcctcctttttaatttttaaatttaagtaaaatgttttttaaaatatataatatctgcacttagcaccagattggaaagctgtaaagggaacaaagtaagagaggtaagtcttcctcagttacctacctcctagccacacagttcctttccctggaggcaaccacttcccagtttctcatgtgtctttacagagactttgtacttattaccaaactggaatatggataagtgtgcatatattaacaaaaatggcagtgtactgtacacactattatataccttactttttctcttaatatgtcctggaggcctttccatatcagtgtccagagaaggcctcgttctttttagcagctgtgcagaatgccattaaatggatatactatcatttatttaataagtcctttattgatgggcatttatttcattaatgaatattcagtaaataaatatttattccattaatttcaaactctccttattatgggaaagttgcattcaatatccttgtatacatattttgcatatgtgaggctatatagaataaatacctgggattagaattgctgggctaatgatgtgtgtccatttaaaactgttaatagcatattgttaacttatttcatatcactacaaataatccatcaacttttaagccttgatatggtaaggaatattagaataggtaatagaagccttcatataatcttaaatctttattcaaactcaggtta

SEQ ID NO: 11080 - DNA, 1033 bp, Homo sapiens
cacagatacaatttgcaaatattttctctcattctctgagttgccctttcactctcttgatagtatcctttgagcaacaaaagcttttcattttaataaagttccatttatctattttttcttttattgcctatgcttttggtgtcatgtctaagaaatcattgacagatccaatgttatgaagcttttcctctatattttcttctaagagttttatagttttagctctgacatttaggtctttgatccattttgagttaatttttgtgtatggtataaggtaaggatccaacttcgttcttttgcaagtgaatatccagttttgccagcaacatttgttaaaaagattgttttccccattgaatggtcttggttcccttgtcaaaaatcatttgaccatatatgtgagggtttatttctgggctctttaatctattccattagtctatatgtctgtctttatgccagtaccacattgttttgattactatagatttgcagtaagttttgatatcaggaaatgtgagtcctccaactttgttttttttcaagtatgagacaagatctttttaattttccccttaaatcttttgtagatatggggtctcactatagttgaccaggctggccttgaacacctggcctcaagcagtcttcctgctttggcctcccaaaatgctgagattgcaagtgtgagccactgcacccagcctgagacaagaccttagtgctacttgctaccttttatttgatcttccttccaacatatttttttgtgtgttctagcataaagtgtttgctttatttatgtatttattgagacagagactcactctgtcacccaggctggagtgcagtagcatgatctcagctcactgcaacctccacctcccaggttcaagcgattctggtgctttagctacccaagtagtttggattacaggcatgtacaccacgcccagctaatttttgtatttttagtacagatgggtttttgctgtgtcggccaggctggtttcgaactcctggcctc

SEQ ID NO: 11081 - DNA, 1027 bp, Homo sapiens
tatgaaagaagagattcatacattcaacaaacatgtatgaactgtctaccttgtgccagataggcatcacattatgtactgtgcttgctaagctgagaaaatcatagtagatggaagataaacccctccccttcacggatctcagggtccagtgagagatactggtatgtaaacctcaataacaatattctgtgttaactgctctaatagaagtaagtacaagtgttatagggacacacaggagggaaggacaattctattgaagagagttgaatggggctgtcttcatagaggatgtgatctttgacctggacctttaaatattaaagtatggttaaaaaaaaattcacctgtcagagaagagatgagagagtagttcaggtgtgaggaacagtgcatataaaggccgagagacatgacacaggtttaattgtttaaaatagtgagtgtagctgtaactgaagcatagagtgtggtttggtaagacaggagataaagcctagaggcaggttggagccaatgagtgcatcctaaggggttttgttttctctcacttccagagttcccaggttggaaataacctttgggacccattttgagctagtgcagccttgctctggattcttgctctaacttgtgcacaagtgtccttcctgcaggcttgtgccaagtatgtggatccaaattaacagaaatattagccccttcttgtcatcttcttttttttttgagagagagagtcttgttctgtcacccaggctggagtgcagtggcacagtctcggctcactgcaacctccgcctcccgggttcaaatgattctcctgcctcagcctccctagtagctgggattacaggtgcacgccaccacgcctggctaatttttttgtatttttagtagagacggggttttgccatgttgaccaggctggtcttgagctcctgacctcaggtaatccacccgcctcggcctcccaaaatgatgggaatacaggcgtgagccactgcacctggccagccccttcttg

SEQ ID NO: 11082 - DNA, 1086 bp, Homo sapiens
acaattatcagtccatgagtgctgtgaagaaaataaaacaggatgctgtgccatagtgtgcctggagctgccacttcacctctctatcagcttcattgttttatctgtaaaatggggctaatacagtcttgttatttgtggtagttccataaagttgaattgtagaactgaattaccaaatcttcaaccattgctcctaggggaaatacagggctaggttcctgcgagcctctggtcactttttcaacctgtcaatacataaccttattttatgtgtttctttttttttctttttttgagacagggtcttgctctgttgcccaggttagagtccagtgacatgatctcactcactgcagtttctgcctcccaggctcaagcaatcctcccacctcagcctcctgagtagctgagacctcaggtgtacaccaccacacctggctaatttttgtatttatttactttttggtagagacagggtttcgacatgttgcccaggctggtcttgaactcctgggctcaagcaatccactcacctgggcttcacctgctgagattacgggtatgagccactgaacctggcctgtttcatgtgtttctgtttatttttatttttaatttttatttttttgagacagtgtcctgctctgtcacccaggctgtatagtacgagagtgtatcataggccaggcacagtggctcacgcctgtaatgccagcactttgggaggccgaggcaggtggatcatgaggtcaggagttcgagaccagcctgacaaacatgctgaaaccccgtctctattaaaaatacaaaaattagccaggtgtggtggtgtgcctgtaatcccagctactcaggaggctgaggcaggagaatcacttgaacctgggaggcagaggttgcagtgagcggagactgcgccactgcactccagcctaggcaacggagtgagactccgtcaaaaaaaaaaaaaaaaaaagccaaaaacatcatagctcactgcagcctgaaactcctgggctcaaggaatcctcctttgtcagcctcccaagtggctaggatcacacgcacatgccaccatacccg

SEQ ID NO: 11083 - DNA, 1034 bp, Homo sapiens
ccatctctactgaaaataaaaaattagccgggcatggtagtggcagcgcatgcctgtaatctcagctactcaggaggctgaggcaggagaatagcttgaatccgggaggcggaggttgcagtcagccgagatcacgccactgcactccagcctggggaacagagtgagactcctcaaaaaaaaaaaaaaagaaaagaaagatcatcaggcacatcaagcatgttagattctcataaggtgcatgcaagctagatgcctcgcatgcgcggttcaccgtaggtttcccactcctatgagaatctaatgccgccgctgatgtgacaggaggcagagctcaggtacccgcctgccacttacctcctgctgtgtggcctggttcctaacaggccgtggaccagtaccggtctgtggccccaggggttggggacccctgatccaaagggtcccttgacacatatttattgagcacctgtcatatactaggcattgttgcaggtgttagggatacagtagtaaacgaaaggagacaaaattgccttctctcagaaagcttaccttctgccaggtgaggtggacaataaacaaaagtataaaatgtaaagcagttgtgcctactacagtccaccttctgctcctcacttccccaagattccccatgtttggtgtacacacacctgcttcaggtattcagtcaaatgctagtctttgtagatagaattaaggtctcaatcagttgacctttagccatctaaaggaggttatcatggtgggtctgtcttgattgaactagccctttcaaagcagagagatttctcagctgattgcacaagaggaaatcagatgttccagctggcttggaagcaagcagacgtccatgttgtgaactgccgatcccaacagccacatggcaaggaactgcaggcaaactctaggagctgagagtggttcccagctgacagctaggaggaacatggggacctcagtccttcatctgcaaggcagtggatcttgtcaacaaccagtaagcttggagg

SEQ ID NO: 11084 - DNA, 1068 bp, Homo sapiens
agctacttgggaggctgaggtgggaggatagcttgagaccaggagattgaggctacagcaaaccatgattgcaccactgcactccaccctgggtgacagagtgagatcctgtctcaaaaaaaaaagtttacacacaaatggactttttttctgcttgttggaactaccacaaactatgaggagttcaggtgacaattgtaataaaagcatctgatttgctgaatgtttactatatactaaagtattatgctaagcacctgtgttgtatcatttactctatgtagttattctttgaggggctaggggctcttattcccattttacagatgagaaaactagggcatagagaagttaagcagtgggtccaaagtctatccaagtccaaaacatgtgctctaaatattgtactgtgctataaactgtgagtactgtaaaagtgaccttctaaccaggctctctgccttcaatctcccatttgttttccatcctacggctagatctaactttggaaatgcaccctgtttgtctgacctagaggttgtgtggcttctaggatcaactctagaccccttagcttagcattgcaatcagtttcatctggtcttagtctccctgactcttcttgcctttggctggaaccttggcattgttcgaactgtcaatttactctgaacccagtgtagctaatattttttcacagccctttgctttcccttttccttttctctggaatgcttctccccacttctcttcctagccaaacccagcgtcctccagtgtggaccttcgtcctcttgtgttctcccggtcagtgattccatcctctctgcttttcccctcagcctgtattggtagttggagttgcactgtttatagttgtcttctcccactctccatgcccaaagaattggtgcggggagctggcttatttgttatatggcttcggcctgcacagagccttgcatgtttcaagtacttaataagtttgtttaattgaattaattcatttcttttccatcctctcagtaaaatcctaggtaaataattccaattctgttttgctctaat

SEQ ID NO: 11085 - DNA, 1063 bp, Homo sapiens
ctcacttaattctcacaataacttcatgagggaggctctcaagttctctttggaggatatcatttttgcccctcgtgaatgagaggggcacctgacttggacttctaaaggcaggaggacaataatggagtggtcagggaaagcttttcaaaagaagtgacatttgagttgaattttgaaggatatgtaagaagtaggcaggaaaaaagcattgcagcaaaagaatgtgtgagagcatgcatgctgcaggaagccgtgggtgtgcttggttcctgctgggggagatagggctggtgatagctccaggaaccctaggtggctctgcatgaagtggggggcagccccacattctccaaaaggaagatgctttcctcttgtcaggcatctcaatttgaagaaaaggtagttcctctgtctctcacaggcataaagtagagcacttagaggataatagtggagcttcaaaagccttgtttgtgagctaaataaacaggtgaagttgtgctcagttaaggatatctttttggccccatctctataaaaactgttttggaacatcaagtatgctaagggattatattctaagtttggaaaaggacctgcaaaagatctcaccattgatgtcaatgtctgctccccaatttcctgcagctctgctgtgtgcgtgcaccagctgcctccaggccaactacacgtgtgagacagatggggcctgcatggtttccattttcaatctggatgggatggagcaccatgtgcgcacctgcatccccaaagtggagctggtccctgccgggaagcccttctactgcctgagctcggaggacctgcgcaacacccactgctgctacactgactactgcaacaggatcgacttgagggtgcccagtggtgagtgcatgcccttgttgggctagtggctcagcttggagatagggtaccccgtcatttcatttttttctactcttgcccactcacttggtttgacgataaagatgccttttggatgttcccgaaggtgacaaaggctggggtttctcagcagttgcttttgtagattaga

SEQ ID NO: 11086 - DNA, 1034 bp, Homo sapiens
ggcacggtggctcacacctgtaatcccagcactttgggaggccgaggcgggtagatcacctcaggtcaggagttcgagaccagcctgaccaacatgatgaaacccccatctctactaaaaatacaaaaattatctgggtgtggtggcgggcacctgtaatcccagctactcagaaggctgaggcaggagaatcacatgaacctaggaggtggaggttgcagtgagccgaaatcataccattgcattccagcctgggtgacagagcgagacaccatctcaaaaaaaaaaaaaaaaaggagtcttgaagaatgagttggaatttttaagagaggcgagagggcaaagaacattccaggccaatgaaaataccttgagtaaaaagacaaaggcatgaaggtccactgtatgtttaaagaacttttatgatgaggagaccagcatgatgtgcttgtgctggggaagcagggggacgtcaggctgccccaggtgtacaggatcttgagggctgacctttatcttctaggtaaggggcttctactgaaagtttccatgtgggaaatgaatgttcattttttcctttggaaggaattctggcagtggtgtggaggatgaattcattcactaccagccttctgttgggaagggtggggtgaggcggggtgtgtgtgggtgcacagggcaagagcaggctgagatgggaggcaaaagacctgttggaagtcttttagagaaggtccaaaagtaggacaggcggacggagatggagaggcgggggctaatttgagaaacattttggtggttctatactgttgtcattaaaagcatagattatagagtcagacagtcctagattttaagccctgctttgccacttactgcttgtatgaatttgaatattacataacctcctctttgagccttagttttcttgtttataaaatggggatgataacagcgccttaccttccaggtggtttggggaagtgagataatttatgtaaagcccttagcatggagcctaatacatagtaagc

SEQ ID NO: 11087 - DNA, 1234 bp, Homo sapiens
tgccttggggaggtctatgagcacatgcagtgcctttgtgcgtgttaggagagctaccccctctggaaggactgaatgagaaaggaggtttaaaaaagaaagaaagaaaagcgactccctccagttcgacagatcaaagagaggatccccctctcggctgaccagatgggaaaatgcaccccctcaggcaggtggccaattagaaaaatatgtccttttggcagctgcagccctgggttaatatgtgagacttggcaagtgagagcctgggcaggatctcagatccactcccactcccgggatctggcatccaagtgtctgacacagccatacgtggcagtgggtgtaggagcctgcctggggtgctgaccccactggaccgtcttcctagttccaggagctggtgctgccccactttgggaaggaagatgctggggatgtacagcagttctacgacctgctctccggttctctggaggtcatccgcaagtgggcggagaagatccctggctttgctgagctgtcaccggctgaccaggacctgttgctggagtcggccttcctggagctcttcatcctccgcctggcgtacaggtgagagccactgactgtctgcccagcccctttccctgatacacctgcctgtgaaccaccctgatcgctcttcgtgcccatctgcctgccaggtctaagccaggcgagggcaagctcatcttctgctcaggcctggtgctacaccggctgcagtgtgcccgtggcttcggggactggattgacagtatcctggccttctcaaggtccctgcacagcttgcttgtcgatgtccctgccttcgcctgcctctctgcccttgtcctcatcaccggtgagtgaccagcaccacaccaggtccaagggaatgggcgtcagggggttgactggttctcaggagggcactgtcccagggagtttggtgggccgggatctagcactttctgggcccctgcactgccccgggctcatgccagcagtaaagtagggaccataggaattgcagatgggctcagctgcatccagctctaaagcgcaagacagcctttggtcccagactgtcaggatccagactgcaggtgtcatgtatgtggcctagggtattggcttgtttttaaaaccttcctgtcaattatgctgcatatagaaaagtacacaaatggtaaattttcataaaccgcacttacccaaccagcgccttggt

SEQ ID NO: 11088 - DNA, 1931 bp, Homo sapiens
agtaataagccagttaccgcttgaatctcagtttctttatctggaaagtggtcattatttatctgctgtccccttacctagagggaatcaaatgcgtttgatacaggttaacatttaaaatgctttcaaattgggcagggtgcagtggctcatgcctgtaatcccagcactttgggaagctgaggtgggtgaaacacctgagaacaggagttcgagaccagcctggccaacatggtgaaacccagtctccactaaaaatacaaaaattagcggggttttgggctgggcgtggtggctcacgcctgtaatccaggaggcagaggttgcagtgaattgagattgcaccactgccctccggcctgggcgacagagcgagactccgtctcaaaaaaaaaaaacaaaaacaaactttaaaattggaaataacatatgtaagctcatgcacaggcctttcatttccataatgcttcaaaatgcagtcctgtgtgacatcttatttgattatttttatagggagaagatgctctgcagtggttgttttcatacactgctgactctcacagtgaaatggttttaaggggtgccattatatattgcttacagattccctagtgtcaagttccatcctctatcatgtatatgttattctgtgagtaagatacccagaaggccaaaattaaaactctttatgaaagtttaaatacaaatacagaatagtgtcaattaagataaagcagtgtttctaagtaatgtcattgaaaaaagaggtatatttcatctcaaaacattctggaattctcttttcgtgatggtagaggaaataactgaacttgagtacagtattttaagtaattatttgtaattaggtttgccttatgtacatttatgagccagtttcttaaatttgtagtagatactgctatggtcctgatagtgggaaagtaccaaatcaagaagtttaacttgaatttgtgtacctcctgtctcccattttgtgtaatggttagcatggcatgcattgggcacttattttgtttgattatgtatatgatcaaattgagtatccctggagggataaggaaaaggtagtatggcatcttctgtcaaaatgaagtaattgggcacagagaggtcatgtaactgaacccgtacgggggtcaagatggtggagcttatgagttttgactcagtctttactatgctaaacttacccaatccccaactaaatcaaaaggtggcttgcactgggatctttttgactttacaatgggtttatccggatagtaaatgcatttttttacttgagaagggtttatcctgacagtctcatcataagtcagggagcatctatatagtgcagtaaaggtgaaggtgaaatattgtattacattgcatgaaatgtcttttcatggctgggctgtaaacaccaatataattagtctaattctaggcactctgggtggatcgattgtgtttatgcaatgttgttggtttagggaaacatttgttattcattatttaaagtagcttttgttttgtttgtttttgtttttgttttgagacagagtctcactatggctcaggctggagtgcagtggcgtggtctcagctcactgcaatctccacctcctgggttcaagcggttctagagatggagtttcaccatgttggccaggctggtctcgagctcccgacctcaggtgatcttcccaccttggcctcccggagtactgggattacaggcatgagccaccacacctggcctaaagtagcttttaattatggagaatgtggcagaactcacttttagtaacagctttattcaatgtaatttgtataccataaaatttacacttttaaagtatacagtttggaccgtgtgcagtggctcactcctgtaatcccagcactttgggatgccaaggcaagag

SEQ ID NO: 11089 - DNA, 1033 bp, Homo sapiens
gccattatctcactactgtactccagcctgggtgacagagcaagaccctgtatgatttggtggggtttagtatattcagagatgttcaaccatcattattatctaatttcagaacctttttatcacccccaaagaaaagtcctttatataggactaacaattccttttcatttatctttttatttattgaagtgaaacatcacttagaacatggttctcagctaagggacagtcttttcatcccaaaccctcatcccaccccagagcatttggcagtgtccagagacgcttttggttgtcagagtggaatggggatcggggattactattggcatctaatgagcagaatcagagataactgctaaaatccccccatgacaaattacctaagctaaaatatcagcagtgctgagatagagaaactctgagttaagaagtaggctgtatttattttagtatctattataacaaatcctgtttattaagaaaaccatgaatgtgttgtctcttgtttaacggcttctggacttagcaatatttccgtttttaagatcttttattaaacctgtatgggtatataaagagctggaggtgtgttttccccactgtagaccatgtataaataattgggacaggttttgttttgtgaggtgattgatttgttaactttttaaccagttcacataagatttagagaaaattaaagaattggaccagttcattgttgaattgcaaaggattgataaacctggagcattaaacagtgctttacttataaagcagagggaacactgttgaaatctaaacatgtaatgggcctaggtattgagggagcaaagggcatggaggatttagataacatcttttctcagttaactggaatgaaacggagtggaacaaacacgggcacctactttaggtttattgattttgctttccaagggctaattcctttaaacctgctgcttatattttgactgagtcagtgctgctgctacagttaaataagttgaagatcttgtaaggaatttta

SEQ ID NO: 11090 - DNA, 1052 bp, Homo sapiens
gataaggcaatttctagtgccatttgtgccatatttctgtagtcctattttgccatatgacatgattgaaatcaacacctcttagaaatagttttgctgcctcataattgattaccatcatgataacctgtagtcagtgtgaaatagagataaaaattaatgtacttagttaaatgcatatgaaggtctaatcttgttccagagttactcttactggattatttttagatttttattaacattactggtctctaactttactcagtctggataagaaaaagaataccatgcaattgttaactatttgatgtttactagattaactattaatatattgttgtggtccatagttaagagttactttgttactagagatttcattatagtggtgtttaatatagttttgggtatttttaactaaaaatcattgttatccttcaactgtagattctactatgaaatgaggaaaaatcagcaatagaattaattgggttcaaagtatataaataatgatgtgggaaagggaagtcagagggtatctctggaagaactgatttatctgaaggtaatactgagtgaaagaacctaagattgtagacaaagcatgctttatgcaattttgctggtacatagtagtagtagaggctctataaatgtgttgggtgtttttgtttttaagagacagtgtctcgctatattgcccaggctggatttgaactcctgggcttaagtgatcctccagcctcagcctcccaaatagctgagactgtaggtacatgccactgcacctggcttctataaattttgataaataattgttgtggcaccaaatatgccttttattcagctagttatgtgagaattatttttaatttactacacttgacaaattaccttggatagttaaaaagttaattctattctgtgaaattaagctttgtaaaaatagtataattgacctaatattcaaggccagcttaaatttgtttaacttttaagtcttttaaaggactctttagcccacaaattggagtgttagctagattacagtg

SEQ ID NO: 11091 - DNA, 1007 bp, Homo sapiens
agtggtgggcctgcctgaatctacagtaacagttttcaatcagttttgccccacaggggacttctggcaatgtttgaagacattgtagttgtcacaattggagggagtgctgctgacataagtagaatccaggggttaattctatagggaataggacagtccccatcaacaaagaattatgcagcccaaaatgcatgtcaagattgagaagactgattgatctagatgaacattaaatagatgataaatagattagctgcctaacagcacgttggtcacaaaggggacctaatttgtatatgtttcagggactcctggcccatacagaatttgagatagctaagcattaaaccaataggaaaaaacgggaggaaaagagccacctggggttgaattggagcatgtacttatggggcctgaggtaactgggatgacagtgtgacgtgaaagtgaaaaatagggtaaaatgggggttttctatgtgtgagaaatattgggcaaagtttttatgagataacttacggtttttgttttaatgtatctgtagacagggatgatcgttcttttggccgtgatagaaatcgggattctgacaaaacagatacagactggagggctcgtcctgctacagacagctttgatgactacccacctagaagaggtgatgatagctttggagacagtaagtttgtttttatgaagttagcttcctctgtgctttgggaggctatttagtaataggacaaatgtgttacagatgatcagatcacattaacagatagaaggaggaaagcagattaagaaaaattttggatagtatctgaaagaactgatagatgcaggaaacgaatttgataaattaataattttttttgaaaacttaaccaaacaaagggacagacatttctctttttttggagacaattgtttataaagaaacccaaactgggcatggtggctataatcccaacgctttgggaggtcaaggcaggtggattgcttaaggc

SEQ ID NO: 11092 - DNA, 1034 bp, Homo sapiens
ttatattctctgtatcttttgtatatccaaaatatttaggacaaacaatcatttttagaaatttaacttccttgaaacacttaggtttctcttgaaagtgttctgacaacttgaattgaggaagaaatcagactgcctgccttaagagtttatttgttcagtgttacatgctttgccccatgaaccacctgccaaatttatattatacacagagacaagggtataagatctagagtcttcctggctgggcgtggtggctcacatctgtaacagcactttgggaagccaaggcaagcggatcacttgaggtcgggagttcaagaccagcctggccaacatggtgaagccccatctctactaaaaatacaaaaattagttgggcatggtgccacgtgcctatactcccagctactgaggaagctgaggcaggaaaatcagggaggcagaggttgcagtgagttgagatcacaccactgccctccagcctgggtgacagagcgagactgtctcaaaaaaaataaagaactagaatcttccctatcatattgtattagttcttaacatgcagatttcggagcaagatactttcatccagtagtttaatgatggtcaaaaatttcttcccatataaaagaagtcttgatagattattaatttattacttaaatgtttaccatttttagtctttcctgtggtcttgtactacatcatggatgtggtagaagagtaattgaacttgggtttttttgtttttttttttttttgagatggagtttggcacttgttgcccagtttggagtgcagtggtgtgttctcagctcactgcaacctccgcctccccggtgggttcaagcgattctcctgcctcagtctcctgagtagctgggactacaggcatgtgccaccactcctggctaattttgtatttttagtagagatggggtttctccatattggtcaggctggtctcgaactcctgatctcaggtgatccgcccgcctcagccccccaaagtgctgggattacaggcgtga

SEQ ID NO: 11093 - DNA, 1031 bp, Homo sapiens
gggggcctggggggtgggggaccaagaggccagaggggaggtgcccttaaatagcgcaacctcagctggagcctgtgcccatccactgaaggcccctccaccttcctcctgaagctgaggggctgccccatcctcaagcccacgagagcccttcaccaggagctcagttccttactcggtccccttccaggtgacttcagcctgtcaggccttgcctcccgtggagttggtgagtgcgctctgggatggggtggggagggcaaggaacctggccatggtgtccagaggtctggtggctccagagagggcccccaggagatgaccttgaacggagtgctgtgggtattgctcatcctatgaggaaagaaaaaactgtctgagtcctctgctgatcttgtgcccttgggcctgctgggggtaggactcctctccccttatccagtacagccttcaaaaggacactgacattcccttcccctgtccccaaggcccacattggtccttgcccctgctgtaactaaccactcccttttcctcccccatctccctctagcggcgaaacacggccccagtcaggcgcatagagcacctggtaaggtgatgctggagcaggagggggaagcaggtagctttgggagtaaggatctagatttcctgaagacaaaaagggcatggctctggagtgggcagtctagagtagggggtacccaaagagatgtctagacactgtctgttaaccaccagggatccaccaaatctctgaaccactcaaagcagcgcagcactctgcccaggtaagtgagggtgctggggtggtcccacgtgaccccctttccgccggccccacacctcagcccagggcactgccccgcaacagagctccccgggacagccccccacccccaaagcggtattctccctccagaccgatccacccaccctcaggacccagcaggcttcacctgctgcccaacagacagccttcccgtcacactagccacctccgggtgccccgcccctgcgttcatgcg

SEQ ID NO: 11094 - DNA, 1043 bp, Homo sapiens
ttccattcctgagatggcaaatccaagcaactttccttttggcagagttcctccataggaggccccaattacttttgctcctgttggcttccactccttgcccaggagaccagttcctcctattgacctagaaagaaaactcttcttgactcatgtcctcgttctgagcttcacagagagcgcccagcaaaaaaaaaattcatatcgcacgttgtaatggcctgaagatgttgcatttagcagcccccctcttcctttctggtttcaggtttctgaaacagatcgtgagcttcatcaagagaattcaactggaaaaccaagactggtagactctctttttcttcagacaataggcaggagccaggcagagtccagggattcttggaacacctatcttttcttcggaggacactaagttctatttgaagacaaagttcaatatggcaacaggactgatgggacacgaaggagtcgctaccgtgatttggtgacagttcttcaaaacgacagtgtctcaaggaaaggtggacctaggaactcctgaacttttgggttgccttaagtgagaaatcagcatggctcaggtaaaaagctctagagtcctcctccaagataactgggaagcctgtttgcagtttcactcttgaatgctgccttagtcaacatattgaccaaccccagtgatccaagctctgtattaagcaccagggggagatctagaggaaggaaaggagacaggccacagcccctgccttcagggagcttccagtcaaatgaaggaggtaggctatactgcatcacaggcactgatgggacatttgcaaagcaacgtgtactcagtttacatttggtacattaagtgctgaggggtgtaagggagtgaatagtacggtgaatgcttcttttgtttttttccaacaggaatttattgagttcctgttgcatgcaaggcattgtgctgggaatacaaagatgaatacgattgtccttgtccccagtgagcttccaggctagttggggtcgggagagggatggaaagccat

SEQ ID NO: 11095 - DNA, 1049 bp, Homo sapiens
atgggctatgagtttagatttgatttgtcttcaaagggtcaccgaaaagacagtgataagtcccggagccgcaaagatgatgacagcttgtctgaggcctctcattcaaaaaagactgttaaaaaggcaggtaatggggtgatcccccaaactcatacagtttggtaatggggtaatattcctccttcttccctctaccatgtaacctggagctttccctagatgctttgatctctgatagccagtgagtgagtcccccagatttcatccagagactaccttggtagttgatctcctgccttgctggaacagtaatggtacaggttggggagcatgagatcccagatcccgaggcatgggagcaggcaggctccagctcaagtcatactcagactgctgggtttgacaggatagacagcttacccactccacctccttccccaaagggtctcttacctccatggagtacaggagatggcagcacctttagacagcatcagagaggttcctttctccaacagctggaagtggacccagagtagaacagtgtctccaggaagagggcagtggtggcctcatgacatgcctgattattgcccccaggtggtggtagtggaacaaaatggttcttttcaagtaaagattcccaaaaattttgtttgtgaacactgctttggagcctttcggagcagttaccacctaaagaggcacatccttattcacactggtaagtctcttgtttatattcaaaagggggagaatagtctatcgcttgtattccatgtctgtttgtggctctagttgggtttattttaatgggtaagtattagaaatgaaggaagaagataagtcaatgaagcagagagattgcatggctttgtatctggtgtcactgagaccagcacctttggggacctctccccatttatgatcacttaggtgtctacacattactaagagttaaagtttctgagaaaactggaatgaggtccctactgtacatacctccccacattcacttctctgtccacctgggccaggtgagaagc

SEQ ID NO: 11096 - DNA, 1045 bp, Homo sapiens
acatcacggagctgaatctgccgcagctagaaatgctcaagaaccagctggaccaggtggggacgggccccagaggcacctctttcctgctctacatcccccttgcccacgcgtacttctcgcgcccggttccaagttggcagcctacctttcccaggcgaaacctctatccgatcccaggacctgccccctccccggccgcgctcctttctccccttagtcctctcattgacccgctatcccggtcctctgtaggaagtggagttcttgtccacgtccattgctcagctcaaagtggtacagaccaagtatgtggaagccaaggactgtctgaacgtgctgaacaagagcaacgagggtatggggtaggcgggtgagggtaacctaaagtggcgaacctgcttctctcgtcccacctcctaacccagtttttcttacctgaaacgagaaaatccattacatatcgtataccgcttcatgaaccctttgcatgttgcctgcctagaattgaaaagtacaggacattcctctgctcctattgcccctgtttccgttcttttcacactgtctgtgggtgctgtgccctgttggaactctctttaacgtcttacgttggagccgctaaccttccccaggtgtttgtcttcattgctttcacagggaaagaattactcgtcccactgacgagttctgtatcctttccacaggaacggctacctgctgccttctccctttctccttcactcccccaaaaagcggggagggggattgttttgattacttcagattaccctctcctcacaatgattttgaggataccctttttttttttctttcttttttgagacggaatttcgctctgtcgcccaggctggagcgcaatggtgagatcttggcttactgcaacctccgcctcccgagttcaagagattcttctgcctcagtctcccgagtagctgggactttaggtacgcgccaccacgaccggctaatttttgtattaatagtagagttgggggtttcaccatattggccaggctagtct

SEQ ID NO: 11097 - DNA, 1046 bp, Homo sapiens
atatgagaagacagtcttcagaccttttccattgctcctatttattcattccagtggctttctctttataaatgacgtcattgttaaatcacgttgccttgtgtaatggggccattttagttcttaattaaataacaagagtgccttctgtttcagaaacgtttagtatctgttctatctccctttccctttgtttcattttgtaaagtagcatgtaaacgtgcaactaataattctgctcatgacttgcttttttttaccctctttgaaaatgttttaaaatgtaagatgaacatctgtaggaaagttattatatcatgctttttaagttactttttgggtgtctgtcaactttagtagataataattagttgagttttttcattttactatttaatagaaaagcaagcacattatttttcatatttcttacagaaagtgttacaatagtattattatccttttctttaacatttagcagtatgcagggcctggtatgctaaaggattactttaaaatatatttgcccacactgtgatatgactatattgttaatactgtgttagactttaagaattatttcccttagaagactgagaactttttttttttaagtaatgtctttttttttttttttttttttgagacggagtctcgctctgttgccaggctggagtgcagtctccacctcctgggttcaagcgattctcctccttcagcctcccgagtagctgggactacaggcgtgtgccaccaggcctagctaatttttgtatttttagtagagacggggtttccccatgttggcaaggatggtatccatctcttgaccttggtttccacccgcctcggcctcccaaagtgctgggattacaggtgtgagccactgcgcccagcctttttttaagtaatttcaacttttattttgtttgttatatgatcttgagatttgggatacaaatgatcttgttacccgggtccggtcatgagcatagcaacccaacagtttttccaacattacccccgaccctcccctatctagtagt

SEQ ID NO: 11098 - DNA, 1043 bp, Homo sapiens
gtgtgtgtgtgtgtgtgtgtgtgtgtgtgtaatctgttaggttggggataggttttctgctagccaatattaaaagagacctgcaataaaaaaattaccctgatctgatagaaagcaagtgtttttgtatgtgtgggtgaatgtgtgttcatgcccgtatatgtctacacacagatgacaaattatatttgaaatcgttggaaaataaattcagatcaaaatgcctttcaggcccattacctagaaatctatcttaaaacctgggtatgttcctaaggtcatttctttgcttatgctaaattaattacaattatgaatggaggatattctactgtacttttttaaaaagaaactatttttgtgtttgaaagtgaaaccaacatccagatctatagcagagtccttattcttctcataaatctttttactttggctacaaatagatgatggtatgattctattatatattttatataaaatccatccaaattaagttttgggtaagtgtgttgtttaatctgaactatagtaacttaatactctaaacaatagttcactccatttggtcctttctccacagatgtaattatgttttcaactcaggaactatggcaaggaactttccccagatcaaattctattaacgctgagatacaagtcatccatgcacagccactatcataccctttattctcactgaaaggcagaactcagaacctgttattttatgtctgtaatcatgtactttggcatcttttggaggaaaggggcaggataactcactggaatgtacagtattttgctagtgcatttcaaggaatggaatcttctccagtatgaaattaccagatataaaataatgtaatgatgctgaggatataagcttttagaaggtaatttgatggtatttctttctcgaatgaaaagctgctggtttaccctcaaccctattcattagcattaccatgagtgaatttatatctaattatttccacttgccctgttctcttcacaccaaggaagctccagatccagtatcttgt

SEQ ID NO: 11099 - DNA, 1050 bp, Homo sapiens
tcccagtgaaatcccatagcccttacctagagtctagggcacaaagacttcggggaagatacactgagattgacctgaggagacatctacacacaccagtggcagctgccccagggcctgcttccccttcctaagtctgtcatcctctggaagggatgggtggtgctccaatctctggtgcctaaaaacccaagtttatttctctcttaacactggcaataaccagtccacaccactgttgccttttaaaacctcttaataatctcatgctgtgtttgttttgattccaatccaattatcaccagggctgtgtgggtaaatgcttttaaatgctctctcatcttgttcttccccctcaccccccactcttaggtatgtatgatgctaatcttgtccctaagtaagtttcttcctgctccttttgtatcttcctttcttgtctttcctcctaccttttgtctcttggtgttttgggacttttttttttttttttttggccttttgtacaaagattagtttcaatgtagtctgtagcctcctttgtaaaccaattaaaaagttttttaataaaaaaccatgtctctggtgtattgaagagggttgggaatggtgagagtgtacgtttgtaacttcatactctgaacctaacaaaggtttccagctacactgtgttgtgctccatacatgttaattagtgcaattgccctatatttaactcccgggtaaatggtttcatgaccagatcaatgtgccacaactacacggaaatgtggaggaccaagacaaacaggcaacactaactttattttttttctcatatgcttttttattttggaataattttagatttacagaaaagttgtaaagctagaacagagtttccatataatccttacccgtttccctcattgttaacatattaccatggtacattgtcaaaattaagaaactgacatcgtggccaggtgtggtggctcacgcttgtaatcccagcactttgggaggctgaggtgggtggatcacgaggtcaggagatcgagaccatcctgg

SEQ ID NO: 11100 - DNA, 1050 bp, Homo sapiens
ggcatggtggctcacgcctgtaatcccagcactttgggaggccaaggcaggcagatcacatgaggccaggagttggagaccagcctggccaacatggagaaacctcgtctctactaaaaatacagaatgagccaggcgtggtggcacatgcctgtaatcccagctactcaggaggctgaggcaggagaatggcttgaacctggcgggtggaggttatgattgcgccattacactccatctcaatctgtgaggcagacgttcagtcagaattggagctcagacagtccggcttctgagtctgtgctcttaacccagtggcttccaggcagaagcagcagtattacaaaggcaccaagttgtaaaaagtgtacgatgaaagttaggagctcctgaacctgagttcctgaaagcgggaaatgaggctgcagttggggacatggggctagaggaaggagtggacttaagagatgtttctgaggtggaacccatgggtttgggcactgagtgtaaggcttgaggaggaacagggaagaaggagtgttttgagttggctatactgcatctatagctttccctggaaagagttctatgaaataaatgcctgaggttttatattttacagctagcttctaatttaattagaaaatccatggccgggtgcagtggctcacacctgtaatcccagcactttaggaagccgaggtgggtgagttttgctcttgttgtccaggctggagtgcaatggcgtgatctcggctcaccacaacctccacctcctggattcaagcgattctgcctcagcctcccgagtagctgggactacaggcacgtgccaccacacccagctaatttttgtatttttagtagagatggggtttcgccatgttggccaggctggtcttgaactcctgacctcaatccgcctgcctcggtctcccaaagtgttgggattacaggagtgaaccactgtgcctggctctttctttctatttcacattgttcctaatacaatttggggggtgggaggaaaggaatttttgtcctcaagcc

SEQ ID NO: 11101 - DNA, 1043 bp, Homo sapiens
accccagcctgcgtggaaggcatctcagataatgccttttcagtgagggtgttgatctaaatcttttagaaatcatttggtgttagccatcaacggttgaaatttgtaatgtgggatacatctcaatttccttatctacaaattgctactacaaagaaaatttacatgtgttctctctagttttcaacttaaactgctccccagcagggaaacaaaaggtcatttgccctcgctgtagttggagatttgcactcatgatttccaggtgtttctgaattctttgaagctttttctgctgaaggacaagtggtgcacgttcagcagtttccttagaaccattgccaattgaaagaaccttgttcatcctgagagtcagcggaaaccctgtcattaatgagaggaactggaaagttgccttctatactgtgtaacagaacctgagctgtatattttgtcatgcagttgtgcttggtgtgtatataagtctgacatactgtcatttaaggaaaagtgtaaagtagaaaatattgataaggtgaaaataacttgggaaataataaccttgttgttttcctcctctgattttggtcatgtttgcattttagtttttggctttcacccccaaccagtgaccaaagacttgaccactcaaagtccagctccccagaacactgctcgacatggacaccggtgtgattgaaggtggattaaatgtcactctcaccatccggctacttatgcatggaaaggtatgctctagcttgggaaatggggtcatagtaactgctaggggaggggccaggaagagcagacatgcatcttggagctcatcagattagcactgtggggcatctggctttagcacatttccctaatggagtagaagtgagtgtagtgggaaaatggacagacttgactaggaagctccactgagcaggaaaggcataattagaggctggagccaaaaactctccatacctggatggtaaggtttttctcatggtgattgcttatagcaagtccactccccccaataaatcttc

SEQ ID NO: 11102 - DNA, 1317 bp, Homo sapiens
acagggtctcactcaggctgaagtgcagggcataatcgtgatcatggcttactgcaacctcgacttctgggctcatgtaaccctcctacctcaagcctcctgagtacctggtaccataggcgcgctccacaatgcccggctaatttttcttctttctgttgttgtagagacgagtctcactgttttgctcaggctggtctccaactcctgagcttccgatgattcgactgccttggtctcccaaagtgctcggattacagatgtgagccactgtgcctggcccctacttcctgtttaactatggaagttacgttgaattatggaagattttaattgtatctagatgttactgaatttggtgttggaatgaaactcgaatggctgcttgagtttttgggagcgtatcgtacatggcacgacagagatcttaattttgttaattgctatattcgaagcacttctcatggtacctggcacatagaatggccttgatgtaaatattttttcagtaacataatgaaaggtgggtgatacttgtggggcttttgcttcgcccagagaactatcattagttgaaaggcaactatttagaaggaccttttgcttgagagtaggttaaatttaggctgttattcacgcttattcttgtctttcagtggctaatttatttttaactctaattcactaaacagtcctatctggaataagggaagagtgggacaaagaacaaaaagggaagattggaaatggataaatatctactagagttttaggctctgaaattgctgctggaggaattggaagagcatgaactgtttttctctgattttgaatttctttttactccaaagagtacaggggctcaggtccaggtggcaggggatatgctacccaactcaactgagcgggccatcactattgctggcattccacaatccatcattgagtgtgtcaaacagatctgcgtggtcatgttggaggtaagccctcaggctcatgctgaaaatggggggagggccattctggggacagagggactgatctatatttagtaagactagaattaagtgaggctgttaaggcttccagtgggggtggggctaaaaggttccctgagttcatattttccttcccctagctttgacttttcttatggtctgtgagcaaaaatagaaactgctaagcagcagtgatcttttggttcacagcagttgtagcagagtcggggagaagatgcactgcatggactaaggaggccagagatttatttgagttcctgagtagctgagttaaattactttttgaattactgtattt

SEQ ID NO: 11103 - DNA, 1031 bp, Homo sapiens
tttgaccttgtcatccacctgcctcggcctcccaaagtgctgggattacaggcgtgagccactatgcccagcttgtttttcttatttgtaattaggattttggagggcaagaagttttcagttttcagtggcaagaatcaggtttttgaaagctggaatttgttttgttctttcgataggcttgcccttcatgtaatttaaattgtgactgtttaaatgtgacctgcttgcctagctcctgcaataggtcagtggctacattgtaaggaagcagaattctcttggtagagtggctcttttcaggatcattgttactgaatagcaattcggtatcttagccatggattagggtcaaaacttttcaaagcttcatctaacaccaaagcaaagattatgcatgcacaaagcttattctttctcaacttggtgcagtttaaatgcagaagtcaaagggtttttttttttttcctttctcattttttttaagtcaagaaggattttactggattctgagcattttctcctgtctcttgatttttcatggtggcagtctgtccttttatatagttagttgacttctgtatccctttcctttatggattgcagctgtccttggacataggtaaataaaatgaggttttaagaggagcctttctgctcttgaagacttagcgttgtgggctcaattgtccaggcacacttcccaaatatatgtagttctggcttagacacatacaggcatttgggagacatgtacccttactgttctgtggagcttattttgggagtggaagcagcagcattttcgcttaagtatgaatttttaggtgatacttgagtttctcttttccacttctgaaaggtccacattagaagtatgatcagtcagaaacaactttttataccacctcccaccagaaaagcttccctagttcttatctacacttctgttctcagcatttttctttgaaaacgctacattctttgaaatttgaaattagtcagtgacctactttggactcttgtctctt

SEQ ID NO: 11104 - DNA, 1168 bp, Homo sapiens
accccgactctactaaaaacataaaaaaattagctgggcatggtggtgggcgcctgtagtcccagcaactcgggaggctgaggcaggagaatggcgtgaacctgggaggcggagcttgcagtgagccgagaccgcgccactgtactccagcctgggtgacaaagcaagactctgtctcaaaaaaaaaaaaaaaaaaaaaaaaaaaaaccctaaatattcccttaatactgaggtggagaaaccatttctgactaaaagtaaatagtttgtagtcgaaggactttgcagttttttggcccttgcttttctacccagcttttggctttgcattgttgtggaagggatacagatggtgaattaccaatcatgttttcatgaccacatatcacaaatattttatgctaatcagtttaaaatcttatgaaataacttatcttatgaactgaaatgaagtcttatacatttggttctattcaaaatgagggcaaagtcttgctgcctacctacctaccagtgaagcatactgagtacttaaatacttttccctgaaagccctaaattggattccaggacctcaaatgactatctctttgaaacagaaaggcattgtagccaggtatgtttagatggaggatatggcttgacaagatctaggagcttgtagagtgagctacagagttgaaacaaattattttgtctgctacttttaagtcctgaaaactttttaaagaactttttaaggccgggtgtggtggctcatgcctaatcctagcactttgggaggccaagacaagtggatcacctgaggtcagaagtttgagaccagcctggccaacatggtgaaactctgtctctactgaaaatacaaaaattagctgggcatggtgacagctgcctggaattgcagctactcaggaggctgaggcaggagaatcgctagaacacgggaggcaggggttgcagtgagttgagattgcgccattgcactccagcctgggtgaaactcagtctcaaaaaaataaataaataaataaggccaggcgcggtggctcatgcctgtaatcccagcacattgggaggcagaggcaggcagatcacctgaggtcaggagtttaagacctgcctgggaaacctgttgaagccccgtctctactaataatagaaaaag

SEQ ID NO: 11105 - DNA, 1005 bp, Homo sapiens
taagaaaccttaaaatgtctcccttggtactccagcactggttatttactcttcacatttcatgaaccaggtagagatgaggtgcagctgagcactggggaaactaactgagttcttgtttctgtgttacaggctttcctcggagacgggtggcatggggagcagctagaacaatgcagattcatccataatccctttctgctgttcaccaccacccatgatccatctgtgtagtttctgaacagtcagcgattccaggttttaaatagtttgtaaattttcagtttctacacactttatcatccactcgtgattttttaattaaagcgttttaattcctttctctgttcagctgttgatgctgagatccatatttagttttataagcttctccctggttttttttttttggctcatgaatttttctgtttgtcatggaaatgtaagagtggaatattaatacatttcagtttagttctgtaatgtcaggaatttttcaaaaaaattaaaagatggactggagctttttctttgtgaatagaaactggatgccacagtgattcatgtgggttttattcctcttgtcttgctgttatttttgtaccttttatccctcaaaggacccttcttgggttttgaatggaagcctttattccggttaagatgttttcttctattttaccacttccatctttttttgtggccctcgatcctatttttccctgactccatgcttggttggcccttataaaacttgtgcccaaaagattgaggattagactttccgaggacttacctgtcctaggggagtaggcaagcacttccactagggagggggtgggggaaaggaatgacacatgacatacatggcatacacattaagcagttgatcatatgtctgactgggttccagtttcttgggaatgttggtccccttgttcaggcttgcatattttaaactaaaaatttcagtctattgtttttagtaacttcatttatagtcct

SEQ ID NO: 11106 - DNA, 1032 bp, Homo sapiens
cccgcggtgggctaggagaagggccgctgagcgctcagcgggctggggtcgcccgggtctcacgtgtctctctcccccctctcctcgcacttgccccctcccctccctccagacgccccccgcacccgcaagaagcgctgcccttattcgaaattccagatccgggaactggagcgagagtttttcttcaacgtgtatatcaacaaagagaagcggctgcagctgtcccggatgctgaacctgacggaccgacaagtgaaaatttggtttcagaacagaaggatgaaagaaaagaaactgagcagagaccggctgcagtatttctcgggaaatcctctgctgtaacctgcagaccgggcccttttgggggcggggggaggggaaaattattttattttatttttattttttattttctaactcgtcttctttccgccggtggaaaactggactgtggccagggctggcccccaccgctgtggccggcactccattccggaacctcctggaccctctatctgactctcgctgtgggacagggaccgggcctggaaagggggtgaagggaagtgtctgatgcacggcgagtgaacaccgttggcgccgaggccaagactttgatttaaaagaaaacacacctcggcgacaatgtcttgctgctcggattaggtgggggaggggcgacagtagtgagcgcctgagccgaacaatcctcgaactaaaagccttcccttgcccatgtgaaaagatccgctaagacagcatgtctgccagcggaaacttctcgagctcccccctctaccccgccccaccttgcagctaaatgtgatcctgccttgctgtgaaatttctgtaccttcaacctggtgttaggtgtgcaaagtccgtgtcctacctccgtcttcgccaaggccccgcccgagcctagttgttctccccctgaatgtgtagaaccttcctttgaaatttcttaatcggtgcattgaggtttccacatctttttccaagcagtgccccacttcatggatttat

SEQ ID NO: 11107 - DNA, 1034 bp, Homo sapiens
ctcctggtgctttgtatatggatgcgacgcacacgcatgcctacgggcgacctgtgccacactcacgcacatccatattgcatgatccttgcacactcacgcatgcccgctcacacatgcacaggcactcttttggcgggcaagggcagagcctcatccccttgggtctgcaaaggtggtcttggtaaatcatccccatagagacactgactggaagatgagcgctggtgtgttcatgaggataagggggagagtgaggcgcctacagcctcaaagcctttcgtttggcacgtgtgcagtgtgaaggtttaatcttataccctctctacagaccctgagcttggttagggagcagatttggggcaggaaaacctgcattctagcccccaccaaaagcaaagtcaaggttaacaagttcacctcttaactcgacctgcacccattcccataggctctccctttcctctagctgtccccacagcaacctaatccctcccaccccaaggaatccctcttaccctgtaccctctctgtgcccttctttcctctcctcctgttttgatgtctccaccaggccagaggcaagagagcttttgattaaacttccccatttataatttgtcttgtccccccaccccaccaaacctaacaactccagtaagaaaataaacaggacgtagttagatgtggagagcttgtaaacaatctggcaagaagctgcaggtgcagagacaggagagaaaattcgggacattcagatttttttagactgcaacctcaagtttgccttttttgtgtgttttctggttcctcttaggcccccgcctcaccccgcccccaacaagataagatccaggaacctggcagcctcattggaatagggaggagagagagctcagagccatcagcagagtcctttgctgggtgtcctctcaggtctttggactctgttttttgcccttaaaaagatggccaggttcccttctgctacttgagaagcaaggctggtccatttcagcaagaatgtgtgtcag

SEQ ID NO: 11108 - DNA, 1049 bp, Homo sapiens
gagaaccctgctttatgccgtcctctcaacctatcccaatccctgtgattaagggagaggagtctttcctgcagctattgtctcctgggcccagctgatggagacagacaaagagggtccagccaattccaaggaaattcaggagtttgagtaagaggtggcctggcgggccagctcagttgggcagcagggtggggcagaattattagcagaaagaggagcacagaaagagaagacggtctctggaatggttagcctctcccacctaccacctccagtcgactggggctcaagattctccttagaaaagtggggtacctggaggttccaagagttggggaactctgagcgccagcccagccctttccccttccccttctatagctccatctccaggggaaggacatgtttggggtgttggtaggttagaggaaagccatcaaagtccaagtagaacccctcacacacgcacacgcacgcaactgggaaacatcagggcaaaaacctgactctggtctctgtttagtcgtctgtggcctgaaggcctcagtttctgtggctgtgactgtcaggcagctgcctgtctttgcactatgtggaaacatctgggtgaacagaggctgcccgtgcccaccattgctatgttggtggaaaggttgttggctgatgccagggggaggaggggaggagaatggggtagaggaaaatctgagcagtgtgaaactttgcaaagcttcctctcatcctttcccccttggttcttcaattctggccctggttgctacagagaaagttctcaaaagaggtttctttgcctgcctgcgggcggagttgggggggggggaataaatgggggaggggttatggagactgaggagatacacccctgttctcagagatactggggaagagaagccaaaagaaggtcaggttcttggttctcttactttgaaattattatgattattaaaacattataaacgtctagacagggaaacaaaattatgtccctgtaacaaaatatatacagagttctatattctcacagt

SEQ ID NO: 11109 - DNA, 1049 bp, Homo sapiens
cgacacatacatcacacaaaagatcaggtaacaaggcgctcagggccactggggctccgggcagggcagggagcggctctagctctggggcggctccccctccagccactcccaggctggaaaaccagaccgcgttgggggagccggaaatagccccgcttgctgcggagcgtcagggcgggggcgccggcgggaatgcaggcccggcaggccgtggctttgagagagccacgttcacaggccctggggatttcactcctgctgggcctcgggacctgactcctggtgtgtagggatcccagatacccaccttgggtgggggcaggacgcgggtttcctcgcggcaggccaagagaactcagtttctgcttccagcgcaggccttagctaggaggagttgtgtgtgggtgtgtttttcccaacaaagagggatcaggagagagaaggggggaaagtagaggggaaccagggagggggcggggaggggaagagggcagtggagaggtgaaatgagcccatttcagggggagaaggaaaatgaaagcaaatggagtacggccttctccgcgcagggcgggtgctgacgagccgggagcgggctccctgcctgcggcagccgggatggcccgctggggacaccggagaaagcctgttttaaatttaatccgaacttgacggtgtggattgaaccggagggaatttaaatcactaaaaggaaggcgcggggcagggggaggggacgactctaacctgtctatctttctgtctgtccttcccacggtgctagtttggttgtggccgcagctgcccaggtttcaggtgatggagtaagggtgcccctccccctcaggggtctctcctgtgcccagtgaagtcttttgggggtgggagggaactctaagaaccagagtgaatgcacagctgcgagctaaagctggggtttccccctccccaacaagaactcccagtggcctccagtccctgggtttgccccagcggtgctgaggaaaattgaagggagtatgtgggtgaggggaagtctggagtat

SEQ ID NO: 11110 - DNA, 1021 bp, Homo sapiens
cgcgcccagctcggccctgggggtccgagaaccctggcttcggggactggcattttcaccccattaaaaaatcctcatggttggggggaggccatctgcttatgggtggacatgggcacaggggcttctcagatgagctaggagccgtcctgagggggtgaccggtgccttgggtccagagttccggacccccaggaaatcgcaggtcgcggggagcagcagagagaagggggtgggagagggggaaaagaaggcaaggaaaaaaaagcccctgcgcattgatccgcgccgtatttttgggtaaatacgatcacgtgggggccggggagccaatgagctgtggggaaaaggctggaaaaataattacctgacttgattgttctgtgagcagataaaaagtacatatacagttcatacaataatcttatgtatgtaaaaccccgttacgatgtcggcgacggggcccatcagtaactattacgtggactcgctcatctctcacgacaatgaagacctcctagcgtccaggtttccggccaccggggctcatcccgccgccgccagacccagcggtttggtgccggactgtagcgattttccgtcctgtagcttcgcgcccaagccggcagtgttcagcacgtcgtgggcgcccgtgccctctcagtcgtccgtggtatatcacccgtacggcccccagccccacctcggcgccgacacgcgctacatgcggacttggctcgagccgctgtccggcgccgtctccttccccagcttcccggccgggggccgtcactacgccctcaagccggacgcctaccccgggcgccgcgcggactgcggcccaggggagggccgcagctacccggactacatgtacggctcgcccggggagctgcgcgaccgcgccccgcagacactgccctcgcccgaggcggacgcgctcgccggcagcaagcacaaagaggagaaggccgacctggaccccagtaagttgggagcaattttcctttacaaccggcgc

SEQ ID NO: 11111 - DNA, 1047 bp, Homo sapiens
ttttggatgattataattatttttatttttgaatttatataaagtatatgtgtgtgtgtgtggagctgagacaggctcggcagcggcacagaatgagggaagacgagaaagagagtgggagagagagaggcagagagggagagagggagagtgacagcagcgctcggtaagtgtttccttattggttcaaatatgtaactaatggtccgtggcggtttcaagaataggacagcagcggcttctcttggttagggagaagagggggctggcgagagggtgggcgcgtagttaattatggggaggaaaattggcggggggagagaaacggggttaaactggaataccggtaactggtagtggggcgattgtgttgtcctgatgtcactgtgtgccaagttgggggtggggaggcaagggaacagcacctgtggggctcaagccggcggtctagggcgccagctctctgctgcccactgtgtcagtacctgcttattatagatcttcggtctcttggctaatggaactgggtcggagcggaactggaagctcaagctccaggcaggagagagaacttagaggctgtgcccattgccccctaagcaaagttagccccccaacccccaaacaaactttccagcttcccctccctgtctggcagccccctccctcccagagagcgcgactgctagagctcacacatgcgcagtgtgggcccagggccgggccgccgagcaggaagccggcgcagctaggcggccggcggggcctgttaattggcaattaggggggaggctggtggctggtgcgcgtcagccgagaggagagcgtctgcccaccccctgctcccgcccccactcgggcggatggaagggtgggaggtgccctgcgttgggtggagggtggaggttgtagggtgggggtgggggatgctgtactcaaaagccatcttgtgctcagagaaaagaggcctaccggctttcccttccggggtccggcgcccctcacccccagccgcggccatcccagccgggatgcccactggaccgg

SEQ ID NO: 11112 - DNA, 1038 bp, Homo sapiens
cgtctcctcaccgagacagggccccctcttctgccccctcagctcgcctctcgctcgcttgcaggggcctggcccccttggcccctgacggattggagggccccaaggcgggctgagggggcaggaacagggcaggggatgaggggagggagcagaagataggggagccccccaaagtggagtcagtctgaggagaagggagggggagaggagaggcagataagtggggagaagtttccaaggaactaggatgcttggggagatgggggagcccagtccttgagaaagggggccctcatccccattatctgggatttttcaaaaatctgcttttagacttgcagctttctgtttgccttttgccccgcccccccgcccccccccccaccacacacctttctttgggacacacaggtcccaccttataggaggtctgaagttggggtcctcgctgtacccccagtgggggtggggcaaggcaaaagggagaaggctagagccctaaggaggctgtgagctgctggccaggttgggagggtcaggactttgctaggcgaaacagtctgcagaggacgctttgctgattgcttttagtgtgttttgtgcccggatctttaggggtcggctacggagcggaccggaggcgcggccgccagatctactcgcggtaccagaccctggaactggagaaggaatttcacttcaatcgctacctaacgcggcgccggcgcatcgagatcgccaacgcgctttgcctgaccgagcgacagatcaaaatctggttccagaaccgccggatgaagtggaaaaaagaatctaatctcacatccactctctcggggggcggcggaggggccaccgccgacagcctgggcggaaaagaggaaaagcgggaagagacagaagaggagaagcagaaagagtgaccaggactgtccctgccacccctctctccctttctccctcgctccccaccaactctcccctaatcacacactctgtatttatcactggcacaattgatgtgttttgattccc

SEQ ID NO: 11113 - DNA, 1045 bp, Homo sapiens
caagtaattctgtctctatttctaaggccatctccaaaatctagtcccactaagttatctgtccctcgaaaacctactctaggggtcatagactgcctccaggctgcctctgtgacctgagatccaagccgaagctccctacctctcaaggtagccactaaaaagaagggggagagaagaaaggggagagtcctccagcccagttcctgttggatccccagggcaagaggctgacaggggcttgtatatctccctacaccccccactgggcctttgaaatgtgggggaaaaagggatcaagtccccaactgtttttatagggtgcccaaatgatgccagggttactgcacaacccataggttcctcctccccagttgttctcggtgcccagggcccaattaagcggccgccttgcgcccagcagccccgctcttatcggctgggattgatgcctccgcgtctcctgtatatcatttccaagattttttctgtccaactcctcggctcctttggcttccgcggctttgactaatgattgctacagatgccaacgtctccagaatcctaatagccaggcaggcggactcttatttacccggcaacattgctgtgggggagggggcctgggggacaagtattggggtgtcgtaggtcaggggacagggagaaggttgtggccaactcaagtgtcactgaacttcttcccagtcagaaagacattcccaatccccttctctccttgagggaaatatatatatatatatacacagttaatggtaactcattgctgcctcgttagaaaagatcaaagaatgaacacaacgtggtagaataagcagagcaatgtttatttgttgtaaataaatgagagaataagtggaaaaccagcagtttggggaggaaaaagagaaagggaaagaagtcagccacagtgggagaaggggctccttttcttcatttcttgtcttcccctttctctccccaccctaagtctacccttctcatcaatttctcccctctttcccttccttcgcctcaccttcaa

SEQ ID NO: 11114 - DNA, 1388 bp, Homo sapiens
ccctccctcctctacggccctgtcacccccctccatcagagtattactgtgagtgggtggcagagagagagcagggggtgtgaatgggctggagaccccaaaggctggccgtgcctccccaacttggtgagcttagccttccgtttttggaaagcagcctggagctggcctttaggaattcgtgtttacatgtaaacacacgtgttacatggatacagctcctagccagaagcaagcaggctctacccacacaggcctccctcttagctaggtctgccctctgtggggacagagaaagaactctcaggatcttggctgggcaccatcacagggcactgactcctggcagaaagctctcctccttgccccagctccttggagataattgtcagaaaatagcaggccgggctgaatggggagtggaaacagaagccagcagtagaagagatcctctgctctggggctggggcagggagggtcagtgggtagcaggggaaggcgagacttctgaactctgcttttgccaaccacttcctgtctctcttcagcgggggctcaacccccagacctccagaaatgacgtcagaatcatttgcatcccgctgcctctacctgcctggtccagctgggaccctgcctcgccggccgcatggccagagggttgggtgagtgtgtatggggaagaggggctggactctggtatccttggatggggggcactccaggctctccagcctcctcggctcagcctgggcccctccccatccaacatccactccagtcctcattcaacttcctcttcctgcgaaagaggggcgctgccccgtgacctacacagactgagacacgatcgccatgaatggagacctctggaaaagctcaggagccgaggcccacggggcccagcagaggcctgaggggagaccctgggcgggggctgaatcactgcctcccgacagtcccccaatgcccgggctttggaggggagccgggagcttcccatctccttttgcaggggagggttgtcagtctggcgggatgtgcactgggggcactccaacctctgctagctaaccccacatcaccacccacccccgcctcccagcaccaccaccaccacacacacaaaaaaattggatacattttgaataaagcgattcggttccttatccggggactgggttgctccgtgtgattggccggaggagtcacatggtgaaagtaactttacagggtcgctagctagtaggagggctttatggagcagaaaaacgacaaagcgagaaaaattattttccactccagaaattaatgatcatgagctcgtatttgatggactctaactacatcgatccgaaatttcctccatgcgaagaatattcgcaaaa

SEQ ID NO: 11115 - DNA, 1091 bp, Homo sapiens
agctggaaacctcccctcaaggattcagtctttgataatttcaaaccttcctggaatgtgactgcctccagctctgtctgtcttttcttggccatttcagagtctctgcctagcatttctgctgctttccaagttccatatttcctcctgtcgtggccctggttccaatccttggactcccttccaactgtaaaagcagaggaagaaccaaaaggtggtgggtggcagtctgggagggacagctgaggttcaaaagttcctggctaagcctccaatctgggccacctcaggggctgatctgaccactccagagtgccccctgggccagcagcaaatagaacaaaattttatagccggggcagatgttggctcggccatctcacccggattccccttcatctctcttccactgaagaggctccaatctccactatacctttgttctctttcctttccccctcctccccctcctcttcctctgtttgatcctgccaaccccccaaattgtttctttagatctgaaagcatctgttcctgtctgaccctcccccaacaccctcctctttctccctccctccacctcaagcagtcaaaaagcccccaaatggaaggcctctggcctctgacctattctgatacaccaacgtccagatacctttgaggccaaacctttaggcccctccccagttacttttctttcattctaccagctggagagggtcctggaattgaatgagttgagtcttggcccctagggaccagtctcttctctgcctgggacaattaaccatttttcaggtaaaagcaaggagtccaaggttgaagggtttggtgatgaactatttagataactaccccagtcctctgttgggcttttgggggctctagattttgaacatatccatattctgaccatagacagatgtccttttctaacctctacctggccatttcttttatcaccctttctgacccttcccttaattgcaaagtcattttctgagcaataagaaagcccctccaatccctcccagaattcactaatctaaactaggaagatcaaggcagtttccatactgtgcacattggag

SEQ ID NO: 11116 - DNA, 1028 bp, Homo sapiens
agcctttgttgcgcgtgcgtcggaaggcgactagggacgcatgcgcttgcgatttcctagcactcccaactccagcatacggcctcccttgataggcagaagcacgtgtcttgttgcgacctgaacgaacaataagtgctaggtacacagttggtgtctagtttttcttttcctcgatggaaattgtttcgtgttgtagcccatttaacacttccccctccccccactctagtctcctaaagagcccgaacagctgaggaagctcttcattggagggttgagctttgaaacaactgatgagagcctgaggagccattttgagcaatggggaacgctcacggactgtgtggtaagatttggaagggacaaagcagtaaaacagccgatttccttggcttatcttggtgcagtcttctccgaatgcttatgaaagtagttaatagcattatagttagagctttgttggcaaaggaacgtcctgctttgattttaaaagctacctcttaaatctagggtagtgggaaactggacgactttttataaaaggctggtgtaaagtttcctattgccctattcaaagttaaaatgacaaaagcttttgcggtcagactttgtgttacataaattaacactgttctcaggtaatgagagatccaaacaccaagcgctccaggggctttgggtttgtcacatatgccactgtggaggaggtggatgcagctatgaatgcaaggccacacaaggtggatggaagagttgtggaaccaaagagagctgtctccagagaagtgagtgggttttttttcttcttcttcttaaacttacttggatatgtgctgctatggacttaagattcgggagttttctaaacttaccaaaattttttattcgagtataggctttgctaatctaaacctatggtttttctcctattaggattctcaaagaccaggtgcccacttaactgtgaaaaagatatttgttggtggcattaaagaagacactgaagaacatcacctaagagatta

SEQ ID NO: 11117 - DNA, 2004 bp, Homo sapiens
agtaagcacctttttgtgtgttgacataattttttaaattgctgatgaacccaataaccctaatgtagctgagcagtgcaacatagttaacattataattgcagtaattgtggatataaagttaatattcagatcagcaaaatttgtgggaaacaaacttgatattggattgtagccttgagtcttaatatgtttagattaacaactttattccatattgttcaacaggaaacaaagcttagcaggagaggagagccagagaagtgacagggaagctacaggttacaacagatttgtgaactcagccaagcacagtggtggcagggcctagctgctacaaagaagacatgttttagacaaatactcatgtgtatgggcaaaaaactcgaggactgtatttgtgactaattgtataacaggttattttagtttctgttctgtggaaagtgtaaagcattccaacaaagggttttaatgtagatttttttttttgcaccccatgctgttgattgctaaatgtaacagtctgatcgtgacgctgaataaatgtcttttttttaatgtgctgtgtaaagttagtctactcttaagccatcttggtaaatttccccaacagtgtgaagttagaattccttcagggtgatgccaggttctatttggaatttatatacaacctgcttgggtggagaagccattgtcttcggaaaccttggtgtagttgaactgatagttactgttgtgacctgaagttcaccattaaaagggattacccaagcaaaatcatggaatggttataaaagtgattgttggcacatcctatgcaatatatctaaattgaataatggtaccagataaaattatagatgggaatgaagcttgtgtatccattatcatgtgtaatcaataaacgatttaattctcttgaatgaaatgacaactgtatggatttgggactggcagagatttggactttccctacccactccccctgataataatgttgaatgcttctatcacaattcaagttcaaagctctgccagggaatagaaactagctgctggctaatgccgctccataaatccgcagatttgaagtgtctgggaggccttttaaaaataactaatatcagaaagcattttaatgaacgtaaagataggcttacattaaaggaaaactgcagtttgactgggttctggttgggtgggccttcagaggttctatcagttaactatactaattaatttggagattcaaaccataccaatagaaactaaatttttctacataatttcatgttaactgcagtttccctttatggcacaaggggtcacacaacctacctaaaatgttaattgtatagaaaatgatttctaaacctttaacagttaatatccaataatgtgttatttgtacatagattcttttgagccttacctttggtgctctctcaatttcagtgctattgtacctagtagcatagagatttgtctatcaataggactgtatattccatcccatgggtgtgttggaagtttggggaggaggagggtggtgggaggtgggtgggaggtggtggtgggtgggaaagcatgggtgatagttccatgatactggctgagtttgcaatagcaggtggaaccctaactattgagggagtttgcagatacctcaggattcgtgacaatgcctttaaagatccaggagagatgttcagctactaggaactgctagcaagtatagcgcgaatggctccgagctcagacactctacagctgagagtagacacttgtggtatgtggagtacagataagccaggggcaggccacggcacgctccatgaaagctaggagggagtgaaatatcagtgatcatcgcaaggaaggaggcagacaagagtaaggcacacctgactcttaggactagcagtcagaaccaggaggaaaggttttattgctatgcgggtaggtaagaacagattttacttacatccatatagttactta

SEQ ID NO: 11118 - DNA, 1026 bp, Homo sapiens
tggtggggggatgggtgggttattaatgggaggtatggggggtttagcttgagatgggacttggtcttagagctagttctaaaggttgtttacttttctagggaggagtctgctactagtcttatcagctcttaaaaacagaaactcatctgtccaagttcgtggcagaaaggtaagtttttacaaattagtgctcagcaaaagaatgccctgcgttcccaaagtaaaagaatgacaagctgtaccttaaaccaaaacacttcgtaatctcatccaattgcaaaaagagttattagccaaccaggtattcccagtagtgacagtggatataactgtgtagtcattcacctctgcttatatgaatactttacaacctcttttgccttttgcaggaacgtccttgtgaagacctttatctgagccactgtacttcgttatcactgccatgcagtttacatgagctgttctgcagctcaaattccattttgtgaatgggtttttttttttaataaactgtatttaacttagttctgcttgttttgtcctcctttgtgatatctatggttaataacatgttgaaattcaggttagagaggatatggttgattctaatgtgaatttctatatttagattcatcccattcagcttcatggtttaatgaaaatagaaatgggttctcactacaggagtaattcttggctcactataagtaaactttactattgatccaattgagcatgtcctttttctagctcccctggcaagggaaaatcaagttgtagcactgccattgagctcagtatgtctctattgggacttacgctcaccatctgttgcagaaggacataatggatttcatctttggcaaacaagttgggcttattggccagctgtctcatacttcagtagaattctcaagccaggagtaagaaagtgaactgaatgagaggcaagacttagcctctcaaagatagcctaaaaatgtaaggactattttggaagcaataattgtaccctctagcaaa

SEQ ID NO: 11119 - DNA, 1071 bp, Homo sapiens
ttttttttttttttgagatagagtctggctgtgttgcccaggctggggtgcagtggtgcaatcttggctcactgcaacctccgcctcccagaatcaagcaattctcatgcctcagcttcctgagtagctggggttacaggcacgcgccaccatgcccagctaatttttgtatttttagtagaaacagggtttctccatgtttgccaggctggtctagtcttgaactcctgacctcaagtgatctgcctgccttggcctcccaaagtgctgggattacaggtgtgagtcactgcaccccggccagttagcaagtttttttttttttttttggaaacagagtctcgctgtgtcacccaggctggagtgcagtggtgtgatctcacctcactgcaacctctgcctcctgggttgaagcaatttctcctgcctcagcctcacgagtagctgggactacaggcacgtgctgccacacctggctaacttttttgtattttagtagagacggtttcactgtgttgcccaggctggtcttgaactcttgagctcaggcaatccacctgcctcagcctcccaaagtgctaggattataggagtgagccaccgtgcccggcagcaagtattcttaatcaagaggttgagtgcagtggctcatgcctgtaatcccagcactgtaagaggctgaggcaggaggatcgcttgagcctgggagtttgaggctgcagtgagctatgattgtgccactgcactccagcatgggtgacaaagccagaccctgtctctaaaaaaataagaataaaaaacctccccctaaacccaattagcagactaggatagattctagggaattggtttttttggaagtttttagacttacctatatatgtttagaagggagcctgcttaaaggtaaaggaatgaggaagataataattggggagcccttttaacaatgggcctgtgtgtagtgggtaagctgggggagttatatgtgaaagtatctctgtcgggcgcagtgcagtggctcatgcctgtaatcctagcactttgggaggctgaggtgggcggatcact

SEQ ID NO: 11120 - DNA, 1054 bp, Homo sapiens
ggggaggatcgcttgagcctgggaggttgaggctgcagtgagctgtgatggcaccactgcactccagcctgggtgacaagaaataataataatattaataaatctgatataggctgggcgtggtggctcatgcctgtaatcctagcactttgggaggtcaaggtgggcagatcacctgaggtcaggagttcgagaccagcttggccaacatggcgaaaccccgtctctacaaaaaacacaaaaataagccaggctacaaaaaacacaaaaataagccgggcgtggtgggaagcgcctgtaatcccagctgcctgagaggctgaggcaggagaattgctggaacccgagaggcagaggctgcagtgagccaagatcacgccactgcacttcagcctgggcaacagagcaacactgtctcaaaaaaaaaaatctgatatgtaaaaactgctcttccctgtcaaagactttagctaattcttcttttcttttcatctgaagtctatcggattgtggctggcaaattggagcccttaaccccagaggagcttttaattttaaaaaagttggcacaggctgggcacggtggctcatgcctgtaatcccagcactttgggaggatgaggcgggtggatcatgaggtcaggatatctagaccatcctggctaacacggtgaaaccccgtctctactaaaaaaaatacaaaagaattagctggtcgtagtggtgggtgcctgtagtcccagccactcgggaggctgaggcaggagaatggcgtgaacccgggaggcagagcttgcagcgagccgagatcagaccactgcacttcagcctgggcgacagggtgagactccgtctcaaaaaaataaaaaaataaataaaagttggcacagaggccaggtgcagtggctcacacctgtaatattagcatgttgggaggccgagacaggcagattgcctgagttcaggagttcaggaccagcctgggcaagatggtgaaactccatctctactaaaataaaaaaaatcagctgggcatggtggcagtcacctgtaa

SEQ ID NO: 11121 - DNA, 1032 bp, Homo sapiens
ccttagagagcttcttcccatctctttacccttggggattttctattctccattcttctaaggacagggaagacaagtgaggggaaggagatccccagccctcatccttaccctgccctgtcagcaagctttcctcaatgctgctcttatctctgcaggtgctgcagtcagccaaagaacagatcaagtggtcactccttcggtgaagacctcactgttcctggctcttcatcctcttcaaaaaatttgcatgtctgctgtgaattttcatctagttccccaatcgatgctctcagggtcatctcggggatcacagggatccttaaatctccattctgtttgtggttgccccctcaacctcccctacacccttcctattctttttcattcttcttgcagttctgggagtaaagctcccagcatatttagataatagggcaggggaagcaccctctttctttctagactggattatgctcacatgctcccttgccctgacatttttgtaaattctgtgccctttgctgtagctacacttcagattaaagtaggagaaagaatgtgctgagtgttttcctccctttgcctctacctggccctcatcccaacagcccagcaaggggagagagaaagagaattcttttctatagaacgagtgggggcggggatgggtagggatttatccaatctaagccctaaccccacttagtgacctcagtgttttcttccattccttcttactgccctgtcctctgccttggaagaggctttgggaatagttcatagggaagggacaacatggaagaaacagcgatttaaattgtattgaacagggcatataaaatgcattctgtaccctgatctggcatatagcttcaaaactgcagtggcgagtgtccatctcttagttagctaccttaactgtccacccttactacctgtgggatcgttgcctggtttgtcttctctgtgtcctggagcaaagccagttcctaaaactaaaactccattctagtcttgggaagaaaagtt

SEQ ID NO: 11122 - DNA, 1030 bp, Homo sapiens
ggtgattaggctgccagctggtgttggcaccatttaggttgggaagggaacttggctggtggggggttgagggctgggggctgggggctgggggctggttgtagggagaggctgagtgattctctggcaggcaggacctggggaaagtttttccttttattcctatttgttggcttccctgctcccctgtttatcaactcctgcatatctgcttggcaccatgtccctagttctcttctctgtgcccaccttgtttggaaacttcttgtggcctggactgagtgaacacacaggccaacggaattgccaaacttcctaaaccatgagcatctctcttccaagcaattgctttagaaattccaatctggaagatgtataataaatcaaattgcactagacacctcaaagacttcttggtccctcctattctctccccttctgctcttctttgaaatgccaagaaaatttgctgttgttttttaaattgcagtgaaataaattgaagacagatatgcaggagaacttcctggaaagttcctggaggttagactgtggcctttctctgataaagaaaaaatctacccttctcctctaagcactgggttagagctgatttggggaagcagtgagccagtcagaaaggatgaactctggaactgggaaattgaggcccaagcatcctacttccccagtgtctccaacccagtccctgaatctgagaaccataaaggctacagaggaggaacagatccccagagatagttagtaaaatcggggcagtgctgggaccagacccaaatcctgctgatccataatctgatgctgccctcatcacacttgcagtcagactcttgctaagcttttaatttactttcccatcccagactaccttcaacatctgttaggccccatggaagcagggcatctgctgggaacagctgttaggatgtagtttggagggctggtggggtggtccatgtggaggtggttaatgagcaaaatcaaatggtgtagggagggagaagagggg

SEQ ID NO: 11123 - DNA, 1050 bp, Homo sapiens
tgctggtgcttttgtgtgtgttctgtgggactgagggcgcgggtactggtgcatgtagagggtaagtggtcagggagggcaacccacatctggctggaagagtcctctctaggtcatcttcttcattcccttacttccgagcccttcttcatggttttggatgtggggatggagtgggatgtttggaaggtaggagggaagctttctttcattttctttgaaatctccagggaaataataataattatagctattctttagagagcatttactaaatgccttgtacttatctcattaatttccaggtaggtggtattatctttcattctgcaattaagtatctgaggcacagagaggcatgtgacttacccaaggttgcacagccagcaggtggtagaggcaggatatgagccaggttcacctaactaggttctgtgctctctccctatgccacactgccttctaaagaaagttgttgatctcggtccgtaatcaccaccattcctgtggatccttgatatatctccatttcccctaactccccgcagattcccactgtgtttttgatgagtttcctggatgccttggagacaggctatgggaagtacaagaatccttaccacaaccagatccacgcagccgatgttacccagacagtccattgcttcttgctccgcacagggatggtggtaggtgccctggagatgattcttctgtgattcagggcctatggctacagaactgggaggtctagactgtactcccatttccatttctcctcgttggttcttcttgggcactccaaagccttgacagagccaaactggattaactcactctagagaattcccaggtagactaaaactcgttggacagtgctagggacatgtgctgggatgcagtgggagtgttgcaggttcggatggaggaaggtccttggccatttcaggagctgagaaacctggctgcattaaccaagagctggcctggaagcatggaagggatgggatgagtgatctagcctgtgtgtggaggttcctgggaagtgac

SEQ ID NO: 11124 - DNA, 1075 bp, Homo sapiens
caaaaagaatctatttcaaagttcccatttaaaagggaggcctctcagaggaaatcggtcacgtggagaagggaggattatccatgtaatagagcaacagccacgacatgggttcctacatcccctgacgttcttcagtttgcctcatgccatgctcccaggggagctgagggcccaaagcagggactgcagcagctgctgacattcccctgcaaagggtctccttggctctacctggggtttacctccacctccttacaatcaagccaaagacctcctaatctaagtccccaccacattctcactgcgagccccatcctagcagggaggggcacagagcatgtgcggatctgctcaataccttcacctaaacaacacaactctgcaaaacaagcagaaaaggggaaagcaaaactgctcaaaaggggtaaacttaataaatcacatataatatacggttgtcttaattattagaacttttagaatttagtgtttttgctgagcgcgtggctcaggcctataatcccagcactttgggaggccgaggcagacagatcgctcgaggttaggagttcgagaccagccagcctggccaacatggtgaaaccccgtctctactaaaaatacaaaaatcagccgggtgtggtggcatgcacctgtagtcccagctacttaggaggctgaggaaggagaatcgcttgaaccagaggcagaggttgcagtgagctgagatcgtgccactgcactctagccttggtgacagagcaagactccgtctcaacaacaacaaaaaagaacttaacatttttaatactgtaaaaatcaagcaagtgtccttacacaaattgacttttttatcttataagagttcaaaagaacgacaaacagacctcaaagtgtgaggatgggctaaccccatcccatcacgtataaaatgtaatgctttatataaacgtaatgtgaatcaattgcttggctaactaactggcttcaggtggagtgacctgttctagagtgagcaattgcaggggctgagcaggaagggggtctgcagtgtcagtagctgcctcccggg

SEQ ID NO: 11125 - DNA, 1081 bp, Homo sapiens
accaaggtgagccgatgcctggagcatgccctgactgctcgacacccccgaacccgctacagcccaggttgggatgccaagctgctctggctgcctgcctcctacctgccagccagcctggtggatgctgtgctcacctgggtccttcccaagcctgcccaagcagtctactgaatccagccttccagcaagagattgtttttcaaggacaaggactttgatttatttctgcccccaccctggtactgcctggtgcctgccacaaaataagcactaacaaaagtgtattgtttaaaaaataaaaagaaggtgggcagaaatgtgcccagtggaaggctgaccccatttaagtgccaactactccaaaccgacatgctcacggtctctggcctgttcagtccctgcaaaacagctagcacccacagtggggcgccagggaactgcctcacatctacagctgcacgtcggggagtggccatcaaagggcactttaatacatttcccttattttctgaaggggagtaaggttgcaattcagtgtctgtactgggaatggtcttcatatttcttgggggagaagagcaggtgatgagggttctgggccaggctgggtggcttccatggaagaaaaggcaatattcacataaattctcctgctaaggacactgaccacacaggtgtcaaggcaacttatcatacttcgaaaggagctggatcccttgaggattggccaggaagggaggtgctgggcccttagcggtgcacagaaggccaggaagatgtccaaggcagatgggggctgggctctcgcaggtgggacctttctggggagctgctttgacttatgcagcagatggcttcatgaatgttcatagtgagcctggcagcataagactagggggcagaaagcaccacagtctctggatcctcacttctcccactgcctgcccaaccaacaccttcgcaaagtcctcctttcccaaacaccccccaaaatagacctcgaagtacacatgcattaaggtcccagaggacagggaacatcagtaaggaaaggaaggaatcaagcatcactctaaga

SEQ ID NO: 11126 - DNA, 1028 bp, Homo sapiens
tcagctccctgccaatacctgcagccctgctgacagtctcgctccagtgagtgggggacttggggacaccctgggcagatggagcagaggacatatggggatggtcagggtgggaggggggctctgacccaggcccctccttactccctctctgccctgtgtccctccagagttacttccagagtcttcaagagtgccaactgggaccaggaccccagaccacagccccccacaccgtcctggacctggattctgactgtggttccactgtacccctcaccttaatctctggttctaaccagacctgagcctagacttccactttttcccttacccctgtgagggcctgggaacactaggtgggcagggtttgagcccacaggacctgcacacaaacttccccacctcttggacttggggacaggatctgtgcctcaacccagaccagctttgtagggatatgttccaagaacagagaagagtcttatggggaagggggaggaagggaagtatgaatatttacctctgaccaataatagaggtgccctggtccccaaagaaattgactcccgaattccctccaagccttacccatatagcttttgtttgtttgtttgttttcagacaaggtcttgttctgtccagtgccgtggcgtgaccacagctcatgacaactttgatttccccggcccaagcgagcctctcattcagcctcctgagtggctgggaccacagacgccacacacagctaatttttatgtattcgtttttatttttttgcagagacagggtctccctatgttgcccaagctggtcttgaactcctgggctcaagtgatcctcctgcttcagcctcccaaagtgctaggattatagccaccgcacctcgtcttgaaatagccttttaaatgttcacctcagcttgcctcacagtggtaaaaataagcatttttttgttttgtaggatcagggagcttccaaggcatttgatacctttttgatgggaagaagggctctgaggagctcca

SEQ ID NO: 11127 - DNA, 1021 bp, Homo sapiens
tcccatctcctttaatataacagtacagtggtgcagtaggctgtcttcaaatcagcaatatgttttattgtcttttatcttggttgtaaccaagagcttaaagaccattagcctatacatatgtaatgtgcatttatccccccagtgcattaccttacaattgtccgtattcctctctcaattcatcaaaaaatatttgttaagcacctagtgggtacccagcaccatgctaggtgctgtggggaacacagaagaaatggaagacagagtctctgcccgctgtgctcgtatctagaagtggctgcatcacaaggttgggggatgaccgcagtgtctaccccctaccccgtgagtggcttgggatacctttgctacatgtcagtggcaccccagacattcaccccctcccagacccacccagccttggggatctgcaaagccatggttgggggaaggaaggagggggcgaggagacagatgaaggaacttcattgtctcaggttctgtgtgactgaccccatgaaaggccctggggagggagtcatggggccctgctgaccttttactgtctgtgggaactcctttgtatagaggagagttttgactgacgtcaacgtgggtcttggtatttcctctttccccattttcaggtgactcgccgggccctattccctggagattctgagattgaccagctcttccggatctttcggactctggggaccccagatgaggtggtgtggccaggagttacttctatgcctgattacaagccaagtttccccaagtgggcccggcaagattttagtaaagttgtacctcccctggatgaagatggacggagcttgttatcggtgagagtgggcacctgttttccctcattcatttctcccagggaagggcttttccaggatgaaggaaggatgagaccctgaaatctgggcctcagtgtttcatttccctggttcctgctctccctgttggcacactgattcagctatgggaggatggaagtgagaat

SEQ ID NO: 11128 - DNA, 1110 bp, Homo sapiens
gtgggcttgaccaggcttggccttgggctatttggactcaggtgggccctctgaacttgccttaaacactcaccttctagtcttggccagccaactctgggaatacaggggtgaaaggggggaaccagtgaaaatgaaaggaagtttcagtattagatgcacttaagttagcctccaccaccctttcccccttctcttagttattgctgaagagggttggtataaaaataattttaaaaaagccttcctacacgttagatttgccgtaccaatctctgaatgccccataattattatttccagtgtttgggatgaccaggatcccaagcctcctgctgccacaatgtttataaaggccaaatgatagcgggggctaagttggtgcttttgagaaccaagtaaaacaaaaccactgggaggagtctattttaaagaattcggttgaaaaaatagatccaatcagtttataccctagttagtgttttgcctcacctaataggctgggagactgaagactcagcccgggtggggctgcagaaaaatgattggccccagtccccttgtttgtcccttctacaggcatgaggaatctgggaggccctgagacagggattgtgcttcattccaatctattgcttcaccatggccttatgaggcaggtgagagatgtttgaatttttctcttccttttagtattcttagttgttcagttgccaaggatccctgatcccattttcctctgacgtccacctcctaccccataggagttagaagttagggtttaggcatcattttgagaatgctgacactttttcagggctgtgattgagtgagggcatgggtaaaaatatttctttaaaagaaggatgaacaattatatttatatttcaggttatatccaatagtagagttggctttttttttttttttttggtcatagtgggtggatttgttgccatgtgcaccttggggttttgtaatgacagtgctaaaaaaaaaaagcattttttttttatgatttgtctctgtcacccttgtccttgagtgctcttgctattaacgttatttgtaatttagtttgtagctcattaaaaaaatgtgcctagtttt

SEQ ID NO: 11129 - DNA, 1035 bp, Homo sapiens
ctttgtacagcgcccattggaaacctcggttttttcccccaaggaacttttctcacctgcaagccagtcctagagacagttgtgtaggagtatgtgtgtgtgtttttagacggagtttcacttttgtcacccaggctggagtgcagtggcatgatctcggctcactgcaacgtctgcctcctaggttcacgcgattctcctgcctcagcctccagagtagctgggattacaggcgtgcaccaccacgaccagctaatttttgtattattagtagagacgggatttgaccatgttggccaggctggactctaactcctgacctcaggtgatccacgtgcctcagcctcccaaagcactgggattacaggagtgagccaccgcgcctggccgtgtgtgcgtgtgtgtgtgtgtgttttaatcctatctaatttttccaacagttttttgcatcctaagagagtttaggagtagaattatcaataaggaatttcatacatagacctggagttgcaaaaatatatttggagaagagagctttcccattgcccttcaagtcatacctcatatcttttaaaatttttttcctggacaatccctactgcataacatacctcatatcttctaactcttactttacctgggagcaaatattgcttattggtatgaattttacttctgagaaggaggcatagggtagaagaagcaagcgtatagtttgctccctaatcctaaagcatttcagattggaaggtaaccaaagtgtgagacaatgaacttataataaggaaatgcagcagccctcttggaggaaggataccataaaaccctacatggtatactcccacttccgttttgggaaagatttagccattgactcaacagtaactgaactgaataaggagctacccaggtgaacaaagtatgtgtacatttctgggcaaggttgtagcttctgttcagggacagtgggtaccttttcagagtgtctcctggttctgtggtgttatggctcctttttttaaacttgtgtttctc

SEQ ID NO: 11130 - DNA, 1050 bp, Homo sapiens
gagtatagcatatatatgtcacctgaaggaaacttgatcagcttatcatctgtccttttttttttattatggtgtcacctgtcttctcttttatttattttttattttgagagacggagtcttgctctgttgcccaggctggagtacagtggcataatctcagctcactgcaacctccgccctctgggttcaagcgattctcctgcctcagcttcccaagtagctgggactacaggcatgtggcgctacacccagctaatttttgtattttttagtagagacggggtttcactatatgttggccaggctggtctcaaactcctgacctctcaaacaccagagtgagactctctctaaaaatggaaaataaattttaaaatgttataattaaagatactcatttaaattgaataaatttagctttatgaaaaatttgctgtatcatctttattttgatcctttcgtcataggccattgaaaacttaatcataaaatggtacatgtatatctgaatttttaagactgactgaccaaggggactacagaatacccagtagaatcaaagtaattgtcatgttcctctgtattaatctagtctactttgggaccttgagttctcacctctcattcttttgctaacttcctctttaccctttagttatgtctccttttttttttttttttttttccagagatagcgtcttgttctgtcgcccaggctggagtgcagtggtgtaatcagctcactacaaccttcaactcctgggctccagtgattctcccaccacagcctctggagtagctgggattacaggcacataccaccatgcccagctaatttttttaaatgttttctagagactcagtctcgctatgttgcctaggctggtctcaaactcctcacctcaagcaaggcttccccttttatctcccaaacccctgggattacaggcatgggccgctctgccaggcctgttttttctctttttctttctctgtaccactttcatattgtggcttcttccctgcccccgatctcccccctaccca

SEQ ID NO: 11131 - DNA, 1060 bp, Homo sapiens
attttctatattatttctgtgcctttaaaaaaaattatgactagtcctttctgggaacagtggagtgtttaatggaacgtggacctttcgatatgcttatgaaatattgtaccccaatccccatccaaggtcaagaagttacgaactctgcttccaggaaattttttttttttttttttttgagacggagtttcactcttgttgcccaggctggggtgcaatggcgcgacctcagctcactgcaacctccatctcccaggttcaagagattctcctgcctcagcctcccaagtagctgggattacaggcacccgccaccacccctggctaattttttgtatttttagtagagatgggggtctcaccatgttggccaggctggtcttgaactcctgacctcaggtgatccacccgcctcagcctcccaaagtgctgggattacaggcatgagccaccgtgcctggccagaaaattttttgcataccttatttcgccccattcccttctctcatgaacaaaactgtctattgttgttactcttgtcaaccctcgcttatatgtctaatagttcctactgtgcctgtctccccagcctgtgccctcgaagcatcaatggtgggcatggtatgttcctgacatgctcacatgtcagctttagatgttccaacgtcatggtcaaccagatgaccattgaagcctgtctccccttactgatacttgctcactttgcctgggtgaagatacatgttcatatccttaaggaagcatgaaaatgttatctgactacctagaatatttccacttaacgataactcagattctgaggacaaggccagataaaaggccaaatcagacaatctttgaaagcatagtgtttcgtttggttggggtgtatggtaatccctcacctccccatggacctgccagtaggtccgtgaatcttgctttatggtttgcaggaggacttcagctttccctactaacagcctaaagccagagaatccagacagacccttgggtcatgagaacagtcagatgagtagctcctgagataaaaata

SEQ ID NO: 11132 - DNA, 1064 bp, Homo sapiens
attaagaaattcgtcattcgaaacatagtggaggccgcagcagtcagggacatttctgaagcgagcgtcttcgatggtaagtgggtcaccggcgcgaactgtgtgaggatcccagtatcttaaagccttcgcccaacttcgcccttttggaggctctgttctttggagcctctcaggcaatttccacgtatttaaggttgttactggtagaagagaattctcttgtttgccgttttgattcttttctgggcagagggtgactttgtgatagagtgcacagcctttactctgaggtaaaggtttgcctgtttcggttatgagattgcaaaaactagaaacttggtaaatttgacaattcttgtgctattgattatttgaatatttgtgaaaatatacaggtgaggaagaatgtcttcaacgtttcgagaatggaggccgtctagtttggtgtgcaaggatgatgtttggagcaataagaacgtcgctttgtttttttccttttatagaaagagcaaggttcagggtaggcattagggcgggtgtaggtgtagaaggaactggattattggtttattgcatttagaatgtcagtctggtccttgcggtgtcaagatgaactcacgtgggatgttaattcacttgtaaaactgagggttatacatatgtgctcaggtattgggctgaacaggtgctttgggggtgcttttatgtgcccgacaggcatttaaataggtttagttttaattgacgtaaacatgtaaggtgctcttcattcatgtaacaaaaaagcaaggtaggtatataataccagtataactctattttctattccttagcctatgtgcttcccaagctgtatgtgaagctacattactgtgtgagttgtgcaattcacagcaaagtagtcaggaatcgatctcgtgaagcccgcaaggaccgaacacccccaccccgatttagacctgcggtgagtattttaaaaggagaatggaagccaggggagtgatggttaaaatttcatcctggagggtcagggtgtcctatacctgtaacctcaacacttt

SEQ ID NO: 11133 - DNA, 1044 bp, Homo sapiens
ccagttcctaatgcagtactctgatcttgcctttcagtgaccttggggtccatgtggatggcttcatcgctaatgtagctcacacttttgtggttgatgtagctcaggtaggtggcctgcttttgatctctgtttagccttggggtagagggaatgcactgccatttgcttcttatccccacccccaatcaccacgtaagttgagagagtctctagagaagcaaaaggagaaaggtttttgttgttgttgttgtttttaccctcctgttcattggctggtcttcgcatatgggctcacagatattaaccagatagccagctgagttaacagactttccaggaagatactgattgcatgtccttatctacaggggacccaagtaacagggaggaaagcagatgttattaaggcagctcacctttgtgctgaagctgccctacgcctggtcaaacctggaaatcaggtaagctattttatccaattccaaagctcgtttgaaccaaagatgcattaggcacctatagctactctatatgaaactaccaacctcccctacagaccccttataaaacagctttttaaaattagctatatttagctgggcacagtgactcacatctgtaatcccatcactttggggggccaaggtaggaggatagcttgaggctgggagttcaagaccagcctgggaaacatggtgaaaccccatttctacaaaaaatacaaaaattagctgggcgtggtaacatgtgcctgtattcccagcttccagggaggctgaggtgggagaatcacctgagcctgggagattgaggctgtgctgagctatgatcatgccactgcactccagcctgggcaacaatgaaaccctgtctcacaaaagaaaaaggaaaaataagcatttgctgtccccacaaaacagattagaatgccaggtaaaaaaggataaacactggacttaatattataggcatgtggtggcacatgcctgtaatcccagcactttgggaggccaaggtgggaggattgcttgaacccaggca

SEQ ID NO: 11134 - DNA, 1041 bp, Homo sapiens
gtttatgaccaagttctttcacttaacactcatttaacctggggcaaatcatttaacctgagactcagtttccttgtcttctagattgggatatacatctgccctgttcacatgcaaaatttattgagttagaccatctttgtgaaagcactgggtaaaatgatatgcagttacagctggtcctcagcttgatgctacattcagtagaagctatactttgagtacccatacaaccattctgtttttcattttccatatagtatttagtaaattacatgagatattcaacactaatataaaataggcatgtgttagataattctgcccaactgtaggataatgttttttaagtgctctgagcacatttaacataggctaggctgtgatgttaggtaggttaggggtattaaatgcatttttgacttagtgatattttcaacttatgagttttttggagatgtaaccccattgcaagttggggagcatctgtataaagtatttttagattgtagggataatcaagctatgaaatgaaaaaccagtgaatgacaatcattggggcttgatggaggatattagaacgctcagttctgccaggtgcaatggctcatgcctgtaatcccagcactttgggaggctgaggtgggcagatcacgaggtcaggagatcgagaccatcctggccaacatggtgaaaccccgtctcttctaaaaatacaaaaattagctgggcgtggtgttgcgtgcctgtaatcccagctactcaggaggctgaggcaggagaatagcttgaacccgggaggcagagattgcagtgagccaagatcacgccactgcactccagcctggtgacaaagccagactccatctcaaaaaaaaaaaaaaaaacgctcagttcttttatgcttcttattctcattgtagagaacttattagctcctgatatctcacctttcatttgatgttgtacttctagaacacacaagtgacagaagcctggaacaaagttgcccactcatttaactgcacgccaatagaaggt

SEQ ID NO: 11135 - DNA, 1044 bp, Homo sapiens
ctggggactgaggtgggtcccatctccccagcttgctgctcctgcctcatccccttcccaccaaaccccagactctgtgaagtgcagttcttctccacctaggaccgccagcagagcggggggatctccctgcccccaccccagttccccaacccactcccttccaacaacaaccagctccaactgactctggtcttgggaggtgaggcttcccaaccacggaagactactttaaatgaaaaaaagaaattgaataataaaatcaggagtcaaaattcatcgtcttcaagcccctctttctagccttttctactactctctgcttggtcaaggtttgtgccccactacagaacagggctaaattagccaccaccactgaaaactcagccgaatttttttataccactctgatgtcagcattttttccatctgtttggggctttttcctcttttttccattctccccaaatattttatctggcttcaaaattaagaggattatttttcagattgtttttattcagtgtggccgattcctcatctgattcaggctgtccagtcaggcccctcccattttaggagctggagccttcatttatgaagagattctcatctatgaaatggatcctcatttgtaaatcttttttcttccattttcacaaagctgtaaagaaataatccatctcaaccttaccctttttctctggagtcagtggggtctttcctcgctccatcttacacagacctgagctggaagctcaactggttttgttccctgtttgaaatattgtgatctccctcccatgaaagaaaaaccaagaaccagaggcgtagactgactgaagacacaactcctggctttctgaagctatggacttggattggattgctgggggtttgtagagaaaggtgacaaatttcagtacctctggcatgctgtcccaggaaactagggctcccactaacttatgaggtttttaaacacattgaaaatgacatgacattaaaataaatttggatttgctcataatgatgtgctttgta

SEQ ID NO: 11136 - DNA, 1022 bp, Homo sapiens
agttttaaaaatagtcccatctgtttctggtctctgtctgtatgtgctattcccaggttgcctcagtaaccagggctcctagggtcatttagcagggcaggcagtaaggagagtgtatttgctgaaatgcggatgggatgttacatagttgacagatccttattcaaacagagcaggacaggtggagttgatggccattgagttgatggcagttgccgctcagttgatggcagttaatgtccctcctaccccaccccttcagtggccagttcctgaagccttcaaggcttgggaggtctgggaaaagagagtccttctagggacacaagcctcagggtccatccctttcctctgtctccacataggaccagaagttttaaatctacttaagtcagtaaggccaggggccccaatagtcaaacctcagttcctcctcagctcacggctgatgtagggaaaacaactcaggtgtctagtctaatgggacagtagatttgggggtagagagtgatcctggattgtgttccccctcatcatgtctcctgctacctcttgctttcttgtctggttgatcactcaggtcacatctgggattggagatggtgggctaggtcaaggccagtcattaaaaaaaaaagcctaaagactaaaagtgggctaacattgtggattttagaaacaacacattgataagcttaatgttttttgggacacaatttttttttttttttttgagatggagtcttgcccagtcaccagaccggagtgcagtggcgcaatctcggttcactgtaacctgcgcctcctgggttcaagcgattctcttgcgtcagcctcccgagtagctgagactacaggcgcccgccaccacgcccggctaatttttttatttttagtagagacggggtttcatcgtgttggccagaatggtctctatctctcgtgatccgcccgcctcagcctcccaaagtgctgggattacaggcatgaaccaccgtgcccggcaattctagactattaaa

SEQ ID NO: 11137 - DNA, 1100 bp, Homo sapiens
agcttcccaggccctggactggaaaggggaggagaaagagggccaaatggctctaggggacctgtagcctaggcagcaagtgtttgtctcctcctcatcatcatggaaaccaatcttcctacccccaatacaaagcgcaggtgtcctttcccttaaaaggagtcacacagagaaagatagaggaaaacacacacacacaccccaaaaaacccacaaagccaggcctaattaggtcttctggcccctccctgactcaaggaaggacttgcttccctcttcaccttcctgctctagaagccccgtctgaggggagttgagaaggctggaaaaggggacttttttttttttcttttttgagacggagtctcgctctgttgccaagctggagtgcagtggcccgaacttggcacactgcaacctctgcctcttcaagcgattctcctgcctcagcctcctgggtagctgggattacagtcacgcgccaccacgcccggctaattttgtatttttagtagagacagggtttcaccatgctggtcaggctggtgtcgaactcctgacctcgtgatccgccggcctcggcctcccaaagtgctgggattacagatgcgagccaccgcggccagcctggaaccaggactttttaaatcccaggattccctcaaactccaatttgactggacctccccctccagaaagaatgcgcccttctcctcctcccgctcctctctctctcagcagctgtcatttcaccacgtccctgagctatccacagggcaacagcgtgacctctaccttgtcagctccccttattagagagacatcagcccccaaactctgtgaggaatgaacctttggggcatcctcgcccctcgcccaccctgagtgtgaggagtcacacacactccctctcctctgtggcacaccaccagcatcttagtaggaaaccagaggcgagggtgtgctgcacgtcactgtctctgccttccccacctccaggtcagcttcccagacgtggaaaaggctgaatggctcaataaggtgaggattgatttgatttttagtcttcatgaggggagaatgggaatttgtttcttctt

SEQ ID NO: 11138 - DNA, 1037 bp, Homo sapiens
ctttactgcacggcctttatccttctgggcccctggggcggggacctgagctggctgtttcctgctttgcctgcacattgttctcccttcctcccaactcctcagggccttctgtatctgtgcctggccagtggcagcactagcagtggtattagcttatgccaaatacagctttggaaggatctttttttctttaactagatggtcaccttcttccctaccacacatgggtgggaaggtggacaggctaacctctccagctgtgagcctcttagactactgcatgtagcaaatgttcagcagctcaggcccccatgtccagttctgtccccactgtcctcaaccctgtcctgaaaattctactgctttgatggctggggccagtctcttgtcactttggaaactgaggacgcgtggattctactcaagcctccaagtagtggcatatcagtcttggagctcctagctggtgatacggagagggctttggaggacttgggacagcagggccaatttttttgcccaagtgcctaggctgctaactcactgactagaacttaatctggtactttacagttttgcaccaactctgccaagccactggatcttacattaaacatcatactcaaaccagctgtggttcttttccttaaggatagggaatcaatctacccatctgatgtttattcctactgtcaaaagcctttatccaattcgtgaatcatgtcagtttaattaatggtcaaagcctactaaggttgcagccaccaagaatgttgaggatggtcaagagacctgtgtaaagtagctgctgttgcatttcaggtgagactcatttccagtcacagtgatgaactctgttacccatccaacttgtctgctgaccactataggctttccagggaagggattcctaaacctggtaaacctgggagctctgtgccactgcacaggctcctggtgtctctgtgccactgcacaggctcctggtgtctctgtgctgtcagggcatgctcagctacattcaaaagggcttc

SEQ ID NO: 11139 - DNA, 1059 bp, Homo sapiens
accgcaccgacctgacagggttattctttaagtatagctagcatttcccaagtcagttagtctgagcttgtgtcagactcgtactccgtgctcagtcccaagttagggctcttacggggatccacgaactggatggggagggggagaaaaggcactgaggaacagtttccttgcatttggccagggactatccaacatggtctggaagtttctgactgtctcttacccattcccagatttcctttgaatttcgttctctgctgcactcccagctggccaccatgttttttgatgaggttgtcaaacagaatgttgctgcctttgagcgtcgggcagccaccaagtttggtccagaaacagccatcccccgtgaactgatgttccatgaggtgcaccagacttgaggcaagggattgctccctgacctcccttctaccccacttccctacacaattctcttatttatttggtttggctcctgttccaatttgaaaggagtctgtgttcataatactgtttctcctctcaatttcccagaaattgggttctatgctggctggaaatgttgggggaaagagaaggcaaaggatgtggaaatgagatgtgcttaggaaagggtcaggcccatcgtaggagcaccatatgcctgcagccttttcactacgaattagaataaggactatgtggttgtctctggaccttatcaagacaccttagtgtctgaccaggggacgatagtaacttttctaaggattgaataaattgagcttttcttctggcacagaggtactgagtggtaagtaacttttaccctgcctgagattcctcaggagaaaaggcaacctgcctccagcctgaaatacataaagcctcattttaagactgtaagtccatgctgcctggctactagagagcaaggggctttcttaccaccagtgctgaggagaaaagtactgaacggaaacggagttgtctttgtactcttgagttgtaccttattcttccacttggcctgagtttttataaaatttcaataaattgtgacagtgtgaatttggc

SEQ ID NO: 11140 - DNA, 1073 bp, Homo sapiens
gggacgttgcaattgctctttaatctatttggtgcgtttggtataggaaactgagtatttaaaacctaaactgtaaattaacctaccagactttagataagcaatctgccaatataaatattgtgtaggttctcttgttagccataaggctatacatgttttggctctagctttctccttgcagactgcttgaaataaaggattggcagattcacattaaagcacaacattaagccttgttccttcataggaatttggatttgtgtgaagacaatgggaagccatggaagggttttttttttttttttcagagtgtcactctgtcacccaggctggagtgcagtgacgccatctcagctcaagcgatgacccttgggttcaagcgattctcatgcatcagcctccctagtagctggaattacagttatgtgccaccattcccagctaatttttttgtattggtagtagaggtggggttttgccatgttggccaggctggtctcgaactcctgacctcaactgattcacctgccttggcctcccaaagtgctgggattacagatgtgagctaccattcctggctcattgaagggttttaagcagagtagaaacataatcagagttgtgttttgtttgtttgtttgtttatttatgagacagggtctctgtcatccaagctggagtgcagtggcatgatcatggctcactgcagcttcaaccttcccaggctcaggtgatcctcccacctcggcctcccgagtagctgggattatgggcatgtgccaccacacccggctaatttttgtattttgtgtagagacggggttttgcaatattggccaagctggtctcgaactcctaggctcaagtgatcttcccacctcggccttccaaagtgctgggattacaggtgtgagccaccgcccccggcctcagagttgtgttttataaataaactctggagccctgtagagggcaaataggagggtagagagaaaccagaggtggagcaatcctagcagactgttgccggaaaccaggtgagaaatactgatggcctgagctaaggcagt

SEQ ID NO: 11141 - DNA, 1057 bp, Homo sapiens
cagcacaagagagggagagagagcacgagcaatcaagggagccagagggaggatcttattttattttattccatgttcccatttctcggctctcgtttcctcacagactctcacccctccctgtctgaactcccctacaaggtcgcttcagccgtgcccccccaactcttcctttttatcttggctgtctacagtagtgggtgggggcgggactgcccaaagccaggggattcgccaggatcagagaagcacagacggcactttgtctgagatcagagatgggggtgacaccctggaacctctccttaccctgctgaacctcctcccctccccctgccccttacttctaccccctgcccctgtctggtagaagtcactggcctgaatcaccccagccaggttctgactgggtacaagacataggggtgctctggtctgctgggaggagatggcttggaggcatttggggtcataacatctgatggcatggggataggggggacctggatgactgggcttctggaaagaacagcggttgggtgagattagggaccagagttcaaatggcccacccttcagctttcccaggaaacctaacctccctcccccaatgccctctctcagattcaggccctgccctctccaagcccacttctggggcctcttctccctcccactgtaccctgggacccctccctccaccctctctcaggcccaccctccaggtgttagctgctggcttaagcctgtctgtgggagtcaatcattcttgctgcccccgccccctcacctgggctgagaggagggatggatgggagggggaatgaggggggcgataaatatgtatgacgagcgggtggtggcagcattaataacccgggatcgcagcgtggcggggacggggaccaggcggtggagattctagcccagcagcttggctctgctgttcctgtccccagtgacactgtgtgtgtacacatgggtgtgggcaaacagaggggggcacccatgcttcctggcctccttacctacccacagcacagcctgtgggccagtg

SEQ ID NO: 11142 - DNA, 1084 bp, Homo sapiens
atgggctggctgatggtcttggcggcaggattggtgtgggaaaggagttatttattgaatacctactgtggaccatacagatggaacaggccttgccctgtcctgcatgtcacagtggatgaggaagataagatcccagttatagtgcctaccacagagtggacagagcagtgaggcggtgtgtcctaggactggtgttctggggacagagaactgtggagttgaagggagtggttaagtccgggggtccttccacccaggccttcttacttcctctcacttcgcagtctcacccacggctacatgtctgacgtcaagcggatatcagccacgtccatcttcttcgagtctatgccctataagctcaacgtgagtgctctagggtgtggggaggggctcttggccctggtggtggtcctcccctggagaagctgagggcctggagcgccgggccgtccttagggttaaggaggagagtgagctgccctgcttccttctcagggctttagctgtttgtgtgtctgtccagcccaaaactggcctcattgactacaaccagctggcactgactgctcgacttttccggccacggctcatcatagctggcaccagcgcctatgctcgcctcattgactacgcccgcatgagagaggttggtggggggggctggagactgggcacctccccagggggtggtgaggaggtgtgggaggagggcagccttgggcaggcctctccgggccctccccaggctgaggccttgcctctgtacctgcccaggtgtgtgatgaagtcaaagcacacctgctggcagacatggcccacatcagtggcctggtggctgccaaggtgattccctcgcctttcaagcacgcggacatcgtcaccaccactactcacaagactcttcgaggggccaggtcaggctccctgaggtcgggccttgcctttccctgccttcaggcctattcctggggcactgttggcctggacctgagaggaattcattcccacctgcagcccttaagactcctgcccagtctgtgagagttctccttctcttgcccatggtggccatgccctg

SEQ ID NO: 11143 - DNA, 1024 bp, Homo sapiens
ccatgcttcagtccactctgtcccttcaacatttgaaagacgactctcatcccatgtaaacaacattgactgccttgcatcagaatgtctgcctgagagattgtggagtagcaccaacccagaggaccccaccccactaggcagtcaggttggccatggagcagcgactgagaaacaaagagcccctccctcttggcatgggggtcgggtgggagacatgagtataggaggtagggcaaggctcctgctttgttcattctgtgttatttcccttgtatacccagctggttgaagctcagacacaggcacccaaataagaagaggggtctgatggccctacagttgctggtggacacccttacctggtgcaccgtgtaagttgactggccatggagcaagggagggcagatggacagattgtactgtaatggctggcccaaaagggagtagcgcccatcacctagggagtaagagcaattggttttctgggagcttaagcttcatagtatgacttttataagacttcaaggggctttggagacagcaacaatgcatactattcctaattttctatgatggaaatgcccatgcgactggtataagagttgtttctcttcctaaatcctttggctctcaactgtgtctcacagataaatgggactactaggtcccatcatccttgaagaaaggctctatccactgtagacaacagtcctatgaaaatgaccagggaagaaacttacagacccttatgaatgtcttttatctctctttttttttttttttgagacagagtttcactcgccacccaggctggagtgcaatggcatgatctcggctcactgcaacctctgcctcctgggaagcgattctcctgcttcagcctcccgagtagctgggattacaagcatgtgccaccacgcctggctaatttttttttgtatttttagtagagatggggtttcaccacgttggccaggcagtcttgaactcctgacctcaggtgatccgcctgccccgggct

SEQ ID NO: 11144 - DNA, 1030 bp, Homo sapiens
gatatatagcagcagctgggaagaagggttgaggttaatgtgagggaatcggggaggcagtgactgtaggctaagaatggttggaaagatgataggagccttagtgtagtgtcagtgctaaagaggggatgttgatacaggatgtgtacagctcagatgtcaaggatgatgaaacttgaaaaggaatactgcattgagtgccttcagacagcaggttgaatggcatgaccagcaacgatctagaaaagtgggaaggagagggtgacggtgaaggcaaaactggtgcctgctggtttgagttaggccatgaggaagtgacagacatgggttagagagtcggtacaaaaggacttgttacgggtcgtatctaggctggtgagctctttggatttcagatagtggctagagattatagtaacatagcacctggaaagaaggggagaagccagcgctgggaaagtgttcttgggagtggtgagagggtaatgattggacagagcctagggagagtttgagcctgagaatgaggtaatagaaaacaagcagtcatgacagtaaaagggacagaaattggtgttgaacaaggctccttcatagcagtacaggagacttcctcactgtggcagtgccctgtatttgcatctctggggatcttagagtgcctcgggaagctgtggtcctgtgggtttgtgtgcagaaagacttcaagtgtacatgaacacatgacagtagaacaaatctgtgtccgggtgttctgtgcacttttcgtccctgttgaccctcacatccccccatgcactgttctcttcctctttccttactaggttgcctgtggctggagaaaggaatgtgctcatcaccagtgccctcccttacgtcaacaatgtcccccaccttgggaacatcattggttgtgtgctcagtgccgatgtctttgccaggtggagccagctgctcggggagagacctcctaagggaagggcgggtcccaggggaataggatgcttcaagggtggggctggggagatcc

SEQ ID NO: 11145 - DNA, 1050 bp, Homo sapiens
gatggtctcaatctcttgacctcatgatccgcctgcctcggcctcccaaaatgctggaattacaggcgtgagccaccgcgcccggcccacacttgtttcttatataagccatctctccctgacttgtagcttcctcaaagagaggggctatgtcttcacttcatcactccttcctcccctcacacagccaagtacagtgcagtgctctgtacctagcctatgttcagagaatgttttttttactctggtgtgatgggacagagatctgaaactctgagaacaaatggagttatactgagaagatttgagtctccatgtttagagtaggccacatagtagagttattggagtgtgagcctgaagctaaactagatggcagactgaggagctaatccttctctgctcctccccttgcctggacccctcccctggcctgcaggcctgatctgtcctctggaattttccttcgcagaagcctcagtgtaaagtctgccgatcatgccctgtggtgcagtcgagccagcacctgtttctggacctgcctaaggtaagtgagcttttctctcaacctagttttcaggaggcctcttctgtcccctctgccttagccacaaatactgagagcagattactcttaaaagttttaaatttccattaagaattgtacatactattgtcaagagatgaaatagattaaagggcacaaagtgaaagccccaggcccacttgcgagaggtatttactactttttcctttgtgtctattcagaaatgtcatatgcatataaaagtatttttatgtctctctttttttttaagggatagcttctcactctgtcacctaagctggaatgcagtggcatgatcatagctcactgcagccttgatatcctaggaccaagcaatcctctcacctcagcctcccaagtaccatgcctgactgatttttttttttttttttttttttttgagacagagtttcgctcttgtcgcccaggctggtgtgcaatggcgcactcttggctcactgcaaccttcgcctcctgggttc

SEQ ID NO: 11146 - DNA, 1046 bp, Homo sapiens
ggctgcagtgagccatgattgaaccattgcactgcagcttgggtgacagactgagactctgtatcaaaaagaaaaaaagaaaaaattagccaaatgtggtggtgcacatctctggccccagctacttgggaggctaaggtaggagggttgctttgagcccaggagctggaagctatagtgagccatgattgtaccactgcattccagtctgggcagcaaagtgagaccctgtctcaaaaataaataaatacataaaatataatagtcctcaggttgggtttgttgggtgtttcctcatgatttcaggctatgcattcttggttggaatactacataaatgacattgtgtccttttcagagccacgtgatggccatccccttcactgggaatcttaattttgtttggtcaggtgttattcaatttgttcactgtgtgattaatattttccccattgcaacttatgagcagtctgggaatacactttatttttttcttttcttgagatggagtcccgctctgttgcccagactgtagtgcagtgttgtgatttcagctcactgcaacctccacctcccaggttcaagtgattctcctgtctcagccttcgagtagctgggattacaggcacataccaccatgcctggctaatttttgtctttttttttttttttttttaattgaccattcttgggtgtttctcgcagagggggatttggcagggtcataggacaatagtggagggaaggtcagcagataaacaagtgaacaaaggtctctggttttcctaggcagaggaccctgcggccttccgcagtgtttgtgtccctgggtacttgagattagggagtggtgatgactcttaacgagcatgctgccttcaagcatctgtttaacaaagcacatcttgcaccgcccttaatccatttaaccctgagtggacacagcacatgtttcagagagcacagggttgggggtaaggttatagatcaacagcatcccaaggcagaagaatttttcttagtacagaacaaaatgaaaagtctcc

SEQ ID NO: 11147 - DNA, 1048 bp, Homo sapiens
taccttggtcagccacctcattgctacaggtaagtaccctggaagactactgatggggtgttcataggaaatgaggggtgaggcagtacttggaaaaagatcttggagagctgctatcttgagttaggagttgagctgaaataggaaataattaaaatgagaactcaacctagagaaacgaacaagaacctgaagaaagcaaaagtctaaagctaaaactctttagtagatataagcaaagagaaaaaagggccagaatggataggaagggactcccaaaatctgagcataccagccccttaaggagaaatgttgctagacacccatagttgaggttagaaagaggaaagaaggaagagttagtgggctagagaggggaaggatgtgatgtgagcagatggttctcactcattctcctctgtccagagtacctgaactatgaggatgggaaattctctaagagccgcggtgtgggagtgtttggggacatggcccaggacacggggatccctgctgacatctggcgcttctatctgctgtacattcggcctgagggccaggacagtgctttctcctggacggacctgctgctgaagaataattctgagctgcttaacaacctgggcaacttcatcaacaggtaggacttggtaaggggtcagagttagcagtgagctggggtggggctcattttccctcaggagatgggaatgtggagagaactagaaaatgggcaggaggctgtgaggacactgtggaaagttgatttctattaattgggatctgttcctagcacatactaggctatgtgtgcttgatggaacagttagctgtagagatgtgatttagcaaagttggttataaagtgggtttttgtaaattgtttccttattactgttctttgtagaattgaagatgtattctctcccagcaaaatagttcacctgcagatcattgaaaagtttggctgaagaaaggggttattttggtgtgggggtaggaggcttctgtgggctgggcatggtggcttacatttgtaatcccagca

SEQ ID NO: 11148 - DNA, 1027 bp, Homo sapiens
gctagcagatagtgggcagggaaaatacaggaaagccatttcctctttgacacaaaatgaaaaagtaagtacattgctaaacttctggatcagcctagcatccttagagagcttaaagaatctttgaccctacaaattatttggggtttcacagggaaagctacagctaatttcctaaaatcagcagatattagctcagtgttaagctcgttctttctaaaacacatcagagattggggttggagaggtcatctgtatagtctatggtagagtctgtatccaatcagtagatgattctggaactctttttttacaggtcagtcccttgttccaaaaattggaaaatgaccagattgaaagtttaaggcagcgctttggagggggccaggtgagaaagctaaaggctgtgccctcgctccacaacagccacagcatcacttccctaatttccctaagtagtcctcacccatcactctttccatcttttggccctgccgcttcctcacttacagtttttctttcctgtcttaactagaagagaccttcgacttaaaggtaaccactttccctctgagatgctgtataaaactggaggttaggggatatttatggttgctggtgataactttgttgttctccaggcaaaaacgtccccgaagccagcagttgtagagactgttacaacagccaagccacagcagatacaagcgctgatggatgaagtgacaaaacaagtatgaagcttaagccctgtgggagactggacaagctgaatcctaaatagatctttttcttgcctcactgttacctccccacccccctttatcttagggaaacattgtccgagaactgaaagcacaaaaggcagacaagaacgaggttgctgcggaggtggcgaaactcttggatctaaagaaacagttggctgtagctgaggggaaaccccctgaagcccctaaaggcaagaagaaaaagtaaaagaccttggctcatagaaagtcactttaatagatagggacagtaataa

SEQ ID NO: 11149 - DNA, 1050 bp, Homo sapiens
tggaaaggatggttgtagactaagccagcagatccccgagatctttataggtgcttgcctcacattgttaaggatctttcttttgagagggtgctgggctgtgctgctctttagagttgggcagactcctgacagtcccatctctctacttgcgttgcaggtgtgggctaagctggtggccccggctttagactggaccccacaatgtttgcagagatgttcaggtagctgtggtgatacggcagaggactcctcagtctccctcccagctgaggggttccccttgctcctctggggcttcccctgagttttcttgggtctccccacaacctttgccttcctggagtcctctctcaggtacttcgctcagtttaatcctcctagtgcctacatggatgtctgtgttatcaggcacgcgggagctgattacacacaatgaatgggggcaatgagagcagtggagcagacagagctgggggccctgtggccacatctgtccccatcggctggcagcgctgtgtgcgagagggtgctgtgctctacatcaggtacggatcttcacaggtccccaagctctgccactccagttgcccaggttttctttcttccgtttcttctctcagctcagctctctggtacccgattgctctcctctcttccccttccttcctcagcctttttgctttctgtagctctgggcctttgaatccattctccctttttctgtgtcttcccacattccttatcctctgttcttctaggaggatctgtaacttaagcactgtgctttaggagtattgcctgattcgctgccagctaaccccatgtcctctgaccctgtcctctcgcagtccaagtggcacagagctgtcttccttggagcaaacccggagctacctcctcagcgatgggacctgcaagtgcggtctggagtgtccacttaatgtccccaaggtcagagtggtgaggggcgcctgagagtacagagataagctaaaagtcttaatgcaaatcactgactgaggtagcccttctcacaggttccagccc

SEQ ID NO: 11150 - DNA, 1043 bp, Homo sapiens
ggggtcagatgcacaccttcctcctcccccaaccctctcctcagggagccctccccagcccaggcaccccatccagccctccctgcctgggaccaccagtggcagcctcagcagtgtgccaggtatgtgagtattgtggagcccttcctcatcctggctggaaagaggcagccaaggcatttaggggaatgttcagagagctctttgagggttttctgggttgggggcagggaggttggcttctttggatgatgggagaaagggcctcccttgagctgaatttctctcctcttttacaggtgcccctgccccaccagctgcctccaaagccccagtagtccccagccctgtgcttcaaagcccatccgaaggactggggatgggggcaggcccggcctgccctctgcctcccctggctggtggagaggctttccctttccccagccctgagcagggcctggcactgagtggagctggcttccctgggatgcttggggccttgcctctccctctgagtctggggcagcctccaccttctccattgctcaaccacagtttatttggtgtgctgactgggggaggaggacaacctccccctgagcccctgctacccccaccaggaggacctggtcctcccctagccccaggagagcctgaagggccttcgcttttggtggcttccttgcttcctccaccaccctcagaccttcttccacctccttcagcacctcccagcaacctccttgcctctttcctgcccctgttggctctgggccccacagctggggatggggagggatctgcagagggagccgggggtccaagtggggagccattttcaggcttgggagacctgtcccccctacttttccccccactttcagccccccctaccctcatagctttaaattctgcgctgctggctgccaccctggatcccccctcggggacacccccccaggtgaggatgggggtgagtaggtgggacagaacaagatgtagaataagagatgggagctgggaatcaaaagctttcagtttca

SEQ ID NO: 11151 - DNA, 1046 bp, Homo sapiens
ttccccagggtttgaagagggatttcgttgttctccctgatcccagcctttctttgcttccttgccccccgaccctcccttctttcccagagccaatcttcggacgtggtgattgtctcctctaagtacaaacagcgctatgagtgtcgcctgccagctggagctattcacttccagcgtgaaagggaggaggaaacacctgcttaccaagggcctgggatccctgagttgttgagcccaatgagagatgctccctgcttgctgaaggtgaaagggactgggttagatagaatgagggcttggaaactagcagttcatccaagaactggagtccactgaatgaggcaggatctaggggacctgtagtggttaagaagaccactggaggagtagacagattacacggacaggaaagaagcaaagaatcctgcaaccactgatgacactttgctgaacgtaggagcaggttaggatagaagatctcagaaaagggctaaagcaagattgagggtctgcgtggggtaggaggagtacttccttaagcctacttgctaaagtcaccccctgccctatcactctgctccagtatcctgttttattttcatcgtagcacttttcatgatctgaaatcatatttactgaatcagtttgtttattttcggtctgattccccgcattagagtgtaaactccatgaggtcaaagaattaatcttgttcacagttgtattcccagtggccagaacagtgccaggaatgttcaagaagttcaattaatatttaattttgggttcttctatgtttccctaatataattgcttcagggataccataatttcttatctttatggagggcaaataaggatttaaaaaatcttttaaaagggaggaatggaaagaccacaagtggaaaacagactttagagatatctctccaagtcacagaaggaaagcagccctccctccttactgaaagtctggagaattgagagtggaagtgaagggaagagaattgagtgtgtaagtagatgagaggttatgtgtcttg

SEQ ID NO: 11152 - DNA, 1055 bp, Homo sapiens
aagacaaggctggggttccagtggctcagagtgctgccatgcaggaagagcccctcaggacatgggtgtcctcattccctgccttcccccagctgcctggcccaggacttccctgggctcaacggccagtagctccagcccacctctaccctctcccaccaggtgccgggagctgaagaggcccagaaggaacgccagcggcagaaagagctggagagcaattaccgccgggtgtggggctctccaggtggggagggcacaggggacctggacgaatttgacttctgagaccaacactacacttgacccttcacggaatccagactcttcctggactggcttgcctcctccccacctccccaccctggaacccctgagggccaaacagcagagtggagctgagctgtggacctctcgggcaactctgtgggtgtgggggccctgggtgaatgctgctgcccctgctggcagccaccttgagacctcaccgggcctgtgatatttgctctcctgaactctcactcaatcctcttcctctcctctgtggcttttcctgttattgtcccctaatgataggatattccctgctgcctacctggagattcagtaggatcttttgagtggaggtgggtagagagagcaaggagggcaggacacttagcaggcactgagcaagcaggcccccacctgcccttagtgatgtttggagtcgttttaccctcttctattgaattgccttgggatttccttctccctttccctgcccaccctgtcccctacaatttgtgcttctgagttgaggagccttcacctctgttgctgaggaaatggtagaatgctgcctatcacctccagcacaatcccagtgaaaaaggtgtgaagcacccaccatgttcttgaacaatcaggtttctaaataaacaactggaccatcaatccatcaaccttttttgtggggtgggggttccagcagggagaaggctcagtgttcttttcagatcatgctctgatcctgttctttgctccccattccccaggtactataaacgggggct

SEQ ID NO: 11153 - DNA, 1207 bp, Homo sapiens
ggatcttggacacgtctccttgccctgccctgtcccataatctacgaaacaagagctgattttattgctttcaatttgacatggtggtgtaagttctatgaacagatgagaccagacagttattatagatgaaacataaaggaatctaggacttttttccataacctttcctctcagtacatgatcatccttggtttggtcttcatcttccaatttgtaatctcttgctcatgtctggctattaaccgaagcaaacaggtaagacagtaccctttcaagtacttacttgctttttaaaattttcctcttaacctcgaactccttccttagtctggccccaactacccaaagatcatccttaggtgcactgcttctggcctcttgggctatttgcttcctctgggatgtctggttaattttccatgaggatgatctagagaacctcaaaaggtagatatttatcgtgtctataattgttgcacaccgttatgcttctgtttgacttcctttgctgggctagggaaattgaggcacttgaactgataacaggatgtagggagacttaatttccctctacccatatctttcagacagatgtcatcaatgcttcttggtgggtcatgagcaacaagactcgggatgaactggaaagaagttttgattgttgtggcttattcaacctcacaaccctgtatcaacaagattatgatttctgcactgcagtgagtgtgttgggggtggtgcagcagccaggggaggtaggaaactgggtaaggacaatgcccaagttggcaaatttagtttgaatgtcattgtttctctctctacaagccctcttgtattggggctgtgttggtgggaggtgggggtggatagaggctggggaattagccaagtaggattttagtttgtaggacactggtcagataacagtaaagtttctagggacattcggcataggtattagtcactagcaactttacattcacaactttgcattcttcacgttttatcctcagatctgcaagagccagagccccacatgccagatgtgtggagaaaagtttcttaagcattcagacgaagccctgaaaatcctagggggtgttggactcttctttagctttacagaggtaacattctccagttccctcacacacatcctttttgagactgagaattaattgatacttatctctctcccttt

SEQ ID NO: 11154 - DNA, 1052 bp, Homo sapiens
tgcacctccttgggcagctgcggccaccagatgcccgttccagctcccattctggccgagaggttgtcatgagggtcactacagtctgaactggactccaggagcagggatcttgagtcaatgcatcagtcagagaagaactctcatggctgctggaggtaccagctggacaaggtgtttggggcatgctgcccccgtcaccgaggatctgtgtgggtagcctcaagctggagacattgtctggcctcactgcccactgggtagagacacctggatgacatttcagtacccgctggcagctcctcccactcatccagagacggccggtgggcaggcggggagagcagctttccttccctggagagaaccgtctttacctcagctcctagggcctccagccccccagctccaccacggtgacttggtgaagggggaccaatgccagaagaaaggggctgtagacccctattccccaccccatggccacagggcatctggcaataagactagtatacattgacctcccgttccctgcatgagggcggggagttccccctgctccatcccccattgcatgggggaagggcataaagaatcatttatatgcacgtggagactcctttctcatctggggcttttctggagggttgggagatgtggggaggtttctctgcacaggttgcaaatcccaaatgcagcagtgggttctgagttgtaggtgtgactcccacttgctggtgaataattcatgttggctgctaggtggcagcactccgaggtatctaaagggtagacctggacctgccacctatgagttgtgtgatatagaaaaaaatctcttagctctggttttcctgtctacttcatagggttggaataaggataaatgagggacaggttggatgccgttgcagagaaaatcagcaatgacataaagagatttctagaatagttgatggtccatttatttcaaatagtagctggtgtaacaaattctaaaatgtgtttttcatctggagttgcacagaatcatggaattttgtgttgagtga

SEQ ID NO: 11155 - DNA, 1046 bp, Homo sapiens
tcccctccttttcttgtctacctcactcctgagcagcccatcacctcatgcctttaaatgtcctgttgaagccggacgcggtggcttacgcctgtaatccgagcactttgggaggctaaggtgggtggatcacctgaggtcaggagtttgagactagcctgaccaacatggtgaaaccccatctctactaaaaatacaaaattagccgggcgtggtggcaggcgcctgtaatcccagctacttgcgaggctgaggcaggagaattgcttaaacctgggaggcggaggttgcaatgagccgagatcatgccattgccctccagcctgggcaacaagtgcgagactccatctcaaaaaaaaaaaaaaaaaaatgccccgttggtgatcatgactctaagactatcccatttctatctccagacttgcttgcataacctagtgcctactcagtatcttcatgtggttgtctgatgtgatatagaagtccatgtcaaacttaacgtgctcagaaaatgaactcatgatcttcctgtccaaattgcgcctcctgcaacctttctcatctaaatgagtggcaatttggtcttctagttggtcaggccaaacacccagaaaccatcctgagctttttttttttttttgagacaggttctcactctgttgcccaggctggagtgaaagtagcacaatcatggctcactaaagccctgaactttcaacctcccgaggctcaagcaatcctctgacctcagcctcccgagtagctgggactacaggatgtgccaccacacccagctaatttttgtattttttatagagacgaggttttgctatgttgcccagactggtctcaaactcctggactcaagcagtcatcccgcattggcctcccaaagtgtaatccaaagggattacaggcgtgagccactgtgcctggcccatcccaagcttttctctctctctcatattttatatccaatctattggcaaatcctgttgactctaccttcaaaatatattcaggatctgaccatttcttagccattg

SEQ ID NO: 11156 - DNA, 1012 bp, Homo sapiens
ctggttttttttggtttgagttcctaggtagctcagatgtccattgagcggctacaatgtgccggagctgtcctaggccatttgctgagctgagttttttactcacggagagctccacttccaacagacacagttccttcagccactcacctcctttttggcagggtttacatcctcaggcagctcctgattctggtttttcaacagaactgctatagggtaatattttggctcactgtcattagaattcagggagagggttgcattcttcatgtcctaggtaagataagaatgtaggcacagggaaaagactcctcagtgtctgtgtggttacagttctgaatgtgtataatatttaacattttgacttatgccacttcaccctctgtaatcatctttgataacaatgctccccaaacctggctgcatgtcagaatcatctgggaatagaaaatattcagattttggggttgttcttgggaaagctgattcagtaagtccaaggcaagtcctgtatagctagtttggcatacatcttgtgtctggatctcatttgaatattgggatcacataccttctcttggtacttttatttagccctgcatttccagcctttaaatgactttaggttgtagtcctacttaaatacaatttaaagatactacatcaacattagctttggaatctgagtttgtagagcacaaaggacagaattgccagatggtttgaacacctggtgccatgcactcctcctgaggttaaagaactgctggattcctggctagaggctccacttcttttaaccattaaaataggtgtaaatggcctaagtttctgtggacttcactgtcagaaatgaataaaaatgtcatttgggttagaagcttatttctgaaaaatactgccaatgactttaatctctccttaaacggcagagttgaataataaaacaaatattcatttttttgttgttgtgtttttgagacggactctcgctctgttgcccaggctg

SEQ ID NO: 11157 - DNA, 1029 bp, Homo sapiens
cagtcctcccaataagatttaagaaagagcagttgaaggccaggcacagtggctcatgcctgtaatcccagcactttgggaggctgaggcgggtggatcacctgaggtcaggggttcaagactagcctgactaacatggtgaaaccccatctctactaaaaatagaaaaattagctgggcatggtggtgcatgcctataatcccagctacttgggaggctgaggcaggagaattgcttgaacccaggaggtagaggttgcagtgagccgagattgtgccattacactccagcctggacaacaagagcgaaattctgtctcaaaaaaagaaaaaaaaaagttgattaggagtcaggaaacctggctttctgttgattaactgtgactttagacaaatgacttatcctcttagcttccttatcaataaaatagggagcaatacttctactggctatcaggattgttgtaaagatcaaaaagatgatgtgtatggatatactttataaactgtttatacttcacactgcttattgctgacacctgctgtgaattgtccacctggacttactgctgtggcaggtgaaaaagaggagaaaagtaaaaggcagggagtgggatgggagtagggaaatgaggtcctggtttcactgagccgtgaatcagtactccaccttcctgcccactgagctgttctgagctacctggcaggaagttagagcttccctactctcttttcttacactccaaatgttagggtcccaggctaggaaccagcctgtgaagatgggaggctcaaacccctgcttaatgatcaggattggtgtgtcgggatctcggccgctggggtgagtgtgcaggtactgctgtgctgtggcaagggcactctccttctccgtggcattggcctcagccccaatccacaagaacacctgttaaggtggagatttaatatatgttactgtgttcataccaaggactaagtactagatcatacacattaccctatctttcccctttctttcgtgagcaa

SEQ ID NO: 11158 - DNA, 1048 bp, Homo sapiens
aaaatgcatgtgcacgcacacacacacacacacatatagcctcccaccatgggaaagtgaatatttaaaaatttttcttaatctatttagcaggtatgagtacatatttcttacatgcatatattgtgcagtggtaaaatctgggcttttagtgtgcccataaccgaagtggtgaacattgtatccaaaaggtaatttctcaaccctcatcctcctcctagcttcccacctttggtaccctccaatgtctattattccagcgagtgactatttgaggaaagagaagctgccttatttatcctggcatccctcctgtacataatataatgggttttgtagctagctactcactatatgttgcttaaattagttaattaattaaaaacaaggaaaaatatattcagctagcccctttgattcatctatttaattcttaaaattgatgctgaactggagaatattgcttgggtatatggtcaaatggggtttctcatttgaacttatcatcaaaacttaggctttcccttgtatgggaagaacctgctctagtaaaattatcatactgtgtagaccagatcagaatctgtctcctctgtaggaaggcatatctggaaaagggagagcccagaatatttctgcatcaagcttgcttaattttttcttgaaaattcagcaatcagatgtggaatggatcgaagtgttattttaacagcagtgtctgcattaggaaatactaggccagcatatagttgagaagcctgggggtaagagaggttagataatttgttcaagatgaaaagtaaaatataggtcttacccaactcttctaatactaaatcaaggtgttttgttgtcattgttgttttattttgtggtttttgtttttgcttttgcttcttcttcttcttttaaagagccctttaaataatccttttttaaaaagaatcctttagatttttttttaaaaaactctttttttaaaagaattttatgctacatcataatagtaataactggtgctcccaggggaatgaagcctagtgaacag

SEQ ID NO: 11159 - DNA, 1050 bp, Homo sapiens
tacatatagacataattacttcaatatgactctttttctcataaaaataatgacatatttgagtcaggcataatacattttttctgaggttggagttagcaggaaaatgttatcttttatgaataaataattcccagattggttgctacatatcatgattcaaaaagtaaaataattacctggatgtggtgatgtgcacctgtagtcccagctactcgggaggctgagacgagagggtcatttgagcccaggaagttgaggcttcagtgagctataatggccccacttgcagtccagcctaggcaatagagtgagaatctgtctctattaaaaaaaaaataaaatgttcttactagaaaacattatatttagaattttagtgattattccatttataatattatccgtagctaccaaaaaaaagattataagatacaaatgatttggtttacccatacagttacatattaattttcatcatttaatacaacttaccctacaccgtagcttatttttcaagtttctctgaacatctttgttgtcattcacctctttgtctatttgttctgtagagaaaacaagtgtcattgcttttgtcttctccatctagacttttgcagtccttagactatagttctccttagctctattcaaatagtgcacttgcaaggcgctgcattcttctcaaagtcagccatgatgcacatatttataattacatacacatataattgaatatgattttagagtcttgaaaaactgatcttctttggcactatcctgaatgtttctgattttcttaaagtgcctgacaatattgagtaacaaagcttaccatcaccacattgcaccattatgtattattctgtctccatcaatgcagtgacatcactgatacatcataccaacaagatttctaaccacaaccattcagagcactaattagcatctatattgagaatataagattaatattacaaacttgactttactcatctctctttaagattttgatttctgcacaaccatatgcagaactcatgtttgaga

SEQ ID NO: 11160 - DNA, 1049 bp, Homo sapiens
tgttggaacctgggttggcactggctcttgctagttgggggagcccagggatatgtactcactctggcagcagtggcctagtgggtacacatgcacaccagtggggaactggagacaaggtctgtctgtgtgcacacaagccaccaaagcagtgggagggtggctgtgggctactgtgtcctgacaaagttgtttggggaggctgcagtgggcggaagctgcagctgtactcgtgtacattggtggtggcttctctggtagagctctccaatggtcaggcacaatccgctggcaaaggagcaatgatgtgggctccagggaggaactccagttggggatctgaggctgcactgcaagtgtgcatggccagcagacagtggggtgctcatatctcactggccccatctcataggcaagaacattctactctgtttgggtctggcagattctctaaggctaaagtatcctaggggagcatggcaagtcttgagggttgggtatccttggccgtgcttcactagagaaattcttacaccaaatcctctgggctctgcataagctggtgtcctgcctccaccacctctttaagcagtatttatggggtcatgggttcccctactgctagggttccagaggtccatgtagagagtgggtctctccttgcctgttcacctcattccttccccgggaacaagtcttggtgtgcaatagctttatatggggttcccaacttcctccccctttatactagcatctgtgtcttccctccatgcactctcaatgccttccctccgaagattgccgggagtgcaccagtctttctgacttcccaattcctcagtggcagatgatcctcctggctgcgcttagtcaaccatcttgccacagagttcgcaaagtcttaagataatgacttcagaaagattatgatttagtagagaagatataatttgtacttaataaatgtctttaatatagaagaattcaaatgaattatgtagacacatcctcccttaagtaattggaacataattccctatttcttaagt

SEQ ID NO: 11161 - DNA, 1072 bp, Homo sapiens
tatgactatgatgttttagatacctcataagtggaatcatgcaggatttgtctttctgtgactcatttacttcatttagcatagtgaccttcaggttcatccatgttgctgcatatggcaggattttcttttttcaggctaaatagtactccatttttctttattctttcatccatcaaaagacattaaggttgtttccgcatcttggctattgtgaataatgctgcagtaaacatgatagtacatatatcttcaggactctgattttaatccttttggatatgtacccaaaagtaggattgctggatcatatggtcattctatttttaattttttgaggaaccttcataccattttccatagccagtgcaccatattatatagtctacaagagttccaatttctccacatcctcaccaacagttaccttttgtttttttcaataatagccatcctaacacgtgtgaggtgatatctcattgtggttttgatttgcctaattaagtgttgtaacaccttgaaattttcaaaaacaagcattagaaaagaaccgactgcatgtataataagatagagctgtaattgattttttcctttatgcatgatctgttgtgccagtaccttttatagaatagtccatctttgcctattagtttgtaatgatgcttttgacatatgtcttcatatatatgtgagtctggctcttatttctttccactgttttcattggtctttttacttctctctatgccaatatcacattttcttaatcacagctttgacactttgtaaccttgggcaagttaatttctgtgtgtatatatactccatctgaaattaagataatagtacctacttcattgggtaaatgaaaatatatgaatgtgcttagaagtatgcacatggctcaagagtaaaactcaaatattagtgattttgttattaaacttaataaaggtaataattaaccttaatatgttaataattaataataaattaagcttaataaagaggcttagtaatgaggaaactgagatttccactttgtttttcttccagactttctggggaa

SEQ ID NO: 11162 - DNA, 1045 bp, Homo sapiens
ttgtctgtatgtatttgcttattctggacatctcatataaatggaatcatacaatatgtgtgtttttttgtttattttattttttgagatggagtctcactctgttgcccaggctagaatctcagctcactgcaacctccgcatcccaggttcgagcgattatcctacctcagcctgccaagtagctgggattacagatgcgtgccaccacacctggctgatctttgcatttttgttgagatggggtttcaccacgttggccaggctggtctctgaactcctgacctcaggtgatccatccgcctcagtcccccaaagtactgggattacaggtgttagccactgtgcctggcccaatatgaattcttttatgtttgtcttcttttatttaggacagcacaatgttttcatgttttatccatgttgttgcatgaatcagtacttgatttctttttatagatgaatgatttctactgaatggtgcacatttactttatgcactcatcagttgatggacatttgagttgttttcacgttttggctcttctggatattgttgctatgaacattcatgtaaaagtttttgggtagataatgtgttttcctttctaatgggtagatacctagacatgaaattgttgggtctttttaaacttcgttgtttaactattttaggaactcttagactgtttttccaaagtcattgcatccttttacatcattgctggcagtgtatgaggattcattgcttcacattattaccaacacttgttcttgtctgtcctttttattatagccgtccaagtgggtgtgaagtggtatctcattgtgatttttgacgtgcatttccctagtgattgatgataagttctttttttgtgtgcttgttatatatcttttttagtgaaatacattcagatcctgtgcctatttttaatagaattgtttgtctttttattgttgtattttcagtttgttatttatttaggatgctagacccttatcagatgtatgatttgcaaaaattttttcttattctgtgggc

SEQ ID NO: 11163 - DNA, 1054 bp, Homo sapiens
aacacctgaatggagaaacaaaatgtagcatatccatacaatgaaatcccactcagcaattaaaagaaattaagtattgatatgtaaaaacatggatagatctcaaaataattacatggcatgaacaaagccaaacaaaaaagaggacatactatttttatgtaagactctagaaattgcaaattcgtctatagtaacagaaagcaagtactgttttcatgtacaagtctagaaaatgcaaagtagactatagttgcaaaacacagaataagtaacattctcttaatccctcaggttttttctcgcttcttgatttttattgtttatatcttattgggaatactgtgttctcattattgaaatgctaccaagaacaattttgctttccgtatctgttaattaagactaacttaggacaagaaaaatctccattaagttggatataactcagtgagatatttctgttcctctttctgcattttaaaaattcacatggacagataacaagtctcagattaggactgtgatgtaggtatggttccagaaatttcttctagatctgtggcctgtcttatactaaatttttttagtctagctagaaatttgaaagtggactgtgaattagaatcacatctgaagaattacctccattttagttcttgggagaaatccagattgtgggccttctggaataatgaaatggttcacaagatgcccatttgtgatttctgtcatggttcctagcccgtgtgtcttggtgtcattgtaaaaggttgttgatttgcttctgaatttcctacaaaagctgatgctagaatgaatattgttaccatatgagggatctctgctactcaaaatatgtgggaaacactcttttgtcaagtctcttgactaacagttactccatagtattttttaaagaacctaataaaagaattatgtttttaaatattgctttttgatttatggtacaaactgaaagttttaaagcaatagtttattttgaaatatgtatggcaggcttgtccaacctgcagcccatgggctgcatgcg

SEQ ID NO: 11164 - DNA, 1065 bp, Homo sapiens
atctatggttttgctttccgcgatttcagttacctgcaagcaaccatggtccaaaaatattaagtgggaaattctggaaataaacaattcgtgagttttaaattgtgcaccattctgagtaacatgatgccatcccactccatgtcctccccatggacactatacactaccttcccgtttgtcacttagtagccatcttggttatcaatctactgtcacagtgctttgttgaagggcattagtagcataatgcagcgttacaatgtacatcattcacttcacctcttctcatcaggtagacatttaatcatctcatatcattacaagaaaaagggtgagtacaatatgataagctaccttgagagaccacatacacataacctttattatagtatattgttctaattgttctattttattattagctattgttaatctcttagtgtgcgtaattaataaattaaacttcgtcataggtatgtatgtttgtaaaggaaaaaacatagtgaatatagggattagtgtgctatttgtagtttcaggcatccactaggggtctcggaatatatgtcttcaaaggcttatagaaaatttataatttgtcaattatagatgacaaatttctgaactccaggttgctaaaatgaattgagactagttggggcctttggaagaactgagtgtattttgtattttgggggaaggaactgtgaatcattgggggccagggggtagactgtggtagccagcctcaaagatgctccccagtgattgtgacctcttagaatccttagtctggtgtaatcctttcccacattgtacgacagttggtctatgcagtcagtagcatgtggcagaagtggtggtatgtcacttctgagattagtccttaatggatgcctgtacttctattgggagtgcacatacctccctcatcccctcccctcggatcactcactctgggcgaagccataactttgcccttaacttaccctatagagagactcacataatgaggaacagaggctgccaacagctacatgagtgagcttgtaattaagattt

SEQ ID NO: 11165 - DNA, 1061 bp, Homo sapiens
tctcttcacttggcttcctgggcacagtttctcactggctgcatcttgttggagtcctttgtaaaaccttcttcatattctttatctcaaaatatcagtgtctccatattctcccagccctcctttccttggtgatttcttttgttctcctggctttaaatattttccatgtgttgatatcttttaagttgataggtcctgccctgaagtctcccataattccagtttgaactatcccatatcttcatttgtatatctgacaggcttctcaagaagactatcagatataaaactaagctccctttcccaaaaaaccttaggctctgtcattcttccttatctccataattcccacttctgctcttccaattgcttaggccaaaaatcatttctgattcttttatttctcacccttcatgtaatctagcagcatatcttcttagcaattccttcagaatttattctcagtcagaccacttaacactgcttccattgctaccactttggttaggattgttgcagtaacctagtttcccacctttgaccttgaattagtccattctcgcactgctataaagaactactggagactaggtaatttatgaagaaaagaggtttaattgacttacagttccataggccgtacaggaagcatggctagaaggcctcaggaaacttaacagtcatggtggaaggcaaaggggaagcaaccacatcttaccgtggcatagcaagagagagagagcaaagggggaagtgctacacactttcaaacaaccagatcacatgagaactcactcactgtcatgggaacagcaagggggaaatctgcccccatgatccagtcatctcccaccaggtgcctcctcaaacactggggattacaatttggcatgagatttgggtggggacacagagccaaaccttatcagaccttctgcagtgttcttcactaccagcaaaagtgaacatttaaaatgtcagtcatatcatgccacttctcttcccaactcctcaatagctttctcttttgctcagattaaaatataaatactttgata

SEQ ID NO: 11166 - DNA, 1049 bp, Homo sapiens
aggaggtgcctgctgggaggtgtttagatcatagaggcagatttcccccttgctgttcttgtgatagtgaatgagttctcatgagatacggttgtttgtgtgtagcacttcccccttcgcactctctcctgctcctccatgataagatgtgcttgcttccccttcgccttccaccatgattgtaagtttcctgaggcctcctagccatgcttcttgtacagcccatggaactgtaagtcaattaaacctcttttcttcataagttacccagtctcaggtagttctctatagcagtgtgagaacagactaatacaagtactaacagtatatttattttatgtaattatttaaatattctgggtgatttgctttaagttttgagataacgctgttgatattttgaattagtgcctttttttcctactgatttaatgcccttatcaaaaccttactgactacaagactattacaaaacattagctgctaagtagatagtattattggactaaattatgtaggatagatgtgggttttcatatttcttcggagaacgtatattattaagtttaatattttataaattttttcaaaactacaactattctaaaatctaaaagtattctgtattcatatatcataaaatattttgattactattttcttgagttgattaggcaagttattgaccagaactagatgaaatttcagtaaattgatttagaaatcagaaaaagacgtgactttactttgaaaatactaaattttggtgaatacagacatcccttcaaacaaggcactttcttttttattgtgtccatatattctagtgagctgttcagtttaatataaattatttttaaattgcttatgtggtacttaaaaaattttgcacactaaaaaaaatctgtaacatctcttaatcatactttaatttctaattcctacatctcctcagaaaatatttgaattatagtatgttaaaatttaaagtttatcctgtgtagcataaattgtattttagtgttaggtgattgaactcttaccttttg

SEQ ID NO: 11167 - DNA, 1032 bp, Homo sapiens
aaaatatgccattctgtatttctagactagaccacttttctgaattccagatttttcataaatttcatgtaggactcaccacctcaaattaaaccaaatctttttacccctccttctcccatcccctcaacctaaactgtcttcatttcctgtattgcctatttcaagtaccatccaagagccatcctgagttcctcctccagcctttcttctcttgtctagttagtcagcaagtcttgcagattctgcctcctcacctgaagttttcaaacagtacccctttacattcttgaaaattattaaagatccaaagaacttctgttatatgggttatagctgttaatatttgtcatattcgaaattgaaataagattttaaggtattttaaaataacagtacaaaaccattgtattttgacatgaataacacttttatgaaaataactatattccaaaacaataaaattaccaaaaagttgcattgttttttatttttgaaatttctttactatctgactgaatagaggacagctaaattcttgtatattcttctgcatttaatttattgtaatacaatgtttgggttgaagtacatgaagcaaaatcagcctcacacagatacatagttgaaaaggagtattttcagatcattaatactacatcaaaacttgactagtggtggtttaagtcttaaagttaaatgatagaatctgaaaccatatcaatgaaccttttatagtattaaaatctttcaaatgtaaatttcatgcattttggtcatttgggaaatattcacggagttatgcagatcttccaaatgttgacacattttattctacaatttttttcaaatcacattttttaaaacatcacctatcttatgagaaacgcctaagtattgggaagctgtcaactttgtggtgtcagagtcaagttttccaagattctaattcttcatcgaaagcccaaattttatcattggctgcaaatacattgttttccttaaagacacagccttccttcattcattttt

SEQ ID NO: 11168 - DNA, 1114 bp, Homo sapiens
tcccagaaccccatctgctttcctttactttccacaatggccccagaagctttctcatggatcccaggactctgaggaacagtttgaaagccaaagtctggcttgaaaaaaaaaaaaaaaaagaaacacataaaaaactaataatacagattaagatcacagtttatggagttacactacttggattaaaaacatggccttcctgcttattataataactgtatttccctagacaagttaattccacaattcatttttctcatcgtctgacaagaaaataatagtaccctatcttaggagttttgtaagggttacgtgagttgatggttttaactcgtaggatgctgactggcacattataaatactgaatacatattatgtagaaattatctcatctttttttaaaattcaacaagttaagcagaatgactctggaaagattctgttctccataaccgttctatctgtcctcttttcttgagtctttttccacgtggaccttagtggactaagaagaaataattgagtgtacttttatttttcatatagtgttattgtaggaatggtatttatcaaccctttaatttctgaactatgctaatttaactcttcctaggcaagctgataaggaagggatataatagcatagaattgtttatgaatattctatctgtagggcactaggaaattcaaaattgttgagtttggttacccctagcccctgcctcctgagtagttatgattataggcatataccaccatgtcccattggttcaaataatataataagatagttttctagttccctaaatctgttactccatctagagaatgcccagtttttaaattttgcattattggtgataattttaattagcattagttcagtagattcaagagcacttcaacccttgtctttttcattgtcaaggcctacctaggaggctcatggttagtttcctggatgaagcatctcctcagatggatttgaagcaggggagtaatgtggtcttttccattggaaagcagcatggcataagatggttattttcaaaatatttacttggacataatagagctccttagatagattctaggaagtcattgaaaaaa

SEQ ID NO: 11169 - DNA, 1025 bp, Homo sapiens
tgtttttgagatgaaataggtattctgctgatattaagggagcagtagtgaaataggaagcctaaagaatggtgaagatttttttttttttttttttttttttgttaatgagacagggtcttgctctgtcacccaagttggagtacattagggtgtgatctcagctcactgcaacctccgcctcctgggctcaagggattctcccgcctcagactcccaagtagctgggactacaggtgtgcgcctccgagcccagctaattttttgtatttttgtagcaacagggttttgccatgttatccaggctggtctcgaactttcgggcttaagcgattcacctgccttggcctcccaaagtgttgggattacaggcgtgagccactgggcccagcccaatgaagattttaaatagttattgagataaatgagagaataaccacatgtgtgatatgcagaattatttctgagtactgtcaaaggatcaattgatattgggcactgtggatttgtagcacaccagcctctaaaattgggaaattctcttcagcacatgtgaacagctctgagaaagtttagcaagagtggaatgaatagaattgagtaacaaagacattaaaggttcgtgataaagcatgtagggcctggatggaagggctagaagacagtagggagctggtaaactgggagaaaacaagagttaaaaggaatagaaatctctgtgcaagacaagaagagataagaatgaatttccaggagaagcaagaagtagtggttagacagtaacccgagtttaagatactaaaagtggggccgggtgcagtggctcagtcctgtaatcccagcattttgggagactgaggcagaaggtcacttgaatccaggattttgagaccattctgggcaacataatgagaccttgtctctaaaaaataaaaattagccagtcatggtgtcacacgcatgtagtcctagctacgcaagaggctgaattcggaagatggcttgagcccgggaggttgaggctg

SEQ ID NO: 11170 - DNA, 1053 bp, Homo sapiens
ttcaccttgttagccaggatggtctcgatctcctgacctcatgatccacccgcctcggcctcccaaagtgctgggattacaggcgtgagccaccgcgcccggccgttagttcttataataaaaaataatcacagccaggcacggtggctcacgcctgtaatcccagcactttgggaggctgaggcgggtggatcacgaggtcaggagatcgagaccatcctggctaacatggtgaaaccccgtctctactaaaaatacaaaaattagccgggcgtggtggtgcatgcctgtaatcccagctacttgggaggctgaggcaggagaatcacttgaaccggggagtcggaggttgcagtgagccaagatcgtgccactgctctccagcctggggacagaacaagattccatctcagaaaaacaaaacaaaaaaaaccaaaaagacacacacagacacacacacacatacacacatacacacacacaaacacacaaaacaaataatcgcttatgagtttaatgttctcttgacttggaattccgtgttatttattcaaattctgtaaggatgacaaacttgtcttatccatctttgtgtagcctttcagtaaatgtgtgtagatttaatttcattttgtaaatttaattatgtgtaattcagtttgtgcattttctaacctcgtgcattttctaacctcttacatttttattgccacttaaaaacttctgagtgagctggcttggtagaagaagttaaattaaggttcggaattatagcatgtgtacccaattaatttaaagtgctgtttcagtaataagaggagtaatgttattgtttttaatgaaatgtgtttatttcttgaagaaattagggctgtttaaattcaaggcatataataaaattctaggaaatttcttaatattcatttacaagtattgtggggatgatgtatgtactatttttaatgattctattctagggtgggaattcttatttatgttttccctcctgtagtatatgaagaaatagagtgcttttttgaggtgggaaagaag

SEQ ID NO: 11171 - DNA, 1066 bp, Homo sapiens
gcccacaaaaccacgttttcctcataggcctctggatctgtgatgggaggggctgcctcaaagatctctgacatgccctggagacattttccccattgtcttggtgattaacattcagctccttgttacttatgcaaatctctacagccagcttgaaattctcctcagaaaatgggattttcttttctttttgcgggggagggatggagtcttgctctgtatcccaggctggagtgcagtggccccatcttggctcactgcaacctccgcctcctgggttcaagtgattctcctgcctcagcctcctgagtagctaggattgcaggtgtgagcccccacacccggctaatttttgtatttttagtagagaccgggtttcgccatgttggccaggctggtcttgaactcctgacctcaagcaacccacccgcctcggcctcccaaagtgctgggattataggcatgagccactgcgcccggcctgggattttcttttctattgcattgtcaggctgcaaattttccaagcttttatgctctgtttcccttttaaaactgaatgtctttaagagcacccaagtcacctcttgaatgctttgctgcttagaaatgacttctgccggctgagtgtggtggctcacgcctgtaatcccagcactttgggaggctgaggcaggcgggtcatgaggtcaggagatcgagaccatcgtggctaacatggtgaaaccccatctctactaaaaaatacaaaaaaaaactagccgagcgtggtggcaggcacttgtagtcccagctactggggaggctgaggcaggagaatggcatgaacccaggaggcagagcttgcaatgagccgagatcgctccactgcactccagcctgggtgacagagcgagactccatctcaaaaaaaaaaagaaagaaagaaagaaagaaatgccttctgccagttaccctaaatcatttctcccaagttcaaagttccacaaatctctagggcaggggcaaaacgctgccagtccctttgctaaaacataacaagagtcacctttactccagttcccaa

SEQ ID NO: 11172 - DNA, 1066 bp, Homo sapiens
acaacgatgtgaaacagttgatactactcaactgtacacgtaaatattgttggggttttatattgtatggttttaccacaattaaatattttttaatattgaaaagattcctgcactcccatgtttattgcagcactattcatgattgccaagatttagtagcaaccaaagtatccattgacagatgaatggatagagaaaagttagtacatatagacaatggagtactattcaaccataaaaagaaaagtgagatcctgtcatttgcaacaatatggatggaactgcaggacattatgttaagtgaaattagccaggcacagaaagacaaacttcacatgttctcactcgtttgtaagagctaaaagttaaaacaattgaacgaatggagagagagaatagaatgatggttaccagcagctgggaagggtggtggagatggggagcagggggaaagtagggatggttaatgggtacaaaaatatgggtagatagaatgaataagatctagtatttgatagcacaacagggtgattagtcaacaataatgtacattcaaaaataactaaaagaggccaggcgccatggctcacgcttgtagtcccagcactttgggaggccaaggcggccagatcacatgaggtcgggagttcaagaccagcctgaccaacatggagaaacactgtctctactaaaaatacaaaattattctggcatagtggtgtatgcctgtaatcccagctactcgggaggctgaggcaggagaatcgcttgaacccaggaggcggaggttgcggcgagccaagattgtgcgattgcactccaggctgggcaacaagagcaaaactccatctctaaataaataaataaataaataagtataattggaatgttttagcacaaagaaatgataaatgcttgaggtgatgtgtagcccatttcccctgatgtgatgattatgcattatatgcctgtatcagaatatttcatttactctataaatgttacatacctactatatactcataaaaattaaaaaaaaatatttttaagtaaacaaaatagt

SEQ ID NO: 11173 - DNA, 1083 bp, Homo sapiens
tggtgcgcatggaactttattacagcattcaacctggcacactgttatctggaaggtattgtaaaatagattggactatcagcttttaatgagtcatgcttatatattaatactttttcagttaaacttatttcttttaatttttaaagaatttccatgcatttgtgtatttgacaaaacaggaaataactgtgtcatattgtaaattgtacctcataaagagcaaattaaatattaacagccttatctctgtttctgtcttcatctcttattattatatctctcgtgatttctgcctttgcctttctgtctcctttttttcccccagttttcccaaatggtaaaaaccaggagttactaaacaacaaagggtaatcaatcccttaccatagagtagaaagcttttggggtttttgtttgttttacttttgaggtctacttatagatatgtaatttaaatataatcaaaagagaattttattaacagatgaatatcaatagcaatgaagtttatttgtagactcaccaaacaaaagtaacctccaaatggtatattgtacatgtaatgtttattcattaaattacaatttcatttttttcttcttttgaaactttctaataaaatcagcagtttattagtgatcattccctctttgctaaaagtctcatcttttttgttccatctgttccattataataaaattctgtttataatcctttcacttgcttttgtgagtttttcaaattaatagaccccaaaatgtcttcttaaaaaattaatgggctgggcatggtgactgacacctgtaatcccagtactttaggaggctgaggcagcaggatcacctgaggtcaggggttcaagaccaacctggccaatatggtgaaaccccatatctattatagtaaaagccctctttccttctgtcttgtatttcagttccatcccatagttcctcctcagatcacaaacatgcttaattctcccatacagtttgtttttaatctaatacttttctgattctaattttcctttcaagcaacttcattttttatcttcttgctgcctaattcttaatgatt

SEQ ID NO: 11174 - DNA, 1050 bp, Homo sapiens
gagaataagaaagagtttgattatcaaagagattgagaggtagtgaaaggccagatcatccagatcatgtagaatgtgttaggagaaagttaggaggctgggcatggtggctcatgcctataatctcaacacttcggaaggctgaggcaacaggatagcttgagcccaggagtttgaaaccagcctgagaaatataatgagatctcatctctacaaaaatttttttaaaataaaaaatcatccaaatgtggtggtgcacacctgcaatcccagctacttgggaggctgagttgcaaggcttgcttgagcctgggatgtggaggttgctgcagttagccaagatcgtgccactgcactcaagtctgcgtgacagagtgagaccctgtctcgaaaaaaaaaaaaggatttcatcctaagagcaatgaaaaaaactactgatagattttaattcatgatttgacatgatcaaatatgcacttcaaaaagatcacaaagtgcatgtcttagtgtatatgtagaatggaatggcaacaaggaaggatgacaggatgttgttggactggttaggaagctgttggttgtgtatatcagtggttctcaaacagggcctattatactcccataagacatttggcaattttggagacatttttagttgtcataactggggaaggttgagcattactgctatctggggagggtagaggcaagggttgatgctacacatcttacaatgcagcctcctataacaaagaattatacaaccagaaatgtcaatggactaagactgagaaacctggttgccgattatactactttcaattctggtggtaatgctggtggtggtagaaaaaggtgaacagagatacttttgtacatagttatgagcatgttgtacatattatctattttattatttcgtgtttggcattttttaaactaatttatgttaaagcacaagcatatttactcattccataagcatttttgtatattgttctttatgtgcacttttttctccttttttccaaaaactatttatggtgtctg

SEQ ID NO: 11175 - DNA, 1126 bp, Homo sapiens
aaagtgatcatcctttttgtcttataaagcacaagtatattttagacacttcataaataatatcattaaatgtttttctcatggagaaaaatgaagacttaaacaagaaaatacgaaaagaaaaatttgtggctagaaaaaaaaacccaatttaagtattttcaacacatttgaaataattaaaatctgcagtatcatgatatgcattttattctttcttcctatcaaattatttgaagtaagaaacctagagaaactagttactatttattaaaatgttttcttatattaaaatattttattttaaatcaaatcgatatatttagatacatttcacattaaatatacacagccctgtcaaaaattaatccatacatttcttttagaaacaaattttcgtagatgacttattttcccaactgtaacacacatgattatttgtttaagttggtggaccaggcatggtgcagaaatcagatgtcatttcaatgaactgatatcacagaatttgaagtcagtgtcatcgtggtcagtcacacattcttaatggcctaatggctgtattactgaacaaatgatcagattgtagaacctgaggactgcctgggacttcactttgttggccctttttctattcttttaagaaataaatcacactgtaaaaaagaacattttttagctgattaacagtttcagcctatactttattctataacagtttaaaatagtttgtgtcctttagggctcagaaaagatggtataatacataaaataagacagtttttaagattctgtggttaaacaaatatatacacagtaaagaacttaatggagttcagattatgcattctaatgttcttattttgcttttataggccatttgtgtaggaccagaaaacatgcagataatgtatccagctatatttgaccagttgttggcatttgtagaattttcctgtaaacctccacagtatggacagctggaaacaaagcacattgcaaatgcaaaatataatcaggtaatttactgtaaattttatttactttgtaagatttcatggcttataaatacagatagttccacttaagatggactttgattatctcggaaaaggatacttttcac

SEQ ID NO: 11176 - DNA, 1026 bp, Homo sapiens
ttaaaagattcttgttgattgtgttccattcctctaaggcttatttcttgtttttccctctgttttgaaggactagccctaaaccttgttcttcctctagcatgtggatgtaccttatattgattgtataaataccagaccaacttgagctgtcttctctaaagactcatctatcccaacctttcttcattggtgattattttcatttttctttcagccatctcatacaaggattcttaagccttggatactacaagaattttctctcaactgtacttactactcaaattgtcatcctctttcagctttcctttatttccatatcccttaaacagtttgtggccttcacctagtcaccactcactctttgcctgttgtgtgttggcttacgtccatattgctccacagaaactgctttcttaaacttacaaaagaccaaatcttcacatcctcagtccttctctaatgatttatcttccctatagcatggtactggccttctgaaacctgagccttctgaaagctctttcttcccttgactttcacgatacttttctctcctcactgcttacctcaccaaaactatcctctcactttatttattgagcatatttttgaagcatctttctacaaggtgctagcaattttaaaatgaataaaatgattcttagatttaataattcaatatggagaataaagaaaggcaaacaagtaatactacagtatgttaagtgctaggtaaagaccatagtggaggctttgcattcagatagcctgacttcgaatagtccactgttactggcttactgctttatgacttttggcaaatagacctatctgagcatgtttctcgtctttaaaagaaggataataccaatactacttacatgtcttacctataatgagagaatccattgagatacagcatttaatgatgcttgccaagtagtcagtgctgaataaaaattgagttcctctgaaagacaaaaaactaagtcaactgctgaggggatttgggcaagaatt

SEQ ID NO: 11177 - DNA, 1019 bp, Homo sapiens
ctttgtactactttttagacaagttattaaacctttcagtgactcatttttcctcatctgttaaatgtcaataataatgctccctaacttacagggttattgtgaggattaaatcacttaaaatgaatgaatgcttagaatagcacctggcatgtaagtactttaaaatgcttgtttccactattattgtcattaatgttttttctttcttttaaaaaaggtgacattatccatattaattcccatgaaacaactattattttaaaccaaaattctaaaggccaaaactctaaatgactgagacttggaaatttagctctaaatttggaggtttttgtttgtttttgtttttcttgagacagtgtctcgctctgtcacccaggctggagtgaagtcgcatgttcatggctcactgcggccttgacctcctggcctcaggtgattctcccacctcagcctctcttgtagctcggactataggcatgcaccaccacacccagctaatttttgtattttttttgtagagatgggattttgccatgttgcccaggcttggagttatttttaatggctaaaaataataaagcttctaaattcagctctcaagtaacacagtatcagtattctaagttatggttattctagttacagatttaagctttctactccatggagtagttgatgaacaccctagattgagagtcaggagacctgtgacctggtcctgacttgctgtctactttctgttgatcgtgagctggtcctttcccatcactaggcattattttctttatttgaaagacaaaaagaaggccaaccggagtacgtaatcccagcattttgtgaggccaagttgggtggattgcttgggcccaggagttcaagaccagcctgggcaacatagtgagactccgcctctacaaaaaaaatttaaaaattagccagatatggtggcatgtgcctgtagtcccagctacttgggatgctgaggtgggatgatcacttgagcccaggaggtt

SEQ ID NO: 11178 - DNA, 1034 bp, Homo sapiens
gtggtgtatgtgttaatgatgtactttttaaaaagaaagaagagatatttcaattcagtcagatttattagtctggtgtttttgcaccctttttcaagtacaaaatcgtactagaattttatgcaagatggtactgtaacattccatattatctataaccagcctttgttaacaaagggaactgatatacttgtgtgtataataaatggtacagttctgtataaaatagtgcatttatttaaattttaaaagtattgataatgttaaatgcttaaagctctatttattattaatacaaaattgtttgcttacatttttacttataatttgccttcatatgtggcggataagctcaccatatgatcatgcagttagcttcatgcttattttaaatgtattattagtgaccattaaacatctgaccagtaaggtcatgtgaacacagcagcaaatagtttatgatttgctgattttggagctttgaaatataggttcttaatacattgatacatattgtagcactatgacttcatcatacctcatttctttaaacagctctccaagctttcactgaagtctgtctgttttttatattggctgtctggattttaaagacttttcatattttatatttctactgattttgtttcccctaacaacatttgtcactgtctttgaattatgacccaggcaagatgatttcagattttctaaaatcttgcctgtgaggttttgttcatatcagtgcttcattttgtaatgtcttctcaagaaaaatacctatgttaactcacaagtataaaatatgtgtgtattataaaacaatgaaaagtgtatttttggagatagtcaagcatttagaagtgcagtgaacttgctgtcacggagtaaaatgctaattatgtttcactttcctagcctagtgaaaaagaaaagtgctcttgagtacaataccttaattatttcttaaaatactgactttgacctagctcactgtattttttatttaatggattatggattacagtattttt

SEQ ID NO: 11179 - DNA, 1052 bp, Homo sapiens
agatgctgtataggaatctggggacaaagggacagataagtggtgtagacaaagaggctggaaatagggttatgggctagatcatgagtgacctgtaagcattaggagttttgatttattttggaataagaaacatttatggcttttgagaaggaaaattacacaagggaaaagaaaggatttttattttttatttttatttttggagagatgagatctcactatgttgcccaggctggtcttgaactcctgaactcaagcaatcctcccggctcggcctctgaaacttctaggattataggcgtgagccactacgcccagccaggattatgtttttttatgggagggatgagaatattggtaggtgggtagaggataaatgagagagaatatgtatatgtgagattgaatatataatagaaaaaattgataggacaagtcctgcgttattactacattttatgaggaaaatctatatattagaagcactttaaaggtatatttgctattctagctgtggaaaccatctgaaaacacatttgaaagtgctttgaaacaggggtcaacttctctgcaaagggccagagtatgtttagctttgcgggccacagatggcctctgttgcatatgctgctgggtctccaccttcctcctccttttcttcccttcctcttccttctttttcttcttctctttcttctttctctttaaaagcataaaatcattctcagctcttgggccatacagaaacaggccataggccagatttgacttctaggccatagtttgccgaccctccattttagaacttagctttcctgaaagagcatttgggtctctctctctctttccctttctctctctctgtctctctctctctctctttcagtaagtgaagtaagaaataggtctttcttgaggaacaaaaagctgaaataatttcatgcatttgaatatgacccttgacctgtttttgtccatcatcactcagatttgtggctgcaaccaccaaccaatttggtgccataggatatagcataatttttcagcaa

SEQ ID NO: 11180 - DNA, 1303 bp, Homo sapiens
ttactataaatcacttgctcatctaacaggaattgtttacatgtagctgatggtctaatttttaaatgttcagagtcctaaaattatgaacagattatatgtcaaaaattaatttgtaatatacaaggtatattatggttgaactagtttttgtggtcttaggctggaaattaaacacctagtatatagaagcaataatatttcaagtatacatattcatttatagcattatttctatgggaaaatgcacccagaattctaactaggatcttcaagaacaactctccccaggtcagtgcatggagcagaaagagaagggaaagggatagaatgtcttcatgactttaatcctagtatttgaaaaaaaaaaatcaaaccttgcacctacaaatttctgtcttgatccagaaagtcattagcataaaaaagataatagtggccttctcacctaacgccaccaacatggtgttcaggcgcttcgtggaggttggccgggtggcctatgtctcctttggacctcatgccggaaaattggtcgcgattgtagatgttattgatcagaacagggctttggtcgatggaccttgcactcaagtgaggagacaggccatgcctttcaagtgcatgcagctcactgatttcatcctcaagtttccgcacagtgcccgccaaaagtatgtccaacaagcctggcagaaggcagacatcaatacaaaatgggcagccacacgatgggccaagaagattgaagccagagaaaggaaagccaagatgacagattttgatcgttttaaagttatgaaggcaaagaaaacgaggaacagaataatcaagaatgaagttaagaagcttcaaaaggcagctctcctgaaagcttctcccaaaaaagcacctggtactaagggtactgctgctgctgctgctgctgctgctgctgctaaagttccagcaaaaaagatgacggccgcgagtaaaaaggcttcagcccagaaggttcctgcccagaaagccacaggccagaaagcagcacctgctccaaaagctcagaagggtcaaaaagctccagcccagaaagcacctgctccaaaggcatctggcaagaaagcataagtggcaatcataaaaagtaataaaggttctttttgacctgttggcaaatgtaaaaaaaaaaaaaaagataatagtgagtattttattatttcaggaaggtaaaacagatcttttaaaatggctcgttgtatcattatgttctcatttagttattttcagtatttactttttctttgtaaaataaacgtgaaag

SEQ ID NO: 11181 - DNA, 1033 bp, Homo sapiens
taccacattaaggctcttggactttattctagggtagtgaaaagcaattgaggatgattaagcaggatagtggtattgtcatgtgtttatgtgtgtagatttctttagcagccatgggggaaagtgatttgaaggagacagctgggtgcaggcagaccaagtaggagattggaagtatcccacagagataaaactaatggatgaaatagggaagtggtagtgggtcagagccagggacaaatttgagaaatatttaggagcaaaatggtcggaatttagggattaattagatgggaagatgagagagggaaacaaatctgagaagtccctagtttctagtttgcatgagtaggtagctaatgtgacacaaaaatagaaaatacagaaatagcaaatctgtccactcttctctagcccaccacccaacatctacctatctcctctttctcagcagacaaccctgcctcctctttcatcaggaaaattgaggacatcataattatctctcttaactagctgctgtaacatgtacctactctctgtctggtccctcacccatccttatctctttccaagctctcaaacattgagtgatctttcctggctcaaggttaaagcccaccacctgtgcatcccacctgcttctaggaccttgttccatgcattacttccttgctttcctttattctccacttcattcattattgctttatcaccttctcttcaaaactttcagaatccttgtctatactcactgtaatcacttccttacttctcaacccattgcagtttgactaacaaactttccaacacacatatgtacatacatacatacaacccaggtatctgaatcaaatgaaattttttgggcccttaaagtttcttcttttagatctgtggttccttgacggaggcactgtgggacatcaccaaatattttaaatatttatgggaaacactgatacttgatatctttcaggccctatgcaaactgcaagttcaaagcagtacagtttcaacattagattaccct

SEQ ID NO: 11182 - DNA, 1050 bp, Homo sapiens
gatttgtaagctttgaaaggcttgaagatgcacagaaagctgtggatgaaatgaaaggagctcaatggaaaacaaatttatgtaggtagagctcagaaaaaagtggaacggcagacagaacttaagcgcaaatttgaacaggtgaggcaagataggatcaccagataccaccgtgttaatctttatgtgaaaaatcttgatgatggcattaataattaacgtctccggaaagagttttctccatttggtacaatcaccagtgcaaaggttatgatggagggtggtcgctgcaaagggtttggttttgtatgtttctcctcaccagaagaagccactaaagcagttacagaaatgaatggtagaattgtggccacaaagccattgtatgttgctttagctcagcgcaaagaagagtgccaggctcacctcactaaccagtatatgcaaagaatggcaagtgtacgagctgtgcccaatcttgaaatcaacccctaccagccagcacctccttcaggttacttcatggcagctatcccacagactcagaacggtgctgcatactatcctcctagccaaattgctcaactaagaccaagtcctcgctggactgctgagggtgccagaccccatccattccaaaataggcccagtgctatccgcccggctgctcctagaccaccatttagtactatgagaccagcttcttcacaggttccatgagttatgtcaacacagcgtgttgctaacacatcgacacagacaatgggtccacgtcctgcagctgctgctgctgccactccacattataactatgctgcgggagttcgcagtcctcagaaacatcttaatgcacagccacaagttacaatgcaacagcctgctgctcatgtacaaggtcaggaacctttgactgcttccatgttggtatctgcccatgctcaagagcaaaagcaaatgttgggtgaacggctgtttcctcttattcaagccatgcaccttactcttgctggtaaaatcactggcatgttgttggagattggtaattcagaa

SEQ ID NO: 11183 - DNA, 1046 bp, Homo sapiens
ttttacatagccactttgctagtctgctatttcaaagaattttttcccttgtttggtaaaaaaaacactcattatttataaataaagatgattttattttctcatttataagccctatggatttatttttcttatatttttgccctaggcagaatttccagtacaaaattagtgaaagtgccaaccttggcattcttgttttccattgagaaaggaatgctttcaggcccctcctcccttgaagaatgatggttgttttcagtttattatagatactctttaataggtaaagtgcaaatcttttgtattctttgcttacttgaagttttaatcattaataggtggttgaatgttaccttctttttctttttgaatctgttgatattatgttttttcttctttactctgttaatgtgatgagtaatatttatagatttcctaatatttaaccttctttgcattaaggctatcttcgttgtattttgtgtgtggtgtgtgtgtgtgtgtgtgtgtctgtctgtctgtatacaccgttggattcagtttgctaatatctagtatttttgtctttaaattcttgggaaaaaaacagacctatgattttactttttaataatgtcgctgtctatgttttttttttggaggggagggtggggagatggggcttcactttgctgcccaggctggtcttgaattcctggactcagagaattcctgggctcaaacaatcctcctgcctcggcctttcaaagtgctgggattacaggcatagagccatcaagcctgaccacgaatctgttatactagcctcacagcgtgagtgaggctattttgtggaagattttgaaactttgaaatatttctttcattgagagttcagtagaactgtttatctgagtctaattagtttccttgtatgaataatttttaaactgctaatcagtagttaatcattttattagttacaggattatttgtgctgtgtatttcttctcatgtcagttttgataaattatacttttctttttttgagatggagtttcgct

SEQ ID NO: 11184 - DNA, 1045 bp, Homo sapiens
cacctcccgacactactgcactggggattaagtttccagcacatgctttttgggggacacattgaaaccacggcatatggtatgtatgtgtgtgtgtgtgtgtttctttccttcctttcaacagggcagcacccttctaaaacacccccaaatactccctaaatgtccttggtcagcaccttattctcacaagtcttccataacttaactctgatttttcctgcgttcatctataagtattcactatgtcattaaagcctttataatttgattgtctccttaatggtgactcagaagaaagcttgggtttatgctgatacttgtaatcgaatccaaaatgcctgaaatcctgtatgaaagtttgctattaggttggtgcaaaagtaatggcaaaaaccaatattacttttgcatcagcctagtagatacaatatgaatgttgcctggggttattgttaatgtcttagtaacagcagcttacattcacagtgtgttcttttttaagagaggtcatattggtgtcacattacagatagggaaaaagaaactcaaaacttagaaacttgaggtctttttcccaagatcacatagctggtaaatggtggagccaccagggtccaaacctgtgctggaaccatcctgcagggctacatcaggatgccaccttaaaaaaaggttaaatgcttacattgcatgttattcattctgtttaaacttccaaaaaactaggaagaatgattgccatctttgacctaataagagtttataaggtcagataaaagtctgtatttttttgttgttgttgttcaacaattatgtgctaacataaaattgctgttttattattacctcaatggattatttgatgaggagactcatggtggagctgcctctttatatgcattagaaaaagcggtttgggtagaacttgcctgtagagaagaaataaatttaaaaagaaagtaaaagaaaaacataagaaaaggtagtttggggagaaatattttttaaaatcctaaattggaatgaatactcttgctaaaat

SEQ ID NO: 11185 - DNA, 1042 bp, Homo sapiens
cgtgagccaccgcacccaccattcttatttgagtagattttaaaaatccactaaagtttatggaggctgtttaggaaaaactctcaaactgtttttcctctactctcacactacaacaatcaacacagaagacttccgtgaccaaatgtgtgagagtttttccccaccaacaagcagcagacaccaggaagtccaggcctccagaacctctgaccaaccagattcaacttggggttcttatgactttccttttttggttcaattaatttgctggagtggctcacagaacttagggaaacacgcttactggtttattataaaggatattacaaaggatacagatgaagagatgccaagggcgaggtatggagtaaggcacgcagagcttccatgccttccctgggcaccacgctccaggaacctctacatgttcagctgtccagaagctccccacactctcttgggtttctgtggaggcttcattacataggcatgattgacaaccatgtagaaatgtgattgaacaaaaagggtatgatctcagactaacagactgagtggaggaatccagcaaggcttgtctgtttaaattcttcttggcctctctgtacagcattctttccttgaaggtacggggcaagaccctctcaggaatgagagttttttgacccacaatcaggttagagtcctgcctgggcaagtagaagaaaaacaggagaagttcagagagagagattctgttttctagggtctgctcctgatgcctgaagtgccccaaggctataacaaatgactgcaccaagggctattggaagttatgagccaggaaccatggatgaatgcctacacacacacaaaatcataatatcacagagaccaactttcacttttctcctgctgttgtgctatgtagaatcatcggtgggaagaaaagcattttgctatttcaaatgtcctcatatccgaactgatcatggataatatgttgttcaggaaatctgtctggctcattggattaaagtttggatcttacattttctat

SEQ ID NO: 11186 - DNA, 1050 bp, Homo sapiens
atctctggtagccttttctaaaggaagctctgtgctttcccaaggctgggaggaggtaatggccctgcctagttccatgttgctgattctagacaccttctttttattccttgtacagaagcccttcctcttcaggggtctggccacctggctggatcttgccctctcttgttccttgcaactcccatgcatagctctggctcattcctccacactcatggaggccttggatgcctttattagacgctcctcactaccaaggccagtggccttcaccgccacacctgagttcttgttatccgaggaaactcctcccctgctgacatggagcagtgctctgttactgtcactgcctgtcctacgggtgtgcccagtgtacttattctgcaagagagagacctacccagtctcctgccttcataccgttctttcctaccatctccacaccatgcattcattagttcagccatttctcttgaagttattttgacttccatccaaactgatcactctctcctctgaaccacttctgtggctggcccatatttctcttagtacctgttggtttacagctgggaggggattacttaggatctggttgggtccgtagcacctagtaaatcccttcacatactgctagcatggagggcatgctttgttgagctgatggaaactattgatgggtcattaacatttgaaacatattagtatattcagtaaaaatactgacaaaggacgcaaatctatgtcccccttgaaaaaaattatgcagccaggcatggtggttcacacctgtaatcccagtactttgggagaccgaggtgggaggatcacttgaggccaggagttcgagaccagcctggccaacatagtaaaaccccatctctactaaaaatacaaaaattagctgggtgtggtggcagacacctatagttccagctactgtggggctgaggcatgacatttgcttgaacccaggaggcagaggctgcagtgagctgagactgtactactccactccatcctgggccacagagcaagactgtctca

SEQ ID NO: 11187 - DNA, 1047 bp, Homo sapiens
actataggtgctcataaccatgcctagctaatttttgtattttttgtagaaacagggtttcacatattgcccaggctggtcttgaactcttggctcaagcgatcctcccaccttggcctcccaaggtgctgggattataggcatgtgtcactgtgtccacatatatatatatatatatatatggatatatatatataaatacacatatatgtgtatatatatatacatatatgtgtgtattatatatatacacacatatgtatataaagacacagttcaagggtcaagtcttttacaaagctttttcttagatgaacttcatctctctccctgttaatggatcacttcctcctatgtgacagcagcatatatacttttatattagcatctctaatattttattgcaatatttgtacatggaccacaatgtgtgttacccgtcgtccataaaataggcacaaaaattgaaggtaagcatttagaccttgtatagcaatttaacaaagtaattttatgactctggaatctaataataaaaattggagattgcatttttatatcttaatttttatttttttttctagttttaaacaaatttttatgaaagtatccatcgtgaaggatttacatttgaaaaaactggtcctttattacagatagtttgggaagcactatttattattttttcttatctgtcctctgtgctaggctgtaagtacctaagggcaaagtccctcttgtatgaacagtatttttgtatcaacagtaatgaatttgttgttcagaacaatgacactgtgactctcataaaaccattttcatacctatcacttgtccctttttaaagactgaattctactgtgttttatccctcagtcattgtacttatcattatcatactgtaattaacggtttatggttctgtttttcccacaaaaccttaaggatagttgaacccggctcttaatcacttttcccttccaaattccaaccacagtgcttggtataaaatcaatgctcagtaagtgtcattgattgaatgaacaa

SEQ ID NO: 11188 - DNA, 1024 bp, Homo sapiens
ttaatttctcttaggtacttaggagtagaatagccagatcacatggtaggtctatatttaaatttataagaaactgcaaactgttttccgaagtgatggtaccattttacaatttcaccagatgtctatgagagttacatttgccttacttcatcaccaacatttggtattgtgggtcttaaattttaggcaatctagtgactgtgtattggtatcttattgtggcttaatttgcattttcctagcccaagtttactaaaatttttctcttatgttttcttctaaaagttttgtgttttagctcttacatttatgtctgtggcccattttgagttaattttggtttatggtgttacgaaatggtttaattttttaaatatgtggatacctgttgctctagaactatccattgaagacttccctttacctgttaaacctttttcaaaagtcagttgactatgtatgtgtggatctctttctagattcttttctgctgcattgatctgtatgcctctctttatgctgagaccacactttattgattctgtagctttaaaataagtcttgaaatcaggtagtatataaatccttcaactttttaatctttctcaaaagtgttggctgttcaaggtcttaatattttcccatttgttttagaattagctcattgcactcaccacaacctttagttcagtgttgaataaaaagcagtgtgaattagaagagatcctaatctcaggcaatacatttatcgtcttttaccattaagtattgtattagctataggtttttcatacatccccatcatcacaatgaggaagtttccttctattcttgctttgctaacagttttttttttcctgaatggatttgaattttgtcaaatgacttttttttcatctattgatataatctcactgttctactttattccgcagacatcaccttagcaatataaggaattatgtcaggtgaaaatatcaccagctttctttcgccctaaaatgcataataaaatggaggt

SEQ ID NO: 11189 - DNA, 1075 bp, Homo sapiens
aataccccaacatgaaaaaaaaagcaaagatattttatggaggagaaaagctgtagtttcaaatacaccatttaaaataggttaatattcaaacatgttttagtagaagttaataaaagataccacttgactacagatctctaaggctctgaccttgtttttttttttaaaaaaagtaccataagttaaaagcatctgaaaactaccaatctctatatgtgaaaaaagaacctatttctctttgaatataaaaatagatatagattgtagaaatttagaaaacgctataaatataaaaagaaataataattacccatattaacactaactacttttaaattttaggctctatcttttcactatttatatgtgtatacatatacttaaatatatatgtgtatattttacagaattgagatttcattctatatggcttggaaaggtgccattttcatatagaatattattagcatttctcacatctggaaataggctacctcatgactacatagtactttactatgtgcatggccatgttagttttctgttgttagacatttaaatctatgattttttttcttatgctacattttttgaagtagaattatcaagtcagagggtggcctttgaattttgttagaatttcatgtcttgaattaaattcttactgttttcttttctggagtaatgatggtcatggttgtcatgtacaaacaggtcatatattcgctgaaaaattaattggcttttattagcagtaagctaacacatatagtttagtatacttatataacagtagtaaataatataacaagaagaacttttccaaagcattttagtgcagtgttgcagaagaattaaatggtattctggtggcctcaaggggcagcttaattattgatagggcctggataaataagaatagttcaagctaacactgctagctggttctcttgggttttatcaaccctatgactaactttttattttttaagaaataagccaaaactaaactatcattttttgcaatgatgtaattttctgaaatattttagaaaatatttttaatttgtat

SEQ ID NO: 11190 - DNA, 1027 bp, Homo sapiens
ttgtcagtggaaaaactgaggctttgcaaaattatttaacttgtacacagactgtaacaaggtagtttgaacacaggcacttcaacgttagagtttgaactcttagccagtatactagatggcctagaggtggtaataaattaatgtattataaaatcaaaaggaaggaaagacctaatctctttccttgggggcaagttgaagttaccagaaagtttttacagagttacatgtaggattgtaccagccaaagagaaggagggagagtctaggaaagaggaaatggcttgaggaaagtacagagatgggaaagcggggcctgagacttagcagtttaggaccaggctgaaggatggggtgtgggatttgtggaaagtgaagtagactagttaggcagaagttatggatgagttaaaaaaaattgaactctatcctaaaataatgtagcaagcctttcaacaattttaatcagaggaagcctaattagattttattttagttctgatgacctatagaaaaaaattgatcagccagaattgataagattggtaacttcttcaaggaaaagcagccagtcttagaggaaccctagatttctgacttgagtgacattgttgtcctagaagcattatgatttcattataacccttttaaaaaataatcttctaacatgtatcaggagtcttaaaaatgtttatacttttatgctagtaatttcatgtctgggaattggcttaagcaaataatacaaatgcaagatatatgccttttgaccagcatttatgatattagttcagagtgcttaaaacatattggtgaaattgaataaagaaataaatgattgactagttggtagaaaatagtggaaacattggaaacagtacacttaaatttaatgttaatgtacatttactaggtagttgttatgaatcaaattgtggttctgaaaattatataattacatgtaaaaatgtatcgtaacttaaaaaaataggaaaatatacttagacctatgtttaaataaact

SEQ ID NO: 11191 - DNA, 1071 bp, Homo sapiens
tatgtcatttgaagaatgctatataaatggaattgtatggtatgcaatcttttgagattggcttttttcactcaccatcattcccttgaatatcttttgatctcaagaaaaataaaaattttgcatctgtttttttaatttggacagagggcaatttaaggcatatttgttttatggttaagatccaaaatttgttactgatactagagaaaaaaatcgggattaccgtcagtgttagtttgaagatttgatagtgccagagagcacatggggaaattaaatgtattcacatactatttattgtgattttacttgattttttcttaagtaagccggtaaagcataaacttcctaatgttctgagatggtgatttttttccatgttataaatggtattaacatgttacaaggaaattccctcagtgtcatctatcaatgccaaaatcatattgaagcaattgtggaggatattacaactcaaggagagattttatatatcctattgcaaagtttaaagtatttttttttgactgtcattatatctctagtaagaggctgtggaaatgaaaatccagtgttcagtttttctttgtctgaaaaactgatgacagcaagataatgtttttctgtatctttttaaacagcctctattttctcctgccttgataatatgttgatgactctgttcagtctagatattaaaatggtcttgatcatttgaagcctcatagagccctcacagataggataccatgccttcctaacaaccctgtttctcgctgttttctggtgtgttcgttgtagaatgtgagccaatagaagcaatagccaagtttgactatgttgggcggtctgccagagaactatccttcaagaagggtgcctccctgctgctgtatcaccgtgcatctgaggactggtgggaaggcaggcacaacgggattgacgggctggtgcctcaccagtatatagtggtgcaggatatgtgagtagtctcaactttgattgcctgagtgctcccaatagaggactccagccattgttcttaaactgaccttggtcttgtgagaa

SEQ ID NO: 11192 - DNA, 1083 bp, Homo sapiens
ttaaactttagtataaatatttttgctcacttaataatcacggtgaggttcatcacctcttcagtagccttttatctgtttctacatagtaaatagaaaacttgccttctataataaaaacaaaatagtttttctatcaaggtcagtctcagcaagagaaatgggactgggctggatatcaacacatgtgcttgtgtgcatgtgcacgtgtgtgggtgggagggtgcggaggggttgggaagagagattgctcctcccgcagtgctgaaacaacatgccttgttcagtattaacatcttgaaggcagttatggcagcatgatccaggagatcgtcagctctaggatatttgcgatccaattctggcgacttatggatggatccttcacacccaacagctgtctatcaggggtgcttccgagggtcactgggtttcttttagctgcttggctgtgcagctgaagttaggacttttgatgaattaccctctcaatgatggtgtattgttctaatcttctgtctctgacatacccaaggaaccccttgtgtaaaaatcatgtccctctaaatgcaagtggatgattgtgccaataagccaggagagaaggaaacatcttcagtggtccagtggcacattcaaaattgtacaatgacatgacattaactcaaaaatgaagtttgaggttctgggcctttgatggactgcatctattaaaaacaaaaagtggtgtctcatgcctgtaatcccagcactttgagaggccaaggcaggaggatcaaaaaatgcgaatttttatatttttttgtgagatcccatctctaccaaaaaaaaaaaaaatacaaaaattagccagacatagtagtacatgcctatagtactaggtacttgggaggctgaggcaggaagattgcttgagcccagatgtttgaggctgcaataagctatgattgcaccactgcactccaacctgggtggaagagtgagaagctatctcaaaaaaaaaaaaaaaaaaaaaaaaaacatggtcaagatttgtaatagaaattgccatttgaattttggtctgtaagcccaaagattgtt

SEQ ID NO: 11193 - DNA, 1050 bp, Homo sapiens
gttgaaattatattcatcattccaaacccaacaaaatggttacatccttcatgaagggttccccaaacctcccagctggcattaattgttctgttacattttgttttcattaaatcaggctcccttccggggatctagctgtgaatgagacacacagggctcctggtctcatggagtgtacttcctggtatgatttaaaaaaaaaaaaaaaaaaaaaaaaaccactacataagccaacagctaaaccggcaaaataatttcaggtgttgataactgctacaaaaagcaaaagtgaaataaacagggtgatagaatttagagtgtctaggagaagcattttagatgggacagcttgaatgccaccttggatgtggtagcatttgagctaagacctgaataatgagaaggaaccagccatgtgaaaaggaagagaaagacccaagcagaaggaactgcacatgggaaaacaggaccatgctcacgtggttaaagagtcaaacacattcactgtgactgtaccaccataagcaagaagccctggagatgaaaataaaggccagaatgtggacagagatcagattttggaggccaaagtaaggtacttaaaattagccgggcttggtggtgcacaactgtaatcccacctactcgggaggctgaagcaggggaattgcttgaacccatgagacggaggttgcagtgacccgagattgtgccactgcactacagcctgggcggcacagtgagactccatctcaaaaaaaaaaaaaaaagtaaggtacttagatgtcattctaagttcaaggaaagccattggaagtttccaaaaaggaacatgacagcatctatatttttagaagatgaccctcaaaaccacaatgagatatcacctcatacccattaggatggccactctcaaatgatcaaactccagaaaataacaagtattggccagggtgtagagaaactgacacccttgtgcactgttggtgggaatgtaaaatggtagagccactaaggaaaacagtgtggaagttcctcaaaaaatta

SEQ ID NO: 11194 - DNA, 1020 bp, Homo sapiens
caccccctggctgggcggaccgggtgggggtgggtacgagccggggccgccgccgaggagcgcgtcccgagtgcgtggccggcggttgcttggtgtttcatcacccgaattgccacgaggcttcctttaggggagggatcgggggagggatgggagcaaggctagcagaggagggtcggcatcgcctgtggttccgaagcccgttagtcatcgttgtagcgttatcaactgtggagacctcaaacttgattcttcccccacccctggacaaaaaggaaaagtgttatttctgtgcagtaattggccagcacggacgctccatttcttctcaaaccttcctcaccatcctgcaggactagagaagcatgaggtttccctgtaaccagaaaaacgagtactttttgaaagtgctaattagttgtggcgggcgggggttgggggagagttacgttttattaaaccgacttgtcagcgtggtgttaaaaggctggaaagattcagtcgtagtatttgaaacagtcttcagtaggtgtagaggaatttttccaaattgtttgattcttaatggctatccaggaaaagttaaggcttaatattttaagtatgttgcttgccttcccccaagaacctttgcaagatgcataattgtttaccgtattgaaacattttttggggttttgttgttgttgttttgagacggagtctcgctcggtcgcccaggctgcagtgcagtggtgccatctcggctcactgcaacctctgcctcccaggttcaagtgattctgcagcctcagcctcccgagtagctctattacaggtgcgccccgccacacctggctactttttgtatttttcgtagagatggagtttcaccgtgttagccaggatggtctcgatctcttgacctcgcgatccgcccgcctcagcctcccaaagtgctgggattacaggcgtgagccaccgcgcccggccttccactgcatattgatcgtccaaatgccttctatgtgggggattctt

SEQ ID NO: 11195 - DNA, 1026 bp, Homo sapiens
tgcctgtaatcccagcactttgggaggccaaggcgggcggatcacgaggtcaggagatcaagaccatcctggctaacacggtgaaaccctgactctactaaaaatacaaaaaattagcccagcgcggtggcgggcgcctgtagtcccagctactcgggagggtgaggcaggagaatggcgtgaacctgggacacggagcttgcagtgagctgatacggtgccactgcactccagcctgggcaacagagtgagactccgtctcaaaaaaaaaaatcagatttttaggaattacacattagtggagtagttagcagagcccatttttctgagaattaggctctaacttttagttgtaatttagataagttccaaaataagtttttaaacatttaagcttctttgcatgattttatccatttacgttattcaggataagcatctatttgtttatcaagtaatgttttctttcaactttgttttttgtggcagatgtttataaattcttctgtgggatcagagggcacgcctattacaaccagaaaactacaagtataacagcgaggatggatgaacaggctctattagggctaaatccaaatgctgattcagactttagacaaagggtaagttactctgctgaatcattttttaatcatgtcaccacagattggcattagaggacttgaataaaaatgcacctggcaaaagtttactttgggtagaaatgaacagaaacaaaaaaatttgaggtatttgaatatattttgaatatagaaacagtgagtgttgtgatttattttctgtttacttggccaaacaaaagtattaaaatctcatatgattcaaggcagatctttatgcaacatcagtcattatttctaattatttaaaaattgtaatgcaaaggattcgtttaagagactttccatagcagcagacatgtgtattttattttctctttccttggcttgatctatacaagctgttttaacacttaccttaatgattttttttttattttaattt

SEQ ID NO: 11196 - DNA, 1059 bp, Homo sapiens
tcttgaaatctttcatttcttaagttccagcatccaatttttggatgaaagaggcattttctttgcctcttaagttccagcatccaatttttttaaatgtgccatgatttctttttcagaaaattaaaaccaatacattattagtggttttaatacagaagctctgctttttgtcagtaaaaatgggttctgtcacatacgtgttttaagcatccaggtccaggcataattcagtatccatttagccaatctgaataacaatttattaggatgaaagggaagaaatcttaaagtgaattctgaaagcccttttgttgcagttcgggagtagtggaaacttaattcagtttggtggtgagaagaatgactgtctgccaaccccaattgctcagttgtctatctgtaattctctgttttttacatgggcaataaaagttgaactgactcttgtcacatagagtcagtcaaccattagaaaaaaggtatggggtagaactaggtggtgaaagctaggacttgtttgtcagtgttgtagaattttgtttttttaattgttagtaatgcatagattcagaatacaaaggctttgtttaaaaactaaaaacttccacgttatctctcctctccttcctctcacccctgccccgccccccgcccttttttttttgagacagagtctcactctgttgcccagcctggagtggaatggcaccatcttggctcacagcaacctccaactcccgggttcaagagattctcctgcctcagctgggattagagtagctaggattagaagcacacaccaccacgcctagctaatttctgtatgtttggtggagacggggtttcaccatgttggtcaggctggtctcaaactcttgaccttgtgatctccctgcctcagcctcccaaagtgctgggattacaggcatgactcaccgcgcccagcctcctcctttttaaaaaataaaacactcgtctttggcttaaaacctgttattatttaaagaaaatggtatgtcatgacatttctagcagctgaaaccacctctcccctct

SEQ ID NO: 11197 - DNA, 1032 bp, Homo sapiens
tataaatagtgacaaaaataaaagtacgaaatatgtaaatgcggaaaaatacaggagaactggatatttacatgaattttaaggtcttttaagtttttaatttttattattatactttaagttttggggtacatgtgcagaacgtgcaggtttgttacataggtatacatgtagccatggtggtttgctgcgccgatcaacccataagttttttgaatgaggattttaacctgtatcatagggtgaagatgaagccatgtttgtagaatatagaaaacaactgaagttactgttggacaggcttgctcaagtttcaccagagttactactggcctctgttcgcagagtttttagttctacactgcagtaagtttgtcattacttttgtaacaagcctacttctttcttttgctctttgatatgggtcaaaataaatgattcatatgacttattaatccatgttacttattgagatcttatgtgtatctctggaaacaatgcacttgtcttcttgatttatcttgatcctttctacctttgtgatgtattgcctgggaaagttaacagttgctatgactttttaataattaaaaaggcttttgttggtgtcttaccctgtgcataatttgctgtatgaaaaatttatctttaaatctcactgacatattataccttggtaggaattggcagactacacggtttatggaagttgaagtagcaataagattgctgtatatgttggcagaagctcttccagtatctcatggtgctcacttctcaggtgatgtttcaaaagctagtgctttgcaggatatgatgcgaactgtaagtatactggagataattttgaccataaatttctgttttcagtataagctaatgggagttccttaattgttagagcttagtatatgttaataccggggcattttgatgttgcaataaataagaagaggtttcctaactttttcctgatctagctggtaacatcaggagtcagttcctatcagcatacatctgtgacattggagt

SEQ ID NO: 11198 - DNA, 1050 bp, Homo sapiens
atggcaacttgatcctccttgtatgatagtttccccaaatctaattttcacaatacttaatgtcaatttccgctttctcactttcccacaacctggtaaaagctagatttcataattgtaatttactacgttaaaacaacagtttgtatttttctgttttttttctttttttacttcaacccacttagtccatctgcctgttacctttccttcctctatcccttctctggagttaaatatttctctggaaatatttatttgaatttccctggcagtggccagggtagtaaagagaagagctggatcactaaacaagaattgaatatatagaaattcttaaacttgtttttcacaggctttatctgagtgtgcagtgacactgaaaacaattcatctcaaacgggtaagccttttagtccatgccccttcattttcatctcacatgtggtattattatcttgttcttgaaagatgtatcttgtgtaaaatttaacttttgttttgactttttggatgtggggaaaggggatgaatgaaagtagcagtatccatttattgtccttcatgttttgggtaacatgttttggtttgactaaggatgtgaaaaatcttagccagaatttcaagattcagttttcatgatcttgtaggcttcttcactaccagattttttattttatttttatttttatttatttttttgagactgagtttcacttttgttgcccaggctggagtgcagtggcatgatctcggctcacggcgacccctgcctcccagattcaagcaattctcctgcctcagcctcctgagtagctggaattacaggcacccgccaccatgcccggctgatttttatattgttagtagaaacagggtttcaccatgttggccagggtggtctcgaactcctaacctcaagtgatccgcctgccttgcttggcctcccaaagtgctgggattacaggcgtgagccactgcgcctggcctattttttatttatttacagggtctcactctgtcactcaggttggaatgcagtggtgcaat

SEQ ID NO: 11199 - DNA, 1048 bp, Homo sapiens
aagttaaataccatgaatttgaagcaaccttaaattcctttgacagataaatggataaacaaaatatggtatatacatacaatagaatattaagcctgatttataaaataatcctgtcatatgctataatgtggatgaacctagaggacattatgctaaatgaaataaggcagttattaaaagacaatgctctatgattccatttgtttgagatatctaaagtagactcaccaaagcagaaagtggtggttgccaggggctggagtaggggaaaatggggagttcttcagttaagaggcaaaaagcaagcttgttttgcaagatgcaaaagttctagaaacctgttgtacaacagtgtgcatgtagttaatgcttactgtactgtacatgtaaaagtggttaaggtgataagttttaagtgtttttaactacagcttttttaaaaaaagagctgggcacagtgacttatgcctgtaattccagcttcttgggaggctgaggtgggagtgtcccttgagcctaggagttggaggctacagtgagctatgatcacaccactgtactccagcctagatgacagagcaagaccatctcttaaaaaaaaaaaaaaaattaaaaaaaaaaaactggatacgaattacaatggatttaatacaaatacatttgttctttttctccctcttttccccaccccccaggagttttgtcaagcgcttcagcagcctgatgctaaagtttttaaaaattacttaaaggtaggtatttgtgaagctcacgtatcttcatacaattaggtaatgtttgagagccaagagagaatacatacctgcaattatagatgtttatgtgaagtcccttttaactaagctcttgaaaaagagtataagttaggtaagcacactgaatgtgtacacctttgagtatattggtgagaaaatgccagttttcttttacagtttcatgatgtaattaaatagaaactagagggattaggagaataagaaatgttcaagaacagttgtccaaattaagttgaaaagaaggggct

SEQ ID NO: 11200 - DNA, 1042 bp, Homo sapiens
ctcccaaagtgctgggattacaggcgtgagccaccgcgcccggccaattttttttttttcttttttttttttttgcgatggagtcttgctctgtcacccaggctggaatagggtggcacgatttcagctcactgcagcctctgcttccgggttgaagttattctcctgttgcagcctcccgagtagctgggatacaggcacctgccaccatacctggctaatttttgtattttttgtggagacggggttttgccgtgttagccaaggtggtctcaaactcctggcttcaggtgatctgcctgcctcggcctccaaaagtgctgagattacaggcatgagccactgctcccagctgaaacttagattttttttgtcatattattgtattttattatagtatgtatagtgtatactaacttacagggaaaaaatgtaaacaaaatgaaggtcatggggaaaatggcatcttgctttaatcttcaacttaaagttactcttaataatccatttataccattatgtcaaattttagtcatccctgcagaattttagacgaatgaaaacagacaaggtaacaccaaagagttaagcacagaaagtgatattgattaaaaagttgaaagtaaaaatctacattggctagaactgaacattcagatccgtctctccagaggaaaatctaacttgaatcataatggttcatattttgacttgttcataccatatcagttagcaacttatgacttgaaaatactttgaaacttaagatatttatattgaactgtttatacacttcatgtcagtaacagataatgggtgatcttacttgagactaaaaacagctaacatttgtttcttagctgtgttactcccttaaaacatagttgcaaattttttttttctcttagtataacaagaggattgcctgatccagccaagatgcagagcacttctaatcatctgtggcttttatctgatattttaggccaaggagctactgcaaatgtctttcgtggaagacataaggttagtacagagaaaa

SEQ ID NO: 11201 - DNA, 1049 bp, Homo sapiens
tggtggtattgtttacttaaagtttaggaggaaacaagtttaagtgggaagaccaagagtcaattttggatacgttaagtttgagctgccttttagatatcgagagaatagtaggatatatgaatctgaagctcagggcccaaggtagttttggaagttaaagcatacatatgatatttaatacattaggtctgaatgggagatgagggagtaaggcagttataataagcatggacagctgtactgagaagttttgctgtggtgggaagcagagaattgggtaattgttgaaaggagttttgtggtcaatttagagatcttttaaaatgggagatattaaagcatgtttgtaagcagaaagtaatgaatcagaacagagggaaacattgctgcattaaataagtgggataattacaagaattgatttctggaattggcaagatgatatgataggctctacagcacagatggaaaagttggccatgtataggtgcagttccattgtgactggaaagtaggcctggaaaatggacacagattggccaggtgcagtggctcatgcctgtaatcccagtactttgaaaggccaaggctcttaaggtcctcaaggatcacttgagatcaggagttcaagaccagcctggccaacatggtgaaaccctgtctctactaaaaatacaaaaattagctaggcatcatggcaagcacttgtagtcccagctactcaggaggctgatgcaggagaatcactcgaacccgggaagcagaggttgcagtgagccgagatcaagccactgcactccaccccatctcaaaaaaaagagaaaaaaataaaacggacacagattcaggtaggttgtatttggtaaagggcataagggagtgctggtctgattccttccatttccacattaaattatgaagcagggtcatcaaaactgaggatcaaaggaggtggtggaggtttgaggagggaggggaagatgtgaaatagtcttttcagattgggaaagtgaagttattaggaaaacaaaatagaatttctaagc

SEQ ID NO: 11202 - DNA, 1051 bp, Homo sapiens
aatactattttaggggtcttcaggttctacttacccctgttcttgcaaacatccttgaagcagatcaggaaaagtgttggggttttgaccagttttttgcagaaactagtgatatacttcaccgaatggtaattcatgttttttcgctacaacaaatgacagctcataagatttatattcatagctataatacgtaagtatctctattttcttcttgtatcaacatgttctgttatataatattttcctaagttaggaaaagaaatagaaaagatgcctcagcttcaccaaaagtacccatttcccacatggaaaattatatttaagtgcttagtaaattccttttcacttatttttggagtaaaaggattgataattctaaaatttatagttaaattagcttgtttcttaaactgtaagttttacaaaagtactttcattgctgtgccttctttcaagttacataatcacataaccacaaatggcatctaccaataaaccagccaggttttgctaagtgtactatcctgccatgttaaaatatcaaagcctaagtcttcattgttagcatggttatttgcctatgataaccctatgcagataatatggttactattaaccataataatggttaaagcacctggctccggaaaaataatcagtgtttgttttatgtaaacaaaaacacattacacccatgtgattaaaaaaaactacccatgtgataaaactgcatataaagttttggtcaatgatggaccatatatacaacactggttccgtaagattataatatcatatttttactgtaccttttctatgtttagacatgttcagatatacaaatactgtttctaattatgttacagctgcctgcagtattaagtacagtagcatgctgtacaggttcgtagcctaggagcagtaggctagctaccctatatagcctaggtgtgtagaaggctataccatgtagttttctgtaaatatactctgtgatgttcacacaatgatgcagtttttagaactattcccatcattaagcaatgca

SEQ ID NO: 11203 - DNA, 1029 bp, Homo sapiens
tgggtgtggtggctaacacctgtaatcctggcactttgggaggcagaggcaggtggatttcttgagtctaggaatttgagaccagcctggtcaacatggtgaaaccccgtatctacaaaaaaaaaaaaaaaattagccaggcctggtggcgcttgcctgtagtcccagctactcaggaggctaaggtgggaggatcatttgagcctaagaggttgaggctgctgtgagctgtgattgtaccactgcactccagcctgggtgacagattgagaccctgtctcaaacaaagaaacaaaaacaagataaatgcctagatatctgttagattagtggtcagttgcaagaagtaaataaaagaggttgaggctgctgtgagctgtgattgtaccactgcactccagcctgggtgacagattgagaccctgtctcaaacaaagaaacaaaaacaagataaatgcctagatatatgttagattagtggtcagttgcaagaagtaaataaagcttccatggtctctgcgtgtgtatatgtgtgttgagaaggaatattgggaataatgagtgattgtagctgcatcttgtttccgtgtgaaatgtgtctttaagctcctgctggggtccagaccccatcccgtgttgaaatgggactccctggttgtttctggggcatggtgtctgtggaagaaggtggattctggatcttgcctggctgggaatgagggctccagcagcaaggcttagggtttgaaggggaaatagtgtgtgtgttttaaggggctcagggggagatgtctttggatatacatgaagagtgcttagaatagtgctaagcactcaataaattttagctattaacatatataatgtactgtgccttttgttataaaacgcagacctttaaatagaaactagaagggccacgttcttggaaaaaatgttcagtgttagaagcagtaattatgtattaataattatgtaagtgccaaatttggagcatgcacataatgttgatctctctctacccctcac

SEQ ID NO: 11204 - DNA, 1025 bp, Homo sapiens
ggaaccacaggtgcacagccgccactcctggctaatatttttattttttgttcagacggtggggaggctcttgctgtgttgcccaagctgatcctgaactcctgggctcaagcgatcctcctccctccgccttccaaagtgctgagattacaggtatgaaccactatggctagcctggtctacagaaatgtctaattttcttcagactttgttctcccttcaaattaggtttcatctggcagagtggctactccatttgtttgcaagcctctgcccttgatgttcagattcctgctgctggtggagccggctgagtttcccagatgggctccacctgcctcctcctcggttgctgcagcattcattgcttcgtgcttcctgtctggctcgcctccaaatgagcctgttcatttcctttctccggaaactgtccttatcactgaggttcaaaagttccataaaggatatggcagtcttgagacttgacctccaaactttgaccttaataaaaactggttttttaaacccagccaacctgaatgagtggactatggcttttgattgctgttagctgaaggagatgtatggctgctgggtgacgccttgaacagtgagatgttatatataatcttgaatttggggtggtgcttgtgtcaccactcggaattatgttgtcagtctcacttccctcctggcttcttggcaatcgtctttattaatgttttcaattttcttactatccagtgaacttactttgtatttattgtttggggtagtgttgtagatggtattactatttgaaaacttactgttgaaagggaccgtagtccagtggcctcttttaataatcagggaaaactgagtccatgaagacacgcctgcctttgaaaacctaagaatccactgctttttctgttgagacagaccccacagagatctccgagaggacggctgcagcaagagtgctgactcccatgcagccgcattccttttctaattgtcaaagctgattagtggatttggat

SEQ ID NO: 11205 - DNA, 1042 bp, Homo sapiens
ttggagttagggaggattagcaggctttcatttgcttccacattttttttcagcagtttaatttactgaaactggcataataatgcctccttgattaggttgttgggagaagtaaaggcaatacaagtttggtgcctggtatacttcatcagggtgacaaaatgctgtcatttggtcatttgtgatcatgtctgctactgcataatgtcatgcactggtgggactctttagacagctaattattggtaaattcttcacagtgagaagaggatttaaccgatatttctccctctagagtgtggggaggtagagaagtgggtgagactggaagggtgggaaggagaagtctggctacttgtatcttggcctggggatttgtttggaagatgaattatcctctggtagttgtgtacagtttacaggtcagtgattagtatgagtccgtgaatagtgccagttaatactgattaactgctgtactttttgccaataaatattgtaaagctataaagacaacagagttaatacaagttgctaaagagaaacttgtggtaaatgtctttaaatgttgtttaaaatagaaatggccaatctagcaggcatgctgaggaaatgatgtttttgcagaagggaaatttagcaatgacagttttgcagaatatattggtaatgaagtgttacttgtagctgctgacaaattagttttcttaaaaaatatatcccctaggaagactgtagtatgaaagaatgagaaccgtaattggtggatgagcctggagagtttgaaggtaagagagaaagagaagcagcgagggagagaaggagagagagagagagagagagtgagtgtgtgtgtgtgtgtgtgtgtgtttcaaggtaacatgcaagaacaataaggttcttcttgtgtggttgtaatttttttttttttttttttgagacagggtcgcactctgtcacccaggctagagcatagtggcataattatggctcactacagcctcgacctctgggctgaggtgatgctcccacctcagcctcc

SEQ ID NO: 11206 - DNA, 1631 bp, Homo sapiens
gcaaagtgctgctgggcttcagctcggacgagtcggacgtggaggccagtccccgggaccaggccggcggcggcgggaggaaagaccgggcttcgctccagtaccgcgggctcaaagcgccgccggcgcccctggccgccagcgaggtgactaacagcaactctgcagagcgaaggaagccccactcgtggtggggggccaggaggccggcgggccccgagctgcagaccccgccggggaaagatggagcagtggaggacgaggaaggggagggagaggacggtgaggagagggacccggagaccgaggagccgctctgggcgagccggaccgtgaatggcagccggcttgtcccctacagctgccgggaaaactattcggactcagaggaagaggacgacgacgacgtggcctccagcagacaggtattaaaggacgactccctttcccggcatcggcccagacgaacccatagtaagcctctccccccgctgactgctaaatcggccggcggcaggctggagacttcagttcagggagggggaggactcgcgatgaatgacagggcggcggctgccgggagtctagacaggagccgaaacctcgaagaggcggcggccgcggagcagggaggagggtgtgatcaagtggactccagccccgttcctagataccgtgttaacgctaagaaactgacccctctcctgcccccgccacttactgacatggactcaaccttggattcgtcaacaggctcccttctgaaaaccaataatcatattggcggtggggccttcagtgtggactcccccaggatttattctaacagtctccctcccagtgcggcggtggccgcctctagttcactcaggatcaatcacgccaatcatacgggctccaatcatacctacctgaaaaacacatacaacaaaccgaagctttccgaacccgaagaggaacttctccagcaatttaaacgggaggaggtgtccccaacagggagtttcagtgcccactacttgtcgatgtttctcttaactgctgcctgcttatttttcctaatactgggactgacttacctaggaatgagagggacaggagtatctgaggatggagaactcagcagtaagtattaaatcctgtgggtaaggtaacaaagagaatgttgttagtggtccgctttagccgcgcttagcgttttacatgaagtgacttacctgcaagaatatggtttaacagcaaaaacgcaacagtgcgtgcatgtgtcatctttcttaaagaacaccattatcgaaatgatgtcatatggctggttttaaaagttttctgcatgatgtattgtgaaattcaaaacaatttttaaaagaatattataagcttgttagtaaaactcatttgtatatgtgacaattctcttttagccctgaaagactatttgcgcagatgccagttacttaacaaatttgaagtattaggataaggcacattataaatgtagtgtttttccaaattgagttgtgattctaataggcaatgtaatagctcttgaaattcgaattattttataatattaactgtatgcataaattcggattaaatattttgtggtattaactgtatgtataatttct

SEQ ID NO: 11207 - DNA, 1023 bp, Homo sapiens
ttgctgtgtcacccaggttggattgcagtggtgtgatcatggcttactgcagcctcaacctcccaggactcaagcaatcctcacagctcagcctcctgagtagctgggactatagatctgcatcaccacatctggcaaattttttgtattttttgttgagacaggatctcactttgttgtccaggctggtcttgaactcctgggctcaagcgatcctgtcaccttcgcctcccaaagtgctgagattacaggtgtcagccatagcagccggcctattctctcattcttgaagaatgaaagctccatgttatgtttgaagttttacgagttgactgctttgtaagaaaaaaaaaaaaatcctagatctatgagaatattcccgtgaatgccagggatttgcatataccagtttgatgatttcagaaattaaagtctactctatgaaaatgtttttcatttgaaaattttccctagaatgatttaaattaaaaataatgaggaaaaacttgtgaatctctacagatatatccacggagactagtttgaggatacactggcatagctatcagagaacctgggcttcaatattggcccttccacttactagctttttttcactaaggcaagttgcttagccattgtaaacctcaatatcctcatatgaaaaataggttaaatgagaatgaagtaatgtgtgtaaagtaaaactcatacatggcacatagtaataataataactaacccttacgtagcattaactgtgttccaggcactgagctaaacaattattatttaatccttatgaggtaggtacttatcccattttataagtaaatggagacactgagaagtaactcgcccagggtcatgtagctagtaagtgaagcggcagtatttgaactcagacagtggctcttaactgttcttctagattgccttttaatatgtataaataaggacttgatatatgttctctactattattgtctttattttcagaaaactgtgacaagtatagattca

SEQ ID NO: 11208 - DNA, 1358 bp, Homo sapiens
ttgtgatttaatttttccttatttttaggcacaaaggacttcttagcttagagtggaagtggtatcttctaagtccttgctcatattcctgattgggaatgttcctttatacttgttcctcatttcccattcattaaactgctttctacaattctttaaacatgtagaatggagagatggctctttgagtctgttacaggaccgtggcggcagataagggaaagctcagctcctattggcaaaagtgaaaactaatgtctagtaaaacttttgtctggatgaagaagttttctaagggtttcagtacttcattctgagaaagaattgagaagttcttattcatcatgctctttgaattgtaaatattttttcagttattttacaggattttatattgtggattaatacttagcagcatgttctatttaatttgaataatttctttgaattacatttggattcctagagaatattttctcacaaactttttcatttcaaaaggaaaaacaggcagtccctaatttttgaatacgttgtcttccagattgtgtgtaaaacagttgtttgaacttggagcatgttttactacactggttttaagttcctgggctagcccacagaagcctatttaaaaccacatcctattttagcactaatatactgttggtttaagtttagggaatcagagcattggatcgtgttctgtgggagttggaggagaaagtaagtttatttttggcttttagtgttttctcttatactttttcatctctttaatttctgttttccaacttatactggcctaagctttctgctcttttactataatcttggctcaataactttaaaagattcaataacttctaagtgctcaataacttcaaaattttctgtatggaataggtttacttgttgagtgcttggcaaataaacgttttatgctcattcgtatctcatttagttttaagagttttatgaggtaggggctagttttccatcattaatgaggaatctgaggattaggttaatcactttgtccaagtttatagggcagggagaggagttatggagttaacgttgttgggtaaaaaccttagcaacatgacttgaaagctcatccactaaccattggacatactgttttcctttttcacatatcctcttctcctttctctctttactaagttccaactccccctattccctcaattcagatactttttttttctttttgaaagagatgtgtcttgctctgttgcccaggctagcctcaagtaattactcgggccttgggctcaagtaatcctcccacctcagtttcctgagcagctggtctacaggcacacaccaccaagtct

SEQ ID NO: 11209 - DNA, 1109 bp, Homo sapiens
tactaaaatccacagatgctcaagtccctcatataaaattgtgtagaatttgcatataacccatgcacatcttcctgtataatttaaatcatctttagattacttataatacctaatatgatgttaatgctatgtaagtggttgttatactgtattgtttttaaaatttgtattattttgtattgttatattgttagcatttgttttgtttttttcctcccacgtatctttgatctgaagttggttgagttcttgaatgcagaacacacggatacagagggctatcaccactacctttcttcccaacattgtggtaaactacaggggtgtctttagctgacaaattagatagaggcagcaccttaattgtttccctctggagttttgagctgccgggacttacttttgtctttgtgggacgggtgaagcaggcaattcattattaactttatagtttatcttagagtaaattgttgatatttacttaacatctaagagtcttctcttagattaaactttttttgaatgaggacttcagttttagttactgatcagattcaggaagaataattctatcaaacattcttttttgagttgtggatgctctataaagatatcggaattcatctttggaaggaacagactgtcattaaagtcttaaatgtctattttggtattttctggatttgctaatgatctaactttctaatttagtaatattttatttagataaatgaaaccatgcttatgaaatcattgacagatgaatcacctccaactcaataggttaagcattttagaaaatttatgaatattttcagacacatattttaaaaatttctagacacaagatcttatattttagctatttttcgatatgctatgtttctgacaattttaggaaaaataaaatcttatttctaatgtaaattatatgaatttctaaaaataaggctatattaaacatcattctaaaaccaaaaaaaaattgttacattacaatgaatcttctaggtctttgcaaaagagagggaacttttctttttcagttttcaatttataaagagtttagattgaattatgaataaagctgctgtaaacatccatgt

SEQ ID NO: 11210 - DNA, 1032 bp, Homo sapiens
tgtccaattctttgttcaaaacaccaagaaccaggatgactcatagtcaagaccttccaccagtaatagttctacatcctcactgcattcgtgatgtcagtgttctggtttttagccattctgataggtatgtaatggtatctcattattttaatttgcatttccctgataacgtatgatgtggatcatcttttctgtatactttctttggtgagatgtctgttaagttctttggcccattttttaataggatttgttttcttgaatttttttcatctattttgaatagcagtactttatcagatatgtcttgcaaatatttcctgacagtctatggcttctctttttattctcttaacagtgtcttttatggagcagaaattttttaatgtgaatgtcagcttatcacttctttcatggattatgtgtttgctgttgtatctaaaaagtcattgccaaaccctgggtcatctagattctcttttatcttctaggagttttatagttttgtgtttgatatgtaggtgtgtgatccattttgacttaagttttgggacgggtataaaatctgtgcctagattaatttttttgcatgtgagtatccaggtgtttcagaattatttgttgaaaaaactatctttgctccattatattgcctttgttcctttatcaaagatcagttgactgtatttatatgggtctatttctgggctctctgttctgtttcactgatctttttgtctgttcttttaccaataccacactgtctagattattgtaactttagataagtcttgaagtcagacactgtcagtctcccacctttgttcttcaatattgtgttggttattctgggtctattgcctttccatataaataaaccttagaatcagtttaacagtatcccgaaaataatctgctgggattttgattggtattgcattgaatctatagatcaagttgagaagaactgacatctagaaaatattgagctttcttatccatggacatgaactatctttcagtttaatt

SEQ ID NO: 11211 - DNA, 1074 bp, Homo sapiens
ccttctctttaactgattatccccatctaggtttgtatctcgaaattcagatcaataggtgggattacaattgaaaggttattaatgaatacaagggtggtggtacaagagtttaccttaggcaagttgtatggaagacagtaatagataattttgtccataaaacttttcctattttgattatgtaatctcaatattcataatttgttaagtatacatcaagggaactgttcctgtcatctagaatgaccatctatttaataaagccatgaaacaattagagaactttcagaaaacaaatgggcataatgctatgttgcaaaaacatgtcctgccttgttcaccctgtccatttttagattggtctggatgatagtgaaatgcagaagtgtttgccacacaggtgcagtgttttgcagctgttggaaacattccccctcacccacaacccctttgctttcttcacataaaattatgctgtgcttagaccattaatactagaagatgggatttgagaatttgaatgtctgtttacataaagatgtaatacagagaaataactgctcattcaggcatctgaatgtaactgcctagatgaatttattaaaactgtccttaaggtcacactagccttaaggtcatggagttttagatacaagagactgcctttaaaactcctgtctgtagaattgctgccctccaggactgaactgtctttgaggacagggcttatatatatttatttttaaatctcttgtaactaacataacacctggacaagtaggcactttatatgtttgcgaatattttatgttggaagatgaagccaaatgaaaatatcttttagtatggtactaaatcagaaattataatttttttaaactgatgccatgtggtacactctatagtagtcatgaacagagtgccatggcctgagagagaaggggagagtgaataatcatgtccatggaaatcacgggatactttatatttttatgtatcacggaaaatacttccctagactacaattggagaatttgttttgaagagaatttttttcctcatctaagagaa

SEQ ID NO: 11212 - DNA, 1019 bp, Homo sapiens
tgagtattccctaactgtcgtataattaaatctgacacagattttctcttaagagctgaactgtttatcactttactgtaaaagactactgccaagtaaaatgggagtggcatatcatcagtggatcttgtcttacacttagaagtatgcctgttgcctgtagttgttggataccttagcagtttttgtccgttttgccctcattttacctctttggatcttctgcatattggcatgcctattcgaccatcaaaaggacttagaaaggaagcatatccttcaggctatttctttaattttttaaagagtgctataatactaattttaacctaaattttacttatataaaaatatttttcacttacccatcattacagggacttcagagattaagatgtttaagcttgtaattagttattaattttttattataggaactgttatatagacctgtatagaaaacattatttgttgtactgaaggatgtgtaataatgtgtaatcacatccatagaatattactttctgttgttaaagtggaactctgaaatgattagtaatattctattgcagtgataattgtttaaaacaaagttggctttttcagttgccttaagtataacactgctacagtgtcataatttaaatttggtacagtatacttactgaacattagaaatagaagactattttcttctgtttaattttccccaaggaagaaactgaaattctgaacttctgaataatagtaacaattataatgaagatagtggctgtttacttatattaaatgctcattctgtacagggccccttgccaagttgtattagtctgttctcatgctgctaataaagacataccgagactgggtaatttataaaggaaagaggtttaattgactcacagttcggctggggaggcctcacagtcgtggcggaaggtgaaagtcatgtcttacctggtggcaggcaacagaatatatgcagggcaactccactttataaaaccatcagatctcac

SEQ ID NO: 11213 - DNA, 1080 bp, Homo sapiens
aagtgttaaaattcattattatttaatcaaaggcataaggcaaacagtttaaaatatccttgaagagtccgggcgtggtggcaggcgcctgtagtcccagctactcgggaggctgaggcaggagaatggcctgaacccgggaggcggagcttgcagtgagccaagattgtgccactgtactccagcctgggctacagagtgagactccatctcaaaaaaaaaaaaaaaaaaaattccttgaagagaaaattggctgaggattgaggagggaaatatttaatggtgacaatatatgagaaaattggatagagtcaccctatagatttttctccctccaaaatgaaaaacaatagtctgggccttactaaaacacaattagaaagtagctaattcaaattacaaaattgcctttatttaatgaaagattatttgaaagcttattttatgtatttacttgtggaactttaactagtttgcagaattattagggaagccagtagttagacatttaagctgaaatattaggagacaatctgaaaagcagtcaaaatggaagaagagtgtaatcaaactgtaaaccagtaagtaagtttaaaagttgatttgtatacttttcagatttactgctagtttagtgtacttgtactaaagataactgaaccaaaacctttgtttctttctcaaaatgtgttcattcacttaatagcatgtatcatcatgccactgcactctgccacagcctgagtgacagagcaagactgtaaagatagatagatagatagatagatagataaagtaaatagtatatctcataaacacctacttagattataatttagttggtcatttggatagcagttgaggcccttctagtatatagacggtcatttaaactgtttgtttgtttgtttgtttttttgagacaaggtctcatttttatcacccaggctggagtgcagtggcatgatcacgactcactgcagcctcaacctcctgggctcaagttatcctcccacctcagtctcctgaggagctgggactacaggtgcataccaccacacccagctaaattttgtattt

SEQ ID NO: 11214 - DNA, 1015 bp, Homo sapiens
tagggaaattgagataggtgagtagtagcatgtaagagagcaggtaaatatctaaccatttatttaaaatcttctgtcccacatcagtttcttctccaaatactaagagaacttgctgttgaattttctaaactactgtaaataatttctggaaaatcttaatgaaaggtagtaaaagattaaagatggataaatgtcattctgatttctcagaagtggaaagtggcatttgaaaaccatacaggaaagcttgttgtcggtccagttccataaagataatttcataaagatctgagttcttgcaaatggaaacgttgatccctggaaggtggctggcatttgaacgtggacaagtcatgccatacaaatttcatgcctcccatccccttgttaaaattgtggtaaaaaatatataacgtgaaatctgttaacatatttttaagtataccgtacaactatatgtgcattcttatacagcaaatctctagaacttcttcatcttgtatgactgaaactctatagccattgcacagcaggcccccgttttcctctgctccatatccctggcaaccaccattttactttcttcctccatcagtgtgattaacagatacctcatataagttgaatcctgcaatttttgtcctgtgactggcttatttcacctagcataatatcttcaagtttcatccatattgtaacatgacagtacttccttcattttttaaggctgagtagaatttcattgtatgtatacatatattttctttatccagtcatgttgatgggcttttagattgtttccacctcttggctattgtgaataattcatcaatgaacatggcaatgcaagtacttctttgagactctacttttaattctgttagacaaatacctagaagtgggattgatagataatatggtagttcaactttttattttttgaggaacctccatactgttttcatattgactgtaccattttacattctttccaatagtatagtaggattcc

SEQ ID NO: 11215 - DNA, 1033 bp, Homo sapiens
ctgtattcactgtttttttttactgcacatatgctttttagtttgatgtagtcccacttttctgtttttgcttttgttgcctatgcttttggtgtcatgtccaagaaattattgcccatatcaacgtcaagaagcttttcttctatgttttcttcaagaagttatatagtttcaggtcttacatttaagtctttaatccatttggagttgatttttgtgtacggtataagataaaggtccagtttgattctgttgcatgtggaaatccagttttcctagcaccatttattgaagagattgtcatttctccattgtgtagtctggcacccttgtagaagattgttggatcatacatcagtggctttatttctggttctctattttgttccactggtccatttatgtctattattatgctagtactatactgttttgattactatagttttgtcatatgttttaaagtcagtgtgaggcctttgtggttccatatggatattaggattatgtcttctatttctgcaaaaaatgctattgggattttgtattgctgtattgccttcggtggtatagtaatttgagtaatattaagtcttccaattcacgaacatgagatgtctttctatttatttgtgtcttttatttcattcagcttttttttttttttttgtagttttcagtgtataagtctttcacctccctggttaagtttattcctaagtatctaaatctttctaatgctattataaatgggattattttcttaacctccttttcagattgttgttagtgtatagaaatgtaactgatttttgtatattgattttatatcttccaacttagctgaatttgtttattctaacaagattctttttagtagagataggggccttgctatgttgcccaggctggtctcaaactcctgggctcaagttatcctcctgccttggcctcctaaagcacggattacaagcatgagccaccacacccagccaaataacaagatttttttggtgaaatctttagggctttc

SEQ ID NO: 11216 - DNA, 1027 bp, Homo sapiens
cctaccacacacacacacagtattcttggttggcagttgttttctttcagtactttgaatatgttatttcactctctcctgctttgtaaagtattttggggactcccttgtatgtgatgagtagcttgcgtcttggctgctttcttctccttggttttcaacaatttgaacataacatgtctgaatatggacttattttggtctatcctcattaggattcattggcttccttgagtctgaatacccattttcttccccaggtttggggagttttgggccccaaataacatggtgtttttgtttttgttttgttttgttttgcctgtttctttcttctctttctgaaacttccatattacttatattggttggcttaatggtgtcccattaaggtccttagactttctttacttgtctttatcctttcttcattttgcttgtctgacagaataattccaaatgaccttcttttgagtttgctgattctttcttctgtttgatccagtctgcttttgaacccctctaatgaattcttaaattcagttattctttagctccaaaatttctgggttttaaaaatattttctgtctctttgttgatattcttacttgattcatgcattgttttcctgatcttgttgagtatctttatgatggctttttctgaattctttgtcatgtaattcttagacttctacttctttaggatatgttttggaagtgtattttgtttctttgattgaccatgttttcatggttcttcatgtgccttgttactttgtgttgggattcgtgcatttaacaacaacagaaataaaaaaaacagccacctttgtagactttgtgtggggaaagtcttttaccaatatgtctgtgtagacattctggatttcttagatatcttttctgtggttgtggttgtgacctctctggatttttgcctgtgaatttccaattagagaagttttgctggtttattttctcatagtttataatcttttgatccctggtatctgtaggttatccc

SEQ ID NO: 11217 - DNA, 1053 bp, Homo sapiens
gatccacctatcttggcctcccaaagtgcagcgattacaggcatgagccactgctcctggcccagctcttttttcttcttagtggcccccaggcatctggagtatactgagtcctatccgcattttgaatcaggtgaggcagaagccagcgaggcaacactccttgcccctgtgaagtcagaactttggatgcatgtctaacttttttcctccccagggagaagccaagagttggggtttttctcaactttcttcatgccgagctgggggtagggacaatggtgagtgagtgctgttgcctttgttcttagtagtccttaatttggtgtctttcaactattagattcagacatgacagaaaccagttgccccgaaaagtcagatcattagatgtatgttctagtcttctgttttccttctgaggaggaagccacgagttgggagtttcctctctattgcactgccctgtggggtgatgagagtgtctgggaagtgagtgatatgaattttcctaacagctttgatacaggtggttttgtgcttgcctaggtgcaggaaccttttaactaatttctggatttttcacaaatggaattggtccatgtatttttgttgaatcggtgtctcattgagggaaggagggtctggggcttcctattctgctgatgtcactcctccactttttaaaaattaagaatgtagtatatgttttaaggctttcagcaaagttttggtaatagtctcctgtgattatgcttgtcaacaaagagaaatattgactgagtttttaacttaatgcatgacttatatgtaggtaccaaaaagatcctaagacagtataataaggagattatatctggagtcaaattctggtactgccagtagaagctattacattttggtaaagtctctaacttttctgaacatgtttctctgtgaatgtgggactgccgttaatacctgtcaaagttgttgggagacttgagtatataaaatgcctagctcagtgcctgatgattatagtagcttcccaataaattcaatttctgtgtt

SEQ ID NO: 11218 - DNA, 1028 bp, Homo sapiens
gtgaatacttattttatcttagattagtggtgtgtagctaaggaaaggtaaggtcatatcttcctgtaacagtccagattagatagggaaatgggtgaaaagccacaagttgttttgcaactctggtctcacagtaattgagagcaaaaaggaaaaagtgcactgtagtcccccttgtttctgattttgtggggtgtgaatatgccttctagtcagatcgccttagggggccaggaagaggagggttgagggcagagcatgtttacctgcgtgcagagccacttgaaaaattataggctcatttacatatttgcatccttgtgtatgtgtttgtgttgcaggggagtcagtgtagtattatgaaaagaacatttgacagtgaattggaaaactaggtttttctagtcttgtttttgcctgagtcgtttaagcttcttgtgcctcagttttcatatctgcaaaatgaatgaattggactgggtaatacctggtgttgctttaagattctgtaggctgggcatggtggctcttgcctgtaatctcagcactttgggaggctgagtcgggcggatcacgaggtcaagagattgagaccatcctgaccagcatggtgaaaccccatctctactaaaaataccaaaattagctgggcgtggtggtgtgtgcctgtagtcccagctactcaggaggctgaggcaggagaatcacttgaacccgggaggcggaggttccagtgagccaagatcatgccacagcactccagcctggcaagagagcgagaccccgtcccccccgcaaaaaaaaaaaaaaaagattctgtaatttaaggattattttaaagtctccaactttctgtaatttttaatggaaaaatatagttaatacagtatgcaaaattatgtctttttaaaaaatattttgttcaagttgactatcttgtgcgattcactataagtgttacactgcatctaagatcttatgtttgaacttcgtagcctagtgtgcccagtaatttgagctactggcaa

SEQ ID NO: 11219 - DNA, 1047 bp, Homo sapiens
ttagctcccacttagaacatgtggcatctggttttcttttcctgcattaatttgtttaggattatggtctccagttccattcatgttgcttcaaaggccatgatcacattttttatagctatgtagtattccatgatgtatgtgtaccatgttttctttatcccccacaaaattatgtttatgttatctatattggtgtatataactcatctttctaaaacttagcatttattatccatatgtttttctactttttaatttatttatgctccttggacatttatccattaggattcttgtgttttcctatggagtcaaatctgtattttctcctattactttcaagcttcattatctatatatttaataataatagtgatgataatagtgataataataccaaccacttacagatatgtgctatgtgtcaggcactattctaaatatttatttattacagttttatcaaggaagtacaatatcatcatgataaatcatatattaagattaaggactgaggcaagagtgttcagtaatttgtatgactgtgatttaatctggcagtctgactccagagtctgtgtttgtaatcattccactactttgactcctatgtagtcttttcttttaattatgccttttcccatttaactttttaagatatttaaacatttctatgacattcaaaagagaatggccctagtgtgatgttcaaatgggttctactgtacgacaccggttgctcaaagccatgacacaatgtaattttccatgattttgttctacaggtcttttaaaaattctctgggattcactattgcttttctttttcctaactggggggaaaagtatgccttatttgttatccttctaaaatatttcagttttttacttttggtctgtggtttggaattgattcccttgatttcctttgtgtgttcggactagtttcttcatatttggacaatgccctcctcttttgaaaaatattgatatgaccttagatgaatcacttaatcttcctgagctttgactttttcaagtaag

SEQ ID NO: 11220 - DNA, 1025 bp, Homo sapiens
ctcacccttcaactgtacataaccatcctgtggtgttcctctctcctgcccttatattaccccatagcttcctatgcatgattctttcttactatcctcacagtcatttctactgtgctctttggagctgtgattccattgtaaatacattcttttttatcctcaaatctcttcacaaaatgttttcttcatttttttttaattgagacttgtttctctcccaaggtccctcttgcagctgcaagagtacaagcaataactcttcattacctccttcagaacctcacttttcctttctcatgtaagaactccttacacagccacttattaactttcatcattgctgtgatttattagctccctggtaatgcccttcatttattgaggattttagttttccactctaattcttgctatcctcacgtgtgatttcagtgaccatgtggaccgtccaatcaacaactgagtgtcttcaacctccatgtcccgatcccttccctttcttcccagtctgttatgtacttcatcattttacttccctgcccatccatcctagactctatggtgaccatttttcacctttgccagtgctctctgggtcctggatttgttttccttatgctaaattccccggaaaaatcctcaaccatctgctttcagttgtagctccttcacacaggctgcatggccctgctggaggaaagagtataattatgggataattgccactaaagatttatggtcttcaatttcaggttgccccttggcactattctgcagtccttctgtgtctttatcacttttctcaaatccccttttctaccaccattttctttttgaacaatcatcttgcctcctatttcatagagaaatttaacactatgaagcttgagcttttctttcctgaaactaacaaacgtttatatctacactgaacctcctttctatatgcttggaggaagagatgtcctcttttctagttcaaagtagtcatctcaactctctcctttgggatgttactccat

SEQ ID NO: 11221 - DNA, 1033 bp, Homo sapiens
gagtagaaaaaaatcaatgcaaaattacttgctattcacatatatgcagaaaatgtaagtccttggaatgtagcacacattatcattacataatctatatccatatgctgtttataacaagctgaaatgttatacccttgagaaaagaaccagattctggcacaggactgttttgtggcaaggaaagatgaatggattccaaaattttaaaaggggggaaaagcttgatggttccacaaaaaataagagttgaaatggggatttagagatatatatgttaacacaagctgacaattaaagcaattaatttccttctttatctatatcccctcctagctcttctaatcctgactaaggtaaatggattgactcacctttttagcagatgaagataggaacaaagatatctggcattacagcctgtctccccatcccccgccatccccatttgtagcttttttttttacagatgtttttttccattagttagaatagttagttcttaaagcagttagagacagatctgtaccagtcagagaagcagtggttcaagcctgttggcttaattgctttgagtatgttgctaatgatgctggggccacatgttagatagccaatgtgagcgtttttatgcagtggaaaaggtctttctccagacaaatattgtacctctaatccttttatgagtaaatctgagataaagggatttgtgaatttgtcagtgactcattaaaaatatattctgagtcccttaggatagctattattaaaaaacaacaaaataataagtgttggagaggatgtagaaaaattggaatcttatactagtgggaatgtaaaatggtacacttaatgtgaaaacaatatgtcagttcctcaaaaaattaaacatagaattaccatataatccagcaattccacttgtagttatatatccaaaagaattgaaagcagagactcaaacaagtattttttctccagtgtttatagcagcattattcatagtagccaaaaggtatttttttccttgact

SEQ ID NO: 11222 - DNA, 1005 bp, Homo sapiens
gggaaattcaggtttagcacttaaaatatatataatagaataaagatctaaagcctattcagaagttggagaggtttcagttagagaaaaatgtcaggagaaaatttagataagggaaagaatgttgagacttaactgcccctcagaagtaatcttacattttcatcaggtacatatatttatgagaggaattactctgacatttttgataagtacccaaccaaaaaatgtaagtaatagtttgtcttagagtcccaaataatgctttgtagtgaatagccctaattgagaactgcagttgaatggatcattatttcatttttagtctgaattgcatgttgctgggagtagaatctgtatttctttgaatttccccatcctatatctcacttggtatttttaaggtcagttaagcacagtaaataatctttgctcagcaagcaacccacatcaccatcttcctgtctgatgtagctaataaattctaagcaaacttcaaactccttgtgaagcttcctaatggatgcctcactggactgaagagcttttggaagcaaaataaaataatcatctaaagttgaatgtttttggatcaaggttactaggtcaacactaaatttgaaaccattttgagagacattttttaatggcacttagaaattatggctaaagatcaggctgttacatgtgatgtagctcaggtcctttgatgctaaaggtctacaactgacttctgtgtaagatgtatttttaaaaacattaactgtgatttaaagtagcaagagacagtgttcaggccagggaaaataaaatctccctctccaggtttttggttgaaatggtttgagttcagtaattttattgaacctgaaaaaatattattaatagctgccttcacaaagggaaatagggaagctggcccctgtcaattcctgcttaggagttgccgagacattttgagattgcaagaaaactgtggatgaaatccataccaattagagatcc

SEQ ID NO: 11223 - DNA, 1038 bp, Homo sapiens
gcagtgtaaacactgtggctaatttgttgaagtgagatgccattgatgattctccctgccttgagagatgacagggctccttcgcagaaaaagctgattgctgtagcagattgctaggggaaggcacattgcaaaaagtgatcaggaaaagacaagacatgttaccaagacagatcatttttcttgaagaggagttaaaaaaagacactaaaaaggaattcctcccataaagtttgtctttcagagagcaaccatttctacaactccgttcctgcctaaagaagcaggctgtaacctggagcaaagcttggagaggctagtacatcagttttacagaagcagttctaagaatagtgaatatggataatacagacagcaacccagacacttgatccatgcgtttgctacgtaaaagttggatgagaataactttcaacaaatttactttccagtgacttgttattttttaaattgtattcttattaataaaaatgatactttgatactgggtatgtaaccaaaggaaaataaatcattctaccaagaagacacatacccttgtatgtttatcactgcactatccacaataacaaagacattggaatcaacccaggtgcccatcaccggtagattggattaagaaaatgtggcacatatacaccatgaaatgctacaaagccatacaaaaagaatgaaatcatgtccttttcagcaacgtggatgcagttggagaccatagtactaagtgaattcacgaaggaatagaaagccaaataccacatgttctcacttacattaggagctaaacattgagaacatatggacataaaatgggagcgatagacactagggactactgggaggggggcatgggttgaaaaactacctatcaggcactatgttcactaccttggtgatgggggctgtactccaaacctcagcatggtgcaatattcacatgtaacaaacctgcatgtgtaccccctgtatctaaaatataaactgaaattagaaaaaaaacagaagccaacaccatga

SEQ ID NO: 11224 - DNA, 1053 bp, Homo sapiens
gctagtgcctagtttaccacctaaagcaaaatttttaaagttgatctattcctaagtaagggttgatttatttttagtgactctagtgacaggcatttgtaaatgacccccctacgccgctcatctttctgaaaattcttcatgtgtatgcatacattattccaatttccaaaacagaagtaggctttcttttttctaaagattccttctccagaatctttcattctttcagacacaattatttcctacaatggtgttataaaaatccctcttgtaataaaaatgaataaatacatttgcccataacatgacttatttttcttcagttttataaattacgcttcatctggagaagagaataccttgcaaaataatgaatgacattgatgaatcgttcatggcatgtgtaaacttaaggtattttcactttcaaatcagaatttgttgagtatgttactattctatataaatatgattttcaaacatttgtttattaagcatatattgtgttctaacaaaacatatatgttcgtcaggattttgcaatgcaaatctttttagaaaaagttatattgttcataacatgtaagataaacataccctgtgagactgaccagaatagatatgagaagtcttctatgagtaacaaagtgagtgttttcctgtaaactgagacccatcacaatgcaaaatacattgcaaagactggtaagtatatgagaagaaagaagcctaaaattagaggagctgcaatgcacactgaaatcctgatggttatatacttaaaatttcttgctgcttggagtttcttgacttacaaagtttatatttggattcagtaattggccttgggacatttgaaaacaaagctgttgatttgaaaattaacagtgtgaaactggacaatgcatgcagaatgttgcaagaccaagtgaatgactactaaattagccatcacttcaatttcaaaccatattcagtagaaaattgatttatataatatgtaaaacaaagacatttataagaacacaatttcctatgcttggaactttt

SEQ ID NO: 11225 - DNA, 1036 bp, Homo sapiens
ttcaaatcccaggtctgccacttacctgctttgtttgtgaccttgagccagttgtatacctaacctatctaagacttagttgttcatctacaaaataagaggaataataatacccactttataaggctgctgtaaggattaacgtaacacatgtgactgacaatcgagtgcctgggatattttaaatgctcaatatttgtgagttaacattacagtcatatagagtttgcgttaattcatgggacctgttggatagtaatgccagatcagggagatactatttggtgagaaatgttgtggcttattttatctctcatctacctgtctgtctatctgcctatccatctatctgtttgtcaactatcatgtaaagctatttgtttttaccaggcagattgaagagaaaaagaggaaagtttcatttggcagtgtagacagtcaatatcactgtaccaagtacccccaccggctgctaactcagataacaaaagtaaaatgtggaacaaggtatcctggttcaagttacctgtatttgtgtgttaatatagccatggatgattcttatacatgaaacaatatgtactaagttttctttatcctaaaaagcaggaacacgtttttatagatgtatgtgatatgtgtgtgtattggtgtgttgttgtgtatgaagattggactagggctgacaaaaacggaaaaactaattgctttataaataatgttaacaactgtgatatcagaaaaatcttctgtgaagtaaagcaatgaaataaactctcaagatagaaatgtattcatgttaagtgtgggattatggttaataaagtacatttttaattaatcattatttctaggcacatatagttttaatcactgggacaaactgatgatttctgcctgcttttttttcctctgctttaggtgaactgattgacaggtgattgtttcaggcaaggaacattaaattaaacatgtagaagtgtgcaaatatttgttattttgaattagaatgcttgtgtattctttttcacattta

SEQ ID NO: 11226 - DNA, 1026 bp, Homo sapiens
gagggcatcctttatacccagtgttgcatatgatgggttctttggctttgctttttcctcttcctcaattctttcttcatgcttcaaattttaaaaagattttttttttctgttatgctggattatatgttcctgtttgccattcctttctcctctagagttctgcatcactttctatttatactttggtattgcctttcttttaatttattcatcttatatttttcctctgctcaacatgtgttgggattagatttcttagcataaggaaatgggatgatctttagatgaaaaacatctcagtgttaaaatgtgaccttaaagtaaggatatttcattcaaccttctgttcattaaattagttctctccaaacctacttatcaagtggtgatcatctagcgtgcttgattacctttaaagttagggaacttgctacctctcaaggctgcctctttcttctaggaaagctctgcacattagaaaattgttccatctgactacctgtaacttccgtccactgtctctaggtcatccttctgggaatatatagagtaattgttttcactttcactcatgatagccctgcaaacggttgagggcaattaacacatactgtttgtatgtatctgtgtttgtatgtaacacatactccagttttctcattttttccccataaaggaacattcttgttattcttttctgaacatgtttgttcgttaatcttttgaaagatgtcacctagaactaaatatcatatttcaagtgtgggttccataaacagtgggtttatcaccttccttgttgtacatatggttccagttatcgattgctgcatagttaaccactctaaaacttaatagtgtaaaaaaactattttattatgcatatggattctttgggtcaaggataggcagggtagagcagaaagtcttgtctctgctccatgatgtctggggcctccactgggaagactcaagcatcaggggatgactttaatacttgggatccagaatctggagctgttt

SEQ ID NO: 11227 - DNA, 1030 bp, Homo sapiens
aatgggcttatactttatagcaagttcaattctttccaacagtgtcattcaccgatttccttgagttagagatatatttttgaaccgactggattcattaggtatatgggttagaagccaaattgttccccttttattcttgtgggatattttgctttgttttaaagttcttgtgcttctaaaacttgttccagtagatattatagattcatgtaagaggcctgggaaaagatacctaccgaggaatcctctgatctgatgtaattgggatccatatgggtaggtgtgggagagaaacttgcatcagtcttgctttcagaggggatgaagcattggccaattcagtgatctaacgagtgtgttaactagatttgcttaagaacacttctattgtttactttaattcccttcatctttttttttttttatccccctagtttgaactggatttcagatctattgtttttatgaggtggtctgattttcatgtgtgtgcgtgtgtgtgtagaagaggctagaggtaaattgggtctctttttttcctggctttttatagttaagagctcaggctctggattcagatggcttgggttcaaattctggtccgtcacttagctaactggagtcttaagaaaatcacatgacctttaaaggtccagtttcctcatctgcaaaaggtatatttctcatagagttgtaaggattaaatgagataatgcatgcaaagggcttaataaagagcatggcacataggtagtgctcagtaaatgttggaaattatgattaatttcactgtacactttcattttgacattagctgtaggctaaaccttaattacttacagccaccagtagttacacatagaatgaagtaacagagttatatgtcagactaaccaagtacccttgacagtatcattatgtcctcaatatatttatgctgaatattaatcaagtttaagaactgcttataaataatactaaagaacattttaattctctttgctattaaggaggagttttacattgc

SEQ ID NO: 11228 - DNA, 1054 bp, Homo sapiens
acagagatgtgctgattctcagaacttctatagaattccattagccagtcctgccaattgaaatttggcatttaattatttgcatttttctattcttgcctaggaaaggagctcgtcacatacctagtttagtgatggaaagtatttggagaaagttttagagagtggggctcaggctcaagaatacaatgaagtaataaagttgttaacctcatgtataaaatcctccatccagatgttgcttagtgatgcagctagtgcttctggaggaaaagaagcaagaaccaaataatgaagactacatcaatgggaacaagtgatacttttaggtgttttgttctcagaatattttaaaagaaaggaaattaacaacagaagaaaaatatttccctatatgaattaatggtttttataagaaaaatatctttctggagatactaagattgacctagaaattgatccaaggaccagatgcttaaagttcacttcaattggtcactagaaagatcccagcaatccccagctggtttctcaggctgctgattccctttatttggtaatggggtgtgtgcagtacgttgattaaaaaatatgcatttccattccattgcttttgaaggggggcagttgtctttctcttattaaagagcttgtgatacacaggaaagtgatgtaattttatatattagtcaaacgtgaggattttagataagacagcaagggtttttttcccctagtttgtagaaatctagaaatttaagtgatgatttgaggatcgagaagggagaactgaatcaaaataaaatctactacacacattctttggttttggaattctttggctttattctaaagatcccaagcattaatgcattgaagaacccggaaatctgattttgaagctaaaacattaagttttacatgtccattactgtttccctccagagaggtttgctacttacacacacacacacacacacacacacacacacaagcacacacacacacacaaaacaaaaacttttagctgtttgtaatttaagactttccttgt

SEQ ID NO: 11229 - DNA, 1049 bp, Homo sapiens
gacaggaacattctgtccataactaatggctgtcaagcatttatggttgtaaaacacaaaaacctttattgctccagccagctctatcatccagggactgattattgagtttgtgatgatccagcctcttgtccccttctttgctttgttttctctcctcccccctgctgcctgccctttggccatttcactgctcattagcgcctccaccagatggggggcagggtcaggaacagggggtcagctctggtaaaaggcttggtaagaaggaggctgagagtaacagccaacataaggttttcagattatctacatccaggctcgcccccaaccctgtcctcaggaatcactgaatgcagccatgacactgaaatttgtttttcattcattattttttcattcttacaataaacgtggttttataagttagttaaaaagtctttttcaggatgccgtagtaaacaagagtcccttttgagcatttccttagtaaacgatgaatggctgctggtcaagcttgttctggcaagtctttagcctctgttcagattcagaagaatggcatcaaatctatgcttacattagactcaggttgtggaatgtagttctttcaattcaggtttagtgaatttgtcttatgatgctgaaagagtcctgtttgggtgttaagaggccacagagctaaccctaactatatgaccagggaaagcccgtgttatcacattgtactgtaatttcagtgcattaactcagaaaatgcacctcgagtgcctgtttaaacgtgatgttgtgcagaaggaacagcatgtacaggacagagatagagacggaggctactgaaacactttttttgttgttgttgttcacctatttggttgcttgtctctttcttggctggatcatttaaaccctagagttccagttctgagaccctttgattttgtgattttcccatttgtctaaacattttgccaaagccttctgacacgattataaatcaagtctgtgctgggtcctagggatgtcaaggctgacaagataggtggggc

SEQ ID NO: 11230 - DNA, 1031 bp, Homo sapiens
aaacaaatatattacaataaacatttagagaagctgacattttatatccataaggcaaacacaaaatttcccaatttgtatgaaaatttgggtgttttatcctgtgcttttatttatttttttatttttgagtctgagatatttttgtgtccaagaaaatgtttagattaattcacttgcagtcttgaagttatctttggtagaaaaacatccttatgtgtatgaaaaaagcaatttagaaaggagatttcatgagcatccttgacagtggtgtacaagtttaatcgtctttcctgtgacaggagggtcttcatgtattcaacctagaatttctccttttacggttcttagtccatttcctcttgtcttgttcttaatggtgacagagaacatctgctatgttcctcttcaaaatatatcttcctacttggggtactgtaaagtgtacgtactttgggtcttaacatatctgcatttgagtctgaaccttatcacttactaaccttaggcctttgttacctctctgagactaaatttcttcttttgtgaaatgaggctggtaatatctccattgtagtttcagctaaagtatccagtacctagtaaatgctcaaaataccattattttggcctggcacagtggctcaggcctgtaattccagcactttcggaggccgaggcaggtcaatcacttgaggtcaggagttcgagaccagcctggccaacaaggtgaaaccccatctctactaaaaatacaaaaaattagccgggtgtggtggcgcatgcctgtaatcctagctacttgggaggctgaagccggagaatcacttgaacctgggaggcagaggttgcagtgagctgagattgcaccatggcactccagcctgggtgacaagagcgaaactccatctcaaaaacaaaaacaaaaaccaagaaattagacagctgtggtggcgggcacctgtaattccagcgagcagcttgaactcaggaggcggagtttggagtgagccaagatcatgccactgcct

SEQ ID NO: 11231 - DNA, 1037 bp, Homo sapiens
cctgtttgctgcatctctcagctgacttttgtcccttcctgctcacttagtcaattcagagattacagtttgtacaataatgcgctgccttgtcttctcgctggtgaatctggaccggagtgctctgcctctgcgccgacactcactctgatggtcttggctggaggacagaggctgctggcaaaaacctaagagggaacataccgtggtagcagcatgaaagaatttggcaaggaggtgctcgtcacatgattgtgattcatactgtactctcaaaatgtggcaggagggctaggagagacttttaatgccagcacacagagcagagacactcattttcaaacatcacattctttttatagtacaggcatgcctcacagggaaaatattgaacttggcctgccagcaccacgagagtcgtcccaactgtgattttattgcttgagtcactccctgaatcagatactggctgcacggaggaagtcttctattagggatgctttgaaattgtgtttttaattaattaacaccaactctggacaggtttttcatttactcctagctgactcttttttgtcttttctttttttgcctgaaacttgttagacatttttgtaaggtctcagttggatcgcttttaagtatcctggtgaaagagtcatctgtgttgggtgaccaaagcgaggggacccttcaaagtagagtttgtcatctccgagagaatctgatccatgggaatggggtcgtcaggaaaacggtccctaaaagtctggcatagcactttttgatgccttcagccgtcctcaatccattcatcctgttgttaaaacttaaaactagagctggccagctgttgagaaaagtcctcagttttatttcaaccaaatgatgctgcctcctggggctggaagggggctgacttcaagcacaattataaatgtgtagctctttcaagcggcggaaacctacaaaatggccttgattcacagggcccctctggctcaaagactctctgcttcccgtgtgtcataaatctg

SEQ ID NO: 11232 - DNA, 1064 bp, Homo sapiens
aacaaagaagggcttgtgctcccaggaattttctgcattcctctctggagtaggcatttttctcagctacaaaggccctttggcgaattccctctaatcattggatttgccctgggctctgataggtgccattcatggacttggtctgctgtttgatggggctgaggcattaatgggatcttttcatgataaacaaaactgggtaacattaccagagggatcacaaagctgctgttgtagggggagtgtggtgctttctctctctttctctttctctctctctgctttttccttcttcctcctcttctccctgttctttttatgaacgcacatttgtgtgcgtgtgcagcatggccatttctagaagcagatcttctgacctttgctgctactcgtaagtcaatggccaatggcaaggcctttgttgaacataagatgattctatatactgatctgatctacagtagcttcacagcctgcggggaggtctgtgttttcttaattgattaaacgttggaagaatactgcatgaagaatctgattttgagatctttcttacatgctggcatttaattactgaaagtatctggtagttgagatgaatgagtctgggggaataaatacttaacacaagaattcaacttcatgtggctgctgtggtggtatatccctggctgtgttatcaatgccagactgaatggggtaactcgtcactgttgttgtatcctatttgcttctcaaaagaatgcaaaaatggttagttgaaacctgattcctgcaatagtgaagaagtgaaattagaattattttaggtgatgaacactatttttttaaagtttttatttttgtgggtatgtaggtgtgcatatttgtggtgtatgtgagagattttgatgcgggcatacaatgcttaataatcacatcagggtaaatgaggtattcatcacctcaagcatttatcctttgtgttgcaaacaattcagttacactcttagttattttttaatgtacacttaaattattattgaccatagtcaccctgtggcataacactgtttttttga

SEQ ID NO: 11233 - DNA, 1032 bp, Homo sapiens
tatttcattgtctcttggtttagaatgtgtttatatacacataaatatattctccaccaaatatacaatttggaactaatggctttgctgattgaaaagactgaaacttgtgtcacttcactaaagcatttcctaaaaacaaatgccataaagttaaatgtatatatggccaatgtatgctagaaaataaagggacatgtaggattttaaatcaattgatttttcagccatcagtttgagtaacataaattgcagactattaggaaactttggagaaatgcataggctcacagtaaaaggatctgagtggggaaaaaattaccttctagggaaagccaaaaagactgtagtcacaagagcagaatgaacatactgagacatcgccggggaggtgggggcagagcaagggtctctggtaaacaggagccactgtgagaaggatccaaggtaaaaggttcgagaaatcacagtgagtatttttttttaggttaaatgttagcaaaatgcttctgacaggcgtgtcaaacactgtatccgtggacctacagaggctgtttgtgttccaagagtagtgcttcttcattctgaggaagaatagggatttgatcacagaatttctgaactcagagttatgccacgtcttttggctttttgattggtgagaagtaaggcttctgtgaataactagcagataacagataacatccatttttgttgctggaatgaaataagacccaacactggcaaatttacattcatgataacggcctagagccacttgatttcctagtggagataaagaggtaatgttttatttgggggaagtggggttatatttgtcagtatatagtagtaaataacaaaaccaaacacatcgcgtagcgatccatgagcagtaatgataatatcttgaatttgtacagtaatttgtaaagcactagttaatcagagagaactttaaatcattagcttcattttccagaggccctgggccagggacgtctgacagatctgttcaacgtcatagaatta

SEQ ID NO: 11234 - DNA, 1059 bp, Homo sapiens
aatagaaagaggaagctggtgaaggtagactttggcagctggggcagcggcacttgggccgcttatgtgaggtagcccgcagaggcacctttgggtggagagagaataaaatctggttttgacacgtttgttttagatggcaatgaaatgtctagcctatatattttgtagacactgagaaataagggactgaaaagaggaagaggtgtcagggctgaagatggaaatctggggctcatctgagtataggtggtaattgaatccttatggctgcactaagggaataagtagagaaggaaaagatgggctaggagcccctggctgaaccccaggggcactaagtggtaatgcatggagggagggggagaagttaaaagaaggaagaaaaagcagacagaaatatctgaggagtcccagggcctaaggtccctgccactgaggccgtgagaatgttgagaaggcagcacagatccctggaacgggattgccgctaagaagttaagtaagaagccatggtgtttgacagcttccataaaagcaaatgacaaaagctaggactgcagagaggtgaaaccagggcctaatctggatctggtctggattgtttcctccatgctctctagcacagagctttataagacagtgttggtttaacgaatgagggagggaatgagggaatgactgaatcaagcaagtaagcagatatagaaacatgggcgttttcataaagcagagtactcaacagtgcctgtgagcatcactgacaggccaaacacataaaacaggcagaagggagaaaaggaattgagaaaaagaaggacaaggaagagacagaagggggaaggaaagagcagtaagaactgaaaaaggctggagtttcctggagtgtgcagttgtggagccctagatctgtgggtttggcccttactttgctcgtatctctagttgtttctttgacattcatcttgtgtctgtgatgaaactttaagtttcttagtaaagacaagaactactattgtgtatctctttagtacctaatacaattctacaagcatttac

SEQ ID NO: 11235 - DNA, 1012 bp, Homo sapiens
agttaacttcagcgggagtgaacgacaggggtgggctccactttatccagtgcactcggaagccggagggcccccaccaaaaagagcaaggggaaccctcgccctcaacaaggcctgcatctccggactggagctcaagtatagcccagcgagtgtcaagaaacgaaattctccaagggtggcggaatcaagccccaagtcccatgtgtcactggaccggtgaggaaccgaactcacctgagaaacgaacacccacacctcacgctcacgccgaccggaagtctttgcacttccgtcttccgggcggaggccacccggggcggacgcattgcacgccgggagacaaaatgtctcaagaagccttgagaggcgggattttggaacccgggcgctgacgagcttccgccattggtgtgatcgcggacctagaaacttggtccgtcccatacaggtgtagaagtcggatttggagaatgctgacgggtgtccggtcaaggttaggccccaggtaggtccgctttccggacgtgggcagggtagccccgagactaacctatggagtgaacctggccaggggaccctacttgtcagatagggagctccgagccgacctttagatctgacctcagcgtttacatgatactcatgtatttccttagatcaagtcagcctagatcaggtgttcttccagaggccgtattgagatcatttttatttgcagcctgtgcattttctcatctcgggtgatggcctcacagatgtacacatatgtaaaaccgtatcaaactgcacactttaaatatgtgcaacttattgcatgtcagttatactcaaagcggttaccaaaaacagaaaacaagcttttcctaccccagagaagaatttaaagggtaaaatgatcaaaggatttcagttctatcaatgtttacctgtctgatcacttacgtatcagacacaatgctaagcctaggacgattgtcttagctcacgaataacacttactgtacaacta

SEQ ID NO: 11236 - DNA, 1037 bp, Homo sapiens
tgtaaagagttggagaggttcctctagccctagccctgacctgccattttttagataaagaaacatggtagttggaagatttctgaagaaggtaatcattgaattggactccaaggaacatggagactcaggtgaggagaaggacattggacttaggggaaaggcctttgcaaaggcatcgaggaatatgatcgtagtgtgcctggaggattttgaggtgacttcattgactggaatgaagcctgtgtctgacagaatagtggaaattaaacttgggttagacagtgaattcgagctttaaagttagtaaagtattttgacttatctcattacatccttgataaagtgatgttatctccacatttacagaaacgccagttgaagtgtggggatgttaaacattttgcctaagatctcagttaggtgtagaactgggacttgaaatggagatttctggccttccagcttgttgttctttccatggtgtcattatttcctcatttattacagatgctgtacactaacaatgaaactcgaacttgatctcttagggagccatttaggttcctaagcaagagagtgaaagaagttttaaggaagatcatatagagtcatagagccatgagccacttatcatatcttgcctgttacctttatttatcacatgaatgaatggagacctagagatgttcagtgtagtttatcagtggaagagttttctgatcagtttatgatcttttttttgtactatgccttcatgtctgattaatctgaaggattgaattagaaggggacacccgaaagggatcattaccaagttttatctgatgtgtcagctctgattagttggtagtatcttaatatctgcttgggatgctgagtgagagaatatttctgaagctatgtttaggctcaggagagagtgcaagagcacggaaagagcactggagtgccatttatcatccttggactagggttgccagatttatcagataaaaatatgaataattttttagtataagtttgtatcaaataat

SEQ ID NO: 11237 - DNA, 1035 bp, Homo sapiens
agtacatagttacttctaaatgccagacccagagctgggtgctagagataccacagtgagcaaagcagatgtgatcctacaaggagctgatagccaattgctttggttgctgaagcctttcaagggttggggaaggtgcatgatttctttttctgaagcagagggaatacaagtacgtagggtagactaactacatttttacaaaattaactttgttattttaattgttctaacaggtgggagaatctccacaagtgtcttccagacttcagaatttgagactgaataatttaattcccaggcaacttttcaagcccaccgataatcaagaaacttagttttatttcaaattgttccgagtaactatgtttttctattggagacaaaatgaacatcgtaacgtcaaagtaccaagataaaaaaagtttcctataactggagttttaaggtatttgtgttagcaaatgttttaaatccatttcatcaaagtattaatgatttcaacacgtcatcatgagaactggtagcactggacataagtgaagagattagatattttatatacatatatatttttatacaattatgtacattaagccaggcacggtggctcatgcctgtaatcccagcactttgggaggctgaggcaggtggatcaccagaggccaggagtttgagaccagcctgaccaacatggtgaaaccccatctctactaaaaatgcaaaaattatatgggtgtggtagcacatgcctgtaatctcagctactcaggaggctgaggcaggagaatcgcttgaacccgggaggcggaggttgcagtgagctgagattgcaccattgcactccatcctgggtggcagagcgagactccgtctccaaaaaaaaaacaaacaaacaaacaaacaaaaaaaaacaaacaattatgtacattaaaacattgtatttttaggataatgcctcgtaactttgatgatcgttgtgtgttacctttgccaatgggttgaagcagtggcaaagaaaaggtgtaattacat

SEQ ID NO: 11238 - DNA, 1027 bp, Homo sapiens
aattggtattaactcttctttaaattaatctggccctgggcttttctttgtggggagtttttgttttgttttgtttttgttttttgagatggagtttcgctcttgttgtccaggctggagtgcaatggcacgatctcggctcaccccaacctccacctcccaggttcaagcgattctcctgcctcagcctcccaagtagctgggattatatgcatgtgctaccatgcccagctaattttgtatttttaatagagacagggtttctccacgttggtcaggctggtctcaaactcccaaactcaagtgatccacctgcctcagcctcccaaagtgctgggattacaagcatgagccactgcacccggcatgggaagttttaaagctactgattaaatttctttacttgttataggtgtatttagcttttctatttcttcttgagtcagttttgacagtttttctctagaaatttgctcatttaatctatattttttaattttctgacatacagttgatcatagtattcctttatggttttttaaatttctgtaaggctggtagtaaagcctctgtttcattcctgattttagtaatttgagtctctttttttcttggtttagctaaaagtttatgaattttaatctttttaaaggaccaacttttggtttcattgattttctttactgtcttcctattctctatttcattaattttaactcttgtcctattacttttaggagggcctcttaaggaggggtcgtatgctgacttaaattgagggttggtcaaagttcaaaagcctgggggaaggaagcttaatattttctctagatcagtaagtacaagcaattcagctaagaatttgcttcatttatgaagcaaagaatggtaattttcaggacagtctgtgtctgattttgttataagtaaatgggggaagggagataaacatctgtgagtcttatctaagtcacccggggaaggatggttctttataataagccatttcctggaacacgcaggcgat

SEQ ID NO: 11239 - DNA, 1041 bp, Homo sapiens
tcaggtagcgcgaaggggctaaaccacccaccattgtggagaagggagttgctctaggccgggagaccgggcgccgggcctattcgcttgccatcctgcggcgctaggccgccttgctcgctggggcccaagctgctgcccactcggggacccggcagcctcctctctgcccgcaggtgcgcgtgggccttgctgcattcaggtggaatgatgaacttttgcgctcttggctgatacatagttcttttgtggattattaattttcgtgaaggtgggaagaagggggaggggagccaggatggaggaaacttcgctcatagggttttcccgccagcatcactgtcagttcctcttgtcaggtaaaaccaacttaggaactcggggtttcagtctcatgtcctcatatccaaaatcactgccaaaggggtggattgctggatcttaatcatagcagacggatcttcaaaaggaagagatgtttaatacggacctggtgaatatgaagctttattacagcagttctgttcaggagatcggtactgttggttccaaagtgttgtaatatgcatagtgaagatttgttatatttttacaggttatctttgtttttatttttccttgcacgcttcggtgattgttgcattctttcccgcctcccatctcttcacaaataagttctcaatctaaaaaaaaaaaaaaaaagaaaaaaaaatcgcttatttccttatacctgttttgttctctaatgcttagtggttgtaatttgggtgcattttaaaggaaataacaaatagtcttcaactaaaattgtgactaaagagcttgtttgttttgtatgaacaatatgttttaacacttgaaaatgtgtccaaaccgtgtggactgggaagaacttttcggatttgtgaaaggagaaccatgaaaaagtagtaattgtgttcctgattaaattgatatactggcttattaaaataatcaatgaccacaaaaccacgtattactttaaaaaatatttctacctaggcagctcttaaatgtatt

SEQ ID NO: 11240 - DNA, 1632 bp, Homo sapiens
aggcatgagccaccattcctggcacagaaaatcatttagagattttggaaggagaaagtgacaagatgattgtgtagttttggttgttgttgtttgtgtttggttttggttttgagacaggttttggcccaggctggagtgcattggcatgatcatggctcattgcagcctcaatttaccaggctcaggtgatcctcccacttcagcctcctgagcagctgggactacaggcatgcaccaccacacgcagctaatttttgtgttttttgtagagatgaggttttgccatgttgcccaggctggtctcgaactcctggggtcaagtgatctgcctgcctcagcctcccaaagtgccgggattacaggtgtgagccttcacacccagacttgtggtttttgtttttgttttttaatattttcccaagccaatcaattagatatcctataattggggatttaggtctagattcccggagtcagtttggcaatgtaaatttcagtgctgcattcacttagctcaggtttcagttgcattggtagataaagtgataatttaatttttctttcactatgaattagtctcaactaaatttgtgttctgaatatttgcattgaggtcagaggccagacatttagtagtggccaggcatcttgaattcatttgttgttttctttctttttttattttattttaaggcaaggaggacttcttgttaatttccatccttcaattctgacctgtctacttccccagttgaccagccctagacttgcagtgaggaaaagaaccattatcgctcttggccatctggttatgagctgtggaaatatagtttttgtagatcttattgaacatctgttgtcagagttgtccaaaaatgattctatgtcaacaacaagaacctacatacaatgtattgctgctattagtaggcaagctggtcatagaataggtaagaaatctttaaaagttttacagttttctttaattaaaaaaattaatgcatgtttttaaagaaccattatgcttttcttaggtgaataccttgagaagataattcctttggtggtaaaattttgcaatgtagatgatgatgaattaagagagtactgtattcaagcctttgaatcatttgtaagaaggtaagtttttaagatctctattttttacaaaaagtttttccttaagagtagaatcataaggtctacattaggtgtgtgaggagaagcggccttttggatttcagatataacagacaatacagtatttgaaactaatgtcatcttgctattataaaatgtggtcatcacatttattttgaaaattttccttgtcattgttaggactttatttaaagaattttggaaaggtatttataattattttgggtttactttagaagggaagaaatgccagtgtaataatgtagtctgtactgaaagcccagcaggataaattattcgtcagaaataagtagtgaattgccttttcaacaatttcttaggtcacatccattttgctaggtcagtgattctcaatttggaaactgattctaatatattttttaaaagcttagtaaaagttgtgtatttgtgtactagaaggcaatacaagataagtaacattatttt

SEQ ID NO: 11241 - DNA, 1154 bp, Homo sapiens
cagtggtggcttgtgttggagacccattttacaaaattacatctgaagcacttcttgttactcaacagcttgtcaaagtaattcgtcctttagatcagccttcctcgtttgatgcaactccttatatcaaagatctatttacctgtaccattaagagattaaaagcagctgacattgatcaggaagtcaaggaaagggctatttcctgtatgggacaaattatttgcaaccttggagacaatttgggttctgacttgcctaatacacttcagattttcttggagagactaaagaatgaaattaccaggttaactacagtaaaggcattgacactgattgctgggtcacctttgaagatagatttgaggcctgttctgggagaaggggttcctatccttgcttcatttcttagaaaaaaccagagagctttgaaactgggtactctttctgcccttgatattctaataaaaaactatagtgacagcttgacagctgccatgattgatgcagttctagatgagctcccacctcttatcagcgaaagtgatatgcatgtttcacaaatggccatcagttttcttaccactttggcaaaagtatatccctcctccctttcaaagataagtggatccattctcaatgaacttattggacttgtgagatcacccttattgcaggggggagctcttagtgccatgctagactttttccaagctctggttgtcactggaacaaataatttaggatacatggatttgttgcgcatgctgactggtccagtttactctcagagcacagctcttactcataagcagtcttattattccattgccaaatgtgtagctgcccttactcgagcatgccctaaagagggaccagctgtagtaggtcagtttattcaagatgtcaagaactcaaggtctacagattccattcgtctcttagctctactttctcttggagaagttgggcatcatattgacttaagtggacagttggaactaaaatctgtaatactagaagctttctcatctcctagtgaagaagtcaaatcagctgcatcctatgcattaggcagcattagtgtgggcaaccttcctgaatatctgccgtttgtcctgcaagaaataactagtcaacccaaaaggcagtat

SEQ ID NO: 11242 - DNA, 1052 bp, Homo sapiens
ttaaattgagtgaccaatttaagcaatcagatatttgaaaactgcaccctttagttttgaaactgtgaattagaaacacttttcctgctgtattactacctgctttaacatccaaatatacagtgattttaaatgataacatactgtggttattagattaacagcttgattttgaatgttcagatgataatgcagaagacatcacttctagtaaggattttgactagtgcattgatgttgaagttggtgccatttcaaaatgtggcaggtgataatcttttaccataatttgcataaaactgtaatagaagtttattttgagatgttagtatattatgtactatgcatttctgtggtatagatgttgtggatatatttaagtatttggttacatggttttacaataaattacaatactgcaggctctaggactgaacaggagactgacatgcatatgttgtgtgaatgtcttagttgggtaaagttaaatccaaatacttcaactggctttttcttcagtttgtttgtttttaactttcaagatgcatgttttgttttgttttgctttgtttttgtctcttaagccaattcatttttctaacagttgaaattcttttagtactaaagaaatagatactgctcttttatggctttagtgtttatatacctgtttatatgcatacattaacaaaattagtaacagcagtgcttagaatttcaatgctgtgtcatactgatgattaactccatactcctagtggtgatgtggtccagatactggaatggaagtggcaggatgtggagtccagacatagtctaccactcatgctacttactagtaatattaaggtgttaaacttaggaatttgtcacatgtaggttcctgaggagatctaaaagttaatacaaaaccaagctgtttactgattttcatgagaacatttaagttagtttaggtctacctgatttattttaaaagaaggcagagggctggacgcagtggcttacgcctgtaatcccagcactttgggaggccgaggcgggcggatcac

SEQ ID NO: 11243 - DNA, 1028 bp, Homo sapiens
acttcaccagagccttcagtctgacagacagagctacatagagtcttagcagagtagctgctcaggcatgggtggagacccagaagccttagaaaatcaagctttccagcaaagtaaccgcaactcctgcaaagcgggagattagacccccgtatatacccgtaggaaagtggctgaatccaagaggctgcgcagtgacagtctgcaggccccacttccacagcatctcataggagaagacccacgggcttggaaatccagccagcccctggtagccgccttgcgcctccctgaaatggagctccctgggggaggggtgagccgccatctccgctgctgtttgggcaatttagccacgccagccttcaggctttggaaagtccaagccgactgggggtgggagggatttcccagtacagcacagctgcgctacaaaaatatggccagactgcttctttaagcaggtaccccaatcccattccttctcactgactggggcctccagccacccctgccagtgttctccagctgacagatacttgaattctccctgggagagagctcccagagggaggggcaggctgccatcattgctgtttgggcgacttagctgttccagcctttgggttttggagagtctgagccaaccggaggtggaaagggtaccccagcacagcacagctgatccaccaaaatgtgaccagactgcttcaagtaggtccctgatcctattcctcctcactgggtgggacctcctaaccagggtctccagccacctcctacaggtgtgtttgggccggcaacaggtccatacctccctggaacaaagctcccagagggaagggcaggttacccatctttgatgtttcacagtctgcactggaccaggtactagaaaatctgcagcaaccagggactagagtgggtccccagcacagtgcaacagcctgacagaaaagtggccagattgttacacgggtgccatttccatatctcttgaggtaggtcctcaaggcctggacctctag

SEQ ID NO: 11244 - DNA, 1034 bp, Homo sapiens
aagtttttatattaagactaaaatgaatgaagggaagaagggagggagggggagagggaggcaactagattcgtgagaaagaaaaacagactaggaggtcagcaaaggctgctgtggcctagtggctgaatgtggtgttctgaaggaggaaggagctcaagagcaagcaaggcaaactccctctccccctccctgcctttcttcttcccttcctttcatagaaattaaacttttactctctaagatggtatatttggatttggcatatttgagtttaccaaaacaaaaaaaaaattataaaaagtgaaagaggaggagaaggaggagatcaatccctgcctttgaggacattatgtttaattaggaagacaagattggacagaaaatattaagtttagaacattgaaagatgaaattcagaataagtgcaggtcatttgtgttgctcttggataataatagctttcagaaggtgggtctccagccaggacttgatggaattcagattgagagagagaaaaaggatattctaggagaagcaaattgctttaactgagggatgtcatgaatcattcattcgtatgtcatccagtatttactgagcacctacgtgtataatttttggcataatgcaaaggatgggcaaagagactgggtttgtggcagtgtgaagaagggagaataatttcttcggaaggtaggccttgtcctgtggtttttctcaaatgtgccatgttgttgtagccacaacacatgtgctgtctctgtctagagtgcatttgccaatctctgcctcatcctgtgagattcagcccagaccagatgtcactgcccctacaaagtcctctttaagctgaggttgagcaagatcacccttaccaaaaggtaacactggcaatctctctgctaactgcaaggtgagtagaactgagttgagaaggcagcagaatcctctcccctgtttccctccatccttcccattgggcacacactggcaaaaaaaaaaaaaagaaaagaaaaacaaaaagcaagtga

SEQ ID NO: 11245 - DNA, 1043 bp, Homo sapiens
tgagaaagaataacagactgggaagtcagcaaaggccgctctggcatagtggcgtggatgtggtgttctgaaggaggaaggagctgaagagcaggccagagcacggggtggaggcttgccaagtctggagtttggtgagccaggggaaagctcgtgcaggataaggagggacagaaatgcaatgccggaccttggagaaggccacacagaccatttggaggagctgggaatttattctgattacaccaggaagccattgatgcatgtacaataaattaaaaaaaaaacaaaaaaaaaatcattctggtttcctatggagaaaaactggaggggagccatatggagatggtgccactctatgagacagaggacttctaaccatctgggaggagttgagagagatcatttgatggaagaatggtcctccaccagaagttctgtttaagaagtgaagtgaggtggggataaggctacgcaggattctgaggataccatttgtgttgctatttttgtaattgaaataatgtaggctgaaaaaaagtgtttttacagcgtgactacgtaaaaattacagatgcaatgtaattaatctataaaggacatttaaaaccagtaagaaaaatgctaatattccagtggaaaaaagagacaataataccttcaaaaaatttacatgagcaacataaatggaccaaaaaaattataaattataaatcaaagtaataaaaattaaagccatgagtttatttttaacccacaaaatatcaacaattaattaaacaaccatttttattgctagcaagggtgtggagtgatataaagcactcgtttgatgctgctggggcataattagcagagcctttctggagggcacttggtaatctgtaccaagagctttagaaatgctcattcatttttacctgttgattctacttccagaaattggtatcagaatccatgatgtaaacaaagagttatgtacaagaataatcatatctactagcacaaacttagaaaaaaaccttgtatctattaacagaggt

SEQ ID NO: 11246 - DNA, 1063 bp, Homo sapiens
gatggaaatctggtttttgttttgctttttccagtttttggctattacaaatagaactgctgtgatccttcatgtacaagtcttggtatgggctgggatttcatttctttgggataaatacttagaagtggaatggctggattatatgataggcatatgtttaaatttttaagaaactgtcaaactgttttccaaagtgttttacagtatatgagaattccagtttctccacatccttatcttggcagtcaactctatcagccattctgacagctatgttgtggtatcttattgcagtcttattttacatttccttggtgactatttatattgactatcttctcatgtttttgtttgtcatctgtatatctttatggaaaagtatctgttcagatattttggtcgtttaaaaaattgtttttttttctttttattgagatttcagttttctttatgtattttggatacaaagctttcattaaagatatgatttacaaatgttttcttccaatctgtagcttgactttttattcttttaacagtgccttctgaagaatagaaattttttattttggtgaggctcaatctttaccttttttcctttcatggattatgcttgggtgttatgtttaccaaatatttgcataacctatgatcacaaagattttctattgggtttagtgttaggttttgtattgaagtctgtgatcagtttaaagctaatccttgtgtgtggttgaaacaaaattaattttttttgcatacatgtattcaattgttccaatgccatttgttgaatctctcctttcttcaccaaattgcctttgtacttttgccaaacatcagttgctgaaatatgtgttggtctatttatggactctattttgttccattgatatatttgtttatcttgattctaatatcagactgtattgattagtcttataataagccttgaaagtacacagttagttctccaactttgcttttctttgtcaaaattgttttggctctttttttttttttttttttttttttgagatggagtcttgctctgtttccc

SEQ ID NO: 11247 - DNA, 1106 bp, Homo sapiens
acatttaatctcaaacatattttttcatttctagaagtttgatgtatacattttaaatatcttttagtgtctctacttaagtttttgaacatatatagctgtaatagctgttttaatatccttgtttgttaattttaacatctgcctcaggtttggtttggtttcagttgattgttttcccttcattatggtcatgttttactgcttctttgccttcctggtcatttttttattgtatgccagacattgtatatttttttcctattgagtgttgaatttttttatttctataaatattcttgagcagttgagttgtttggaaacagtttgtgtttggggatcaaacctttatgatttgttaatcaggaccagagaagtgtttagtttagggctaattatgctccactactgaggcaagatttctttgagtactctaccaagtgattcatgaattaggagattttctagtctggctgatgaaagtaagcccttttccagtcatgtgtaagaacttgatactgttccccttaatcctgtgggatggttcttttccttatctgcggttgtttcctcttatgcatgtgataatcagtagtgtgatgaatacttgagaggatccctttacagaacttgccatcatatttttcatagagaatatcttgcattagctgattgaaatatttattcttgattggtacttggcagtcctgtttactacctgtcctgtatatggaatatcactgccaactttagcggggggggatgggactgggtgggcagttcctgcaaaaacttcaaatgactaattagaaatgtcagtggcattttctccctcagaaacatcgctgtttaggatcgtgaattttcttttactcatatttgattcgattatctttctttcaaagaatttttctagaatgaatattttacttgtatattaggaatagtttttaaataatcagaacacaactgctctcctcaattatcatcattctcattactcattccatttctctggctggcagcctatggaccactggaaggcccggccaggggtgtggtcatcaggacttcccaaaagcacatctccttcctctgtggcttga

SEQ ID NO: 11248 - DNA, 1033 bp, Homo sapiens
gcttgagcctgacagcgaaaaagtttgcctgaaacggggcttgcttgctccatttgttgcgggaagtggcaggaggaaggcagcggagagagccccacttagtctggcagcagccaccgtgtagagaaaaactgttaaaggggcctttcccttcgtcagcaagaggaaatctctttctcttagagggagagaaaatccaggaagtttgtcctcttctctttttcgccatctcgaggtgtctaatcctaaaactatcagcgccatgaattttatttaaaactacgcccagtgaaccgggctctccggatttttcttctgaaaaacactgatgtcttttggagaaaagatcatttttgcaagttaaagcagatggtttccttccccttcgctttcccccctctcccactctctttaatagtttagaaaaacattttggccctgtaacttctgattggtatgaatagaagcagttctgtgttgcagtaaggggaaatcacatttttacggggtagaaagttgacactaaatgaagattgtgattttagtattttaaaattaattccgtctaattggattttggttttgcaggcagcatctcatatatgtcgagtacttaacaatttaaagctctgacttgtaaatttatttttcagctctcttttttcgtaattagaatactgtttggacttgctcaacaagaccttatcttaacaaaaagtaacttatagaaaagggagacattcatttaacttcaagcccatattattcttaaaagctgactcttgaaatagtatttattgagtcatagtggagtcatgggactttttaagggccggaagggactatttagatcatccagtcccaccctgtcattttatggaggaggaaactgaggcctagataagataaccagttagtgggtccactgacctttaggacagtagtctatccgtaagagacaacatggagaaagaaatacaacgtttttatagtgaattatcatcttacaaagaatattcttcccatatcgcac

SEQ ID NO: 11249 - DNA, 1047 bp, Homo sapiens
ccagggcgggcggatcacttgaggccagaagttcgagaccagtctggccaacatggtgaaaccccatctttactaaaaatatgaaaattagccaggcatggtggtgtgttcctgtagtcccagctactcgggaggctgagcaggagaatcgctggaacctggcaggcagaacttgcagtgagctgagatcgtgccactgcactccagcctaggcgacagagtgagactccgtctcaaacaacaacaacaacaaaagctcctcgatggaaccatttgatagtgacaaggattgaagtaagtatctgaagaggctacttagaaactcagaattggttacaggaagtgactgcccactttccatgtgttcttcagatgctctggttattctaacagcctagttaaccacccagactttggttctcattgcctttatccatttgtttggtgtatatactaatgttcaacgatgcacacataatgcatgtgatgttttttggataccgtcttatcacttgtagaattgccatgataggcattttttggagctactttaagtacttgctggcctagtaattatgcaagtaagtaattaagtgtttattcatatgtgaaagcccaatgtaagcattatttatgtctttcagtgaagtgtggtgtgcctttcatttttctgagtggtctttattttatggaatattaaatggatctttgaataaactcaagagggtagattataaaaggaagaactgttaaattagtcaaaaacaactttataacacaattagctgcataagccagtgcgtgcgtaagcaggtagtataaatgcttaggttgagatactaaaattattattagagaaaattacaggaagtacctatgctcccactatgttttgttacttggttaatttttctcctctgaacttctggcaggtttactggggaattttccattaggaatattctggtccttaagtttcattttgaatgtataatataatcatgcagattacgaacccacaatctaaaatcaaggcattctttttta

SEQ ID NO: 11250 - DNA, 1056 bp, Homo sapiens
tatgtactgggggcttaccttcttgctgtaggttccctttatatatactgttttatcatcctcatgaatgatcttaaacaactcaatctgttaactaagtgaataatgtacctgtcacatagaggtattgaatgaatgttataaatatgatagctatctatgccagaaatcgttggttttggtagacagacttcagcattcagcacgatcattctcagtaattctttataggtgttttgatttgttttgagggggttgtttggcatatattttgcaactaattaattcatttttgtaaaaccatcagacaacagtgctagatgtttaaaatattctacagcagaaattttcaaatgtttttggaatcattaatacaaccctgtctctccttcacttaaaccacagtagccattggtaattgagaactagattctttccctttgagtcctagttgatctcaaaaatcattctcaacactgcacttagctacaggtagctgttaatattttgagttgatgactaagctgaaacccatttgccacctgtgagttaatgggcaaggtctatccttgtctcttccaggctctagcctatagtgcaagtgttggcaaactttttctgtaaaggacctgataactattttaagccttgttaaccatacagtctcttatcacaaccattcacctctgctattgtagcctgaagccagctgtggacaagacacaacaaatgaactatgttccattaaaactttatgagtgtgactgtgttccaacaaaattttatttaccaaaaaaaacaaaaacaaaaaaacagggagcaaatgggatttggcctgggagttctagttggccaacctcccctctagggcaagaaactggttttgattcattcaacaaataattaggtgtcttccatattccaggcactgtgttaagttttgattatatagcaataatcattacacgtaggccccaggtcatgaggtatttaacccttaactgagtatggttttggggctttttgcttttttggttttggggtcttttttgtttt

SEQ ID NO: 11251 - DNA, 1036 bp, Homo sapiens
agtgcagtgggagaagtaatgttacctgacttcaggaaccagtatttaaggcctctttttttgagacagagtcactctgtcacccaggctggagtgcagtggtgcgatctcggctcactgcaacctccgcctcctgggtacaagcaattctcctgccttagcctccctaatagctgggattacaggcgcccgccacctcacccagccaatttttgtattttggtagagacggggtttcaccatattggccaggctggtctcgaactcctgacctcaagcaatccacccgcctcggcctcccaaagtgctgggattacaggcatgagccagcgtgcctggcctacttaggcctgtttttataatttagggtcacagaatttcaaactggggttagggggtgagtgtagtagttaaacaacttgagattggagaactgcttttgcaaaatttccattttggttatacccatgaaattttttttttgttacgaagtcttgctctgtagcccaggcttgagtgcagtggcaaaatctctacttactgcaaattccgcctcctggattcaagcgattctcctgcctcagcttcctgagtatctgggactacaagcgcccgccaccacattcgagtattttttttttttgtatttttagtagagatggggcttcaccatattggccaggctggtcgcaaactcctgacctcaagtgatctgcccgccttggcctcccaaagtcctggtattacaggcatgagccatgacagtcagctattttttttggcatattttaagggacagaaattatgctttttaaatgttgcttattgcttttcaaggatttgattcttataagctacttcttcatttattaatgagatttaagaaagaaatcaggttacaaagttatgagcaattgtctctggaacccagaagttggttttaacactagagtttctgctgcagggcatttttactggactgtgattcctagaaggcaagtataagcactgtttttttgttgtttgtttgttttag

SEQ ID NO: 11252 - DNA, 1046 bp, Homo sapiens
atatcaaacaaccattatgaagttagagaaataatatttagattatattaaattttattaccagtgcaatttatttttttatagtaattaaggaatctaacttttttttgttttttgagacagagtctcactctgtatgcctaagctggagtgcagtggcgcaatcttggctcactgcagcctcggccttccaggttcaaatgattctcctgcctcagcctcctgagcacctgggattacaggcatgcaccaccaaacccgactgatttttgtattttttagtatagacggggtttcaccatgttggccagctagtgtcgaattcctcacttcaagtgatctgcctgcctcggccccgcaaagtgctgggattacagacatgagtcaccacgcccaacctaagatgcttttaaaattccatttatgtttaattcttcaaagtctggtacatgtaacattattataacaaaacattttataattgaaagggactttagggatctagtcgagaagtcaaaaactgctggaccagggttcagagctcttatctctcaaattgattttgttggtttatacaatattcataatttttagaattcaaatgactttacccgtaaagcattcactccctacttgaccacagtctatgttattacctaataagaccttaactgcttcaagcgtttacatggttacctggctgatgtaagtcatctgagtgttcagtatttcccctttccctcattccatctttttgtagacaaggaatctggaaaccaagaattaagtgatttatctcaaaatatacgactttttaaatagagcttcttaaattcaaagttaatgttactttctacagcttgttgtctccttagaaaatagtacaaggtaatacgtaatcaagtcctaaagtatttggtataacttgtcatgaaggagaatgatcactgtgggctgagttagtgcaagaatgcttcagagacatttccttgacactaacctcctaagaactgcatcttgagatatgctgccctgatctgtgttgt

SEQ ID NO: 11253 - DNA, 1231 bp, Homo sapiens
aaaagctaccccataagaccagtttttattttctttgattcatgtcttcaggattttctgttaactcagaattattatagcattcattattgttttgtgaaaatactagttaataatctccggttaatgaaataattatcttagataaatttactgaacttaatgtagaatatgttttttgtttcgttttgtttttgagacagggtctcacttgtcacccaggctggagtgcagtggcacaaacatgggtcactgcagcctcgactcctgggctcgagtgatgctcccacctcagcctctcaagtagctgggactacaggtgtgtgccactacacttggctaattttcatattttttgtagagacggggtttcaccatgttgcccgggctggtcttgaactcctcctgagttaaagcagtctgcttgtctctgtctgccagagtgctggcattataggcatgagccaccacccccttcttccactttcatttcaaacagttatgaagcagccactgaaaccggactctcgacaatgccaaaggaggttttgttttcttgtctttccatgtctttgctgtggtttgctctgaaactagaattaaacagctttttaaattgataaaaaagaaccaatgcaaataaaactacggtctgtagagtaaatggaaaaagttgtagaagtaataataaactacttttaaacaaatgagtaaggtagtagatattttgcaagaagtaaatagccaagtgtaaaagctgtcagttactttcatcaatcaggttagttgcagtcacgcaaattttaggtgattatataaggaactcaaattaggaatctttaaatgtaaatgacctaatactaaaaactacccaaaaaatatattcaaagataaatagaagaaatacttatgcatttgaaaaaatcgatgcattccacagttcctctgaatcaaaggtaaaaaaaaaaaacagtgtagaaaatactttgaacagtagtggaatttttagtattttgatagctttctttagaaatttaattgattttcttcatctgtaatcttagattgtgttggagaggcagtgtgaatcatgcataaagtttataattgtgtatgtgcctacatgatgtagaaattgcaccttttggctgatgaagtatcgtatagttgcactgttgataacattaagttcatttcgcatatatgctacagtcttttctgtttaacgcgt

SEQ ID NO: 11254 - DNA, 1031 bp, Homo sapiens
attggggtagttatagaacaacttcacaattcctctgttaacttcagtttttgtttcatttgttttataattttttctatttattaacaatagaactgtcaggaaaaaaaataagcaaaaggaaaagaaaattccctatccccccaccttgtcatgtattttttttcttttttttattccagggaattgaaattcattttctattataatctcaagattttttccgtactcttgaggtaatgtaataatgagattcctcctaggctgtcaaaattacagtctgcataacttgaggtacaatagatttcattaagacttctgtgattaatattagcggtcagagacaatgccaatattacaggatttttgtttagtaatgtgttttttaaatacttaaaagagggctatttcccagtcattatctctgaacatttttaaatgattcaaaatactgatgtatgcacaggtttttgcttttttatattgacatggagggttcttacatgtttttgagctagtagattaaagagtggaacagtgggccgggcacggtggctcacgcctgtaatcccagcactttgggaggccaaggcgggcggatcaggagattgagaccaatctggctaacgcggtgaaaccccgtctctactaaaaaaatacaaaaaattagctgggcgtgatggtgggcacctgtagtcccagctactcaggaggctgaggcaggagaatggcatgaacctgggaggcggaggttgcagtgagtcgagatggcgccactgcactccagcctgggtgacagagcaagactccatctcaaaaaaaaaagtcgagcagtgattctcaactgaaggaatagcagtcctctttagtgtactgagtggcagctcaaaccattgttactcttattttaaaagttacttttttttttttttttttttgagatggagtcttgctgtgtcgcccaggctggagtgcagtggtgcgatctgggctcactgcaacctccacctcctgggttcaagcagttctcc

SEQ ID NO: 11255 - DNA, 1031 bp, Homo sapiens
ccccgtctctactaaaaataacaaaaattagacgggcacggtggtgtgtgcctgtaatcccagctactcaggaggctgaggcaggagaatcacttgaacctgggaggccgaggttgcagtgagctgagatcacaccactgcacttcagcatgggcaacagagtgagactgcaaaaaaaagaaaaagaaaaaaaaatccagtctctgctggcaaggtgtttaacaagtcaatgatgggaaagaccagtcaaataaactatcagatctaataacttttctaaccataggtgattcttcttccattatccatactaaagcaagtgactcataataaaaattgttattttgtaaaatatatggactgtttgctttatattcccaactattacatctggttgactattaacaggtcaatgtcagatttcctgagcaaatcaaccaataatgaaaaactatgtggctggcagaaaaaaataagtgcgtgtggtggtgcttgcctgtaatcccagctgcttgggaggctgaggtaggaggaactcttgagctccggtggtttgaggccagcatggataacatagggagaccctgtcacttgacaaaagtatctttccctactggaaatggaatagaatcggatgggtatggtacagcaggtagttatggggagacctctactgttctaaatgagactaatagtaaatgttacataactaaagcaacagatttgccagctgtgtgaaagataacccagagaggggtaatggtagagccagaattaacacagccagcttgtcagctacctttgaacatgtattttctgtgcagtcagatttgaagggttggaccttggagttactgacattggaggcaactgaaaccatgagtgtgaatgaaattattttcgtaagaattacttggggttaaaaatagtaataaaaaggaaagcctggcctaaacagtcttgggatggggagaagggttggagtacaaaggattgctattacaaagacatgggcagagaacaaggcaaat

SEQ ID NO: 11256 - DNA, 1102 bp, Homo sapiens
aggagttcaagaccagcctgggcagcatagcaaaaccccatctctgcaaaaacaaacaaaaaaagaaatagaatgatgaagatccaaaagacaccaccaaatgctggagaggatgtggagcaacaggaactatcattcattgctggtggaaatgcaaacaactatagctactttggaagacagtctgcagtttcatacaaaactaaacatactattgtcatatgatccagcaaactcattccttgatatttacccaggtgagttgaaaactgtatacacaaaaacctacacagacgtttattacagttttattcgtaacaacttgaaagcaaccaagatatccttcagtgggcgaatgaataaactggtacatctgagcagtgaaacattattcaatgctgaaaagaaactggctatcaagccatgaaaaaacatggaggaaccttaaatgcatattgctaagtgaaagaagccaatttgaaaaggctacatattatatgattacaactatatgacattctggaaaaggcaaaacttggaaacagtgacaagatcatcagttgccaggagttagttgcgagggagcaatgaataggtagaacacaggatttttaaggcagtgaaaccactctttatgctataatgggggacacatgtcagtatacatttatcataattcatggaatgtacaccaccaagaatgaatcctaatgtaaactatggactttgggggataatgatgtgtcaatataagttcctcagttgtaacagatataccattctagtgttagatattgatggtgagggaggctgggattgtgtgggggaagagatatttgggtactctgctttctgccccattttgctgggaatttaaagctaggccaggcacagtggctcatacctgtaatctcagcactttgggaggccaagacaggtagattaccttaggtcaggagttcaacaccagcctggccaatatggtgaaacctcatctgtactaaaaatgcaaaaaaattagtggagtgtggtggtgggcacctgtaatcccagctactcgggaggctgaggtgggagaatcgcttgaacccgggaggcagag

SEQ ID NO: 11257 - DNA, 1028 bp, Homo sapiens
aaaaagccctcaacaccattagtcatctgagctaaaatgtacttctgtattaaggatttttgcatgtttttactgggattgtagtctgtctttcttcctttgacttgatttgattttttaaaaatagacctattaaaattacctcttaaaaaatttggtacttattatttctttcagggaaaatactctgcataccttaaaacaacggcagctgacttcttacgttggaagtgttcgtccgcttgtcactgaattggtaaatgttctttgaaatgaaagttgccttcaaagttaactgattttttttttcaggctgagaattttttctcgtggatctttgttttgctcttctaaaggtttgcacacactaacattttactctaaaacaactaagttgcattggaatctgatggaatatattgaaacatatccgtgacctttgaattgtaagtaataagttgtggaaagtatacttaacttgacagcattaaaaacaaattaattttggtcttatcttaagatttgactgcctatataaggtagtgactgacctatgaaagctcttttatgttgaaagcaagtgaaaaaaaactaaagccttattggtttgaggttagaacggttatttgaaaagtggatttgaaaagaactgaagctgaattattctaaaaacaaaggaatgaagctttatgacagggcacgtgaaatgtttatagtgaaaagagagaaataagtaacaattgaaaaaaacttctagaattccatttagtaacaaagaggtttttgatgaaaattgtttgggaaaaagaaaaagaaaattgtttggaaactactcttaacagcttaaaattgattatagctaaattacattgtagcaggcaacagctgaaaatcgtttaatcttaccagctggaaagtggtgatttccttttgccagaaagagaccatgttccaaaattgaattatgtgtttgcaaaatatttatgaaagtagtgaattgatctattatgtattccattttctgaatt

SEQ ID NO: 11258 - DNA, 1002 bp, Homo sapiens
attatttaataatggaatttgtatcaaaaattttgttactttcatataagcagtgtatttataattatgtctttttttcctatgaaggaggaagtttctattgaagttttaaagacatacatacaggtaaactttgagaacctacaacctgattgttttttactattttaatgaaaacaaaactcagaatgatgctattttaattctcagtggtaagaaagcatcagaatccataagagatcttttaattatcagcacagttgacctttgaataatgcagggattaggaaaacaacccccaccgccccgcacaatcaaaaattcactataacttttgactccccaaaaacctaactactgataccctactgctgaccagaaatcataccaataacataaacacacaattaacacattttgtatattacatgtatcatatgcagtcatccctcagtatacttgggggattggctccaggacccccacatataacaaaatctgtgtatactcatgtcccacagttggccctgcagaacctgcatatacgaaaaattggccttccatatttgcagatttcacatccagataacactgtattttctaagttgagttgaaaaaaatttatgcagaagtggacctgcacagttcaatcccgtgttgttcaaagctcaactgtactgtattcttatgataatgtaagttagagaaaagaaaacattactaagaaaatcataaggggctcggcgaggtggctcataccggtaatcccaacactttgggaggcagaggcgagaggactgcttgagtccagacgtttgagatcagcctgggcaacatagggagacccttctctctactacaaaaaatttttttaaattagcagggcacagtggttcatatctgtaaacccagctactcgggaggctgaggcaggaagatcgagtgagcccaggagttggaggttgcagtgagctgtgatctcgccactgccctccagctggg

SEQ ID NO: 11259 - DNA, 1044 bp, Homo sapiens
aacatacaaatcttatagcattttatacctgtcatttgcctcaagacctagctgttgcccagtatgcattatttttggaaagtgttacagaatttgaacagcgccaccattgcctggagttggctaaagaagcaggtaaaaatggttgaaaactttgtcttttggcctttctaggcaaatgttcattttggctgtagtaacatttgtccttatagttttaaatcttatttctgttgaggggaaaagaggaataaaattttcagggaatttctgttttaggactaaagttacttatgctgtaactcatatgtaaaatatcttttaattctggcattttcttttatataaatatctttcatattttacatattttatttttaaggaattactgttccaaatttactgaatcattatgactatttagagaatattagtatcaatgattaatctttgttttttgtcgcttcaaaaaattatttagatttggatgttgcaacaataacaaaaactgtagttgagaatattcgaaagaaagataatggtgaatttagtcatcatgacctggccccagccctagatactggcactactgaggtaatttgggatgggggggcagaggtttctataacttctaataatcttttatgttattccttggtgaacttctcccttcgtaaaagaagttctattaggttttcttttttaagaatgtgtctttgtcagcccagaccttttaaatttaaagtcttatgtaaaggattacttatagtagtatgttaaaggagcttctttaatagaaaaaaatctcagctttggcttgttgctcatcaggttattttaaatacttgattaatcactaacttatgtagcttgcttactcatattttcagaaaggaatagaaagttatatctaagaaaactattttagagtaacatttaaaggaatcacgtggttaagttggtaaggcatacaatatataattccagattaatattttctataatttatttttatttttattttcttgagacaacaaggtctag

SEQ ID NO: 11260 - DNA, 1050 bp, Homo sapiens
tcctatttttaagattatttcagaaattgtagtgtgtaatttctgtaatcccagcactttgggaggctgaggcaggaggatcacttgagcccaagagttcgatactagcttgggcaacatagggagacctcatctctacaaataataaaattatttttttttttaaatagaaaaattagccgggcatggtggcacatgcctgtggttcttagctacttgggaggctgaggtaggaggattgcttgagcccggagatcaaggcttcagagagccatgattgtaccactgcattccagactgggcgacagagtgagatgctgtctcagaaaagaagaaaaaggttaaaaaagaaaagaaaaaaaaaagaaattatgtggttggttactttctaattattttaattttcaaattttttgtaagtaaatgtagtgggcataagaggtttactcttttttctgtacttttactgttcacatcgattttaagaaagatccatgtatgtataaaggaatgccaattgttttttctgcttgttttccttatatatctgttctgactcattaattgtattattcaaatctataggttctgtttttctgtttttaaaaattatataaagaaattataaattccattttccatgtgtataagcaaagtagtctgcaatgaagttgaccctccctgtgtgcccctccccacatcgtctttttcccagcaacagtcattgctgtcagtctgttgtgtcctctcaggcctccttagagctatctttatttatatgtataaacatccaaaggagtggtgattgttttctgttctgatttttgctctaatgatattcagtttccaactcattctttttatgcatgtttttattcaggacatagtaagtttattagaaatacaaatgcagaagcattttattttcactgtcatacctctctgtagtctacgttgttcatcttcatacttttttgctgttaaatcttgtctaccaattacattctgggtttgattcagtacctggcttttctttttgtaaggatcttt

SEQ ID NO: 11261 - DNA, 1044 bp, Homo sapiens
actggtctttgaaatcttgtagaataattagacattttatcttcccctagtctataccccacattcccatctttgtgactctagttgtcgcatctttgattatgtgatactatttcttttgtgccagacatgttttatctcctaattttcagtgggtaggagccaaacagcatgaattacaagtgaactcaatgcagctgctgtactaccaggctccgatgtcatctgccatgttgctggttgctgtgcccttctttgagccagtgtttggagaaggaggaatatttggtccctggtcagtttctgctttggtaagttctaattgttttgatatctaagaaacagtataataataactcctccattattaatgtaatttttagttttcagagcactatgtccgatccattctcacatttatcgtcataatcaccataaaaggaggtaaggtaaggattctttttcagatgaagaaattgaggtacacaaaggtgaagggacttgcctagagtgaggcagctactcagtggcaaaagcagaactacaattaatgtcttccgatgcctggttactgttctgaccatgtcaagctagagcccacaaataatttggacatttagattaagttaaatttttttacaatgaaaacatagctttataatcactatttcgattttgaacatacgtaaaaatataaagaaagtgaaggggccaggcacagtggctcactcctgtaatcccagcactttgggaggatgagctgggcagatcgtttgagcccaggagttttagaccagcctgggcaacataggaagacctcatctctacaaaaaattaagaaatgggcagggtgtggtggctcatgcctgtaatcctgggaatttgggaggctgaggcgggtggatcacttgtcaggagttcaagaccagcctggccaacatggcgaaacccattctctactaaaaatacaaaaaaattagctgaggctgggtgcggtggctcatgcctgtaatcccagcactttgggagaccaaggcaggcaaa

SEQ ID NO: 11262 - DNA, 1070 bp, Homo sapiens
aaaaaaattgggccaggcacggtggctcacgcctgtaatcccagcactttgggaggccaaggccagcggatcacttgaggtcaggagttcgagaccagcctgaccaacatggagaaaccctgtctcaactaataatacaaaattagccaggcgtggtggcgcatgcctgtaatcccagctactcgggaggctgaggcaggagaatcacttgaacccgggaggcggcggttgcagtgagccgagatcgtaccattgcactccagcctgggcaacaagagcgaaactccatttcaaaaaaaaaaaattggtgacagactcaatgatggaatgatttgtcggaattaacacaaagcagattttattcatataatgacttttttttaagagtctcttttttaaaaaaacttaattctctaaaaccgaaatggttcatgcttctttttaaaaatgattgtataaaatgtatggaatggttagcctggtgtggtggtgcacacctgtaatcccagctacttgggagactgagacatgagaatcgcttgagcctgggaggcggaggttgcaatgagccaagatcgtaccactgcactccagcctgggcgacagagcaagacactgtctctctctctctctccatatatatatgtgtgtgtgtgtatatatatatatatgtgtgtgtgtgtgtgtgtatacatatatacacatatatacacacacacatacatatacatgtgtatatatataccatcccatatatatgtgggatatatatatatatatatatggatatggttatatatatgggatggtttggttggtcccagcaaagtatatgaaaattaaagttctgtgataatgacaaaggaattgctgttactgtactgcaaatatgctgtgggttctcggtgttcaaactcttctaaggaaggacacacagtagctctctgcttgctgatagatggtttcccagtgtgagatttgttattttgatcagagtattcaaatcagaatttaaatctagtgtttctattttagtttagcttcctgatttatataaatgaaatctcatt

SEQ ID NO: 11263 - DNA, 1035 bp, Homo sapiens
ggagtctcgctgtgtcgccgaggctggagtgcagtggcgcgatctgggctcactgcaagctccgcctcctgggttcatgccattctcctgcctcagcctccagagtagctgggactacaggcgcccactaccacacctggctaatttttttgtatttttttagtagagacggagtttcaccatgttagccaggatggtctcgatctcctgacctcgtgatccacccgcctcagcctcccaaagtgctgggatgacaggtatgagccaccacgcccggccagttcttttagtttttaaagcagtctcatttcagttattaatattgacttcttcattttgaaacttcaaataatatttgattcaaagctttcctcctcttaccagagcaggctggacctgtggccctggtgacctggaattggaaatgggggtgtgggatgtagggcataggtcttcttgtcacatcccattctgtcttcccaattattacttgtggtactcagaattccaagaatgactcccagtgaccttgcctatggatgatcccctcccctttaagcgtgggaggaacctgtgaatatgaggagatattactcccatcattctgttacattacatggcaaaagggagatgatctgggttggcctcatcaaatcacatgagcctttgaagtcagagtttttttctggctgatagcaggagagtaagtcaggttcaaagcacaagggtgattcaacaccctgttgctggcttgaagatggaggggagtgtgtagcaaggaatgcaggaagccttcaggagctgagagtggtcctcactgctagcaagaaaaaggggactaccgtcctacaaccacaaggaactgaatttggctgacaatttgaataagctagaaagcaggttcttccctagatccttaagagcccaagctggcccacaccttgatttaggctttatgacacctggagcagaggaaccaggtgagcctacctggatttctgatatatggactgtgagctaataatttgtgttgct

SEQ ID NO: 11264 - DNA, 1048 bp, Homo sapiens
acaagagaccctggttagtatttttgtctcgtgtaacttttaagaataatttattttatgaagtgataaactaaatttcgtatacctcaattgtagcatggctctgtaaataaaattgtatgtgcatagcttaaagtgtgctacctctggcgtaactgcgtggagttaaaaactgttaagaactggtcagtatttttttagccatttgccacatttgctttaaaaattagttccattacattgttaagcgtggttgaagttacgtttgttacgtgactgatttttttttcctttttgacctcccagtatttaatttttaaaaatggtttctaaaagtcaaaaaagttattcgtgcttgttttaaagatttttgtcattagagaaattttaaagtaaaacctgaaaattccaggctttttgctccatgtttccttttagattttttgtgtgcgtacccacatatatttacatttgaatttaaatctatgttattgtcctgtttgttgtactaacaagatgaaactgtagttgttctgtgacttgcatccttgtcaataaataaagtctacagaattctttttaatggctgcatagtattccacagcatgagtataccattttaaaaattatttatgcctttactgataggtttttaaaaattgcctcctgtttttgagtattacagatagtgccgctttgtacatgcatcccgtgtgactatttctgtaagaaagattttatagaattataggctggcctcggtggctcacccctgtaatcccatcactttgggaggccaaggcggaccgatcacctgagatgaggagttcaagactagcctggccaacatggtgaaaacctgtctctactaaaaatacaaaaattagtcgggcatggtggcgcgcgcctataatcccctgctgaggaggctggggcaggagaatcgcttgaacccaggaggcagaggttgcggtgagccaagattgcgccatttcactccagcctgggcgataagagcgaaactccgtctaaaaaaaaaaaaaagaaa

SEQ ID NO: 11265 - DNA, 1098 bp, Homo sapiens
aggacttcttgggcatccctggatcccaggttaagaacttctgcactagagatacatgagtacagtatactgatctttctgggatagaggtgagctgattcatgaccatatattctatctaatggttccagcattttaatgcattccccacctttaaatttgtgcacagaagcatgattttcagtgacagattgagcaaccttaggcagaatttcagtgtgattgaaatatgcctgttctctgtctctcccacttagtttatgggactcagattacttaaaacatttaagtttctttcttacaacggtatagtggggcaggaagagcttccatttttctttttcctctccagctatacttttagaaacttccttaaaggatgtttggtagaataaatctaagttctcttcctttttcctttcccactgctggacagcaatctgtccaatccacagtcacataagaatattcctttaaggccgatgcctgcttagccagttaaatccaaagacagtgtttgtaggaaagggccaggttaaatggtatttttaaggctaatttgggattgaccttattatcattggataatcagttaaggaaacaaaaaagtatggatttagcagtagatagaaatgagaaaattggccaaggccatcataaagacttagaatgcttatgctaaactatgtaacagtagtgtatgtattgtctgatatagttctcagttataggatctttgttctggggcacacaggaaggtagtgaaagctagtatgggtagtaaaaagagcgttggattaagagtcagaagagctggggccagtttcttcttcttttttttttttttttttttttttatgtgacagtttctcactctcttgcccaggctggagtgcagtggcatgatcactgctcgctgcagcctggacctcgtgggctcaggtgatcctcccacctcagtgtctgcagtagctaggactacaggcttgtaccactatgcctggctaatttttgtatttttttgtagagatggagtttcactatgttgcccaggctggtctggaactcctgggctcaagggatctgcttacctcggcc

SEQ ID NO: 11266 - DNA, 1062 bp, Homo sapiens
gaaatctttcagctagagagactttagtaattattaaaagtagctgtacataatcattgtgctactaattattgtgcttttaagtgcctacaagcttgccaatgataaatttggttttgaatgtgtgcagtagttcatactaagtatgtatgtagaagtctggttagatccagcttaatacaaatttttattctaaaatgtacatctcttgttattttttttttttctgtctacaaggaaaatatataccatgatctacaggaacttggtagtagtcaatcagcagggtaagttaattttgagcatcatggataaataccataaaaacgttttaaagacatttttgtttatgtgcatatgttttataattgtgattctctttaaaagttgctttaattaaatattgtaataaaagtatgataaatttattagaagtacatatgaactaaaaccacatactgaggttctaatgtaaagttaaatatcctgttagatcaatttagacttgggatatcagagttaggatttattttgaaaggtctgtaatttcaaaagctcctgtttaggagtgatctaccttgaaaatgtattgaaaggctttgggaaataatattgttacctaggtaggaccatgtgtaaggatgaaggatgagtctttttctttggttatagacaaaattttgtttaccaatttgtggaagtggaattttatgttcctacttccgtttcttaactggttatttttgggtcacatctctctttaataagctgataaaagcattgggttcttgttccagaaagatgcacatgtatatatacatgggtaagtcaataagtgttttacaacctactttccatgagaaaagccctgatttatgtgcttgctgacttccatagtataatactctcatttgaaggctaaaaacatggagttgggaagagatgtacacagtttgctttttttttttttttttttttgagaaggaatcttgctctgtcactcaggctggagtgtagtggcatgatttcgactcactgcaacctccgcctcccaggttcaag

SEQ ID NO: 11267 - DNA, 2869 bp, Homo sapiens
tcctagaatgaattgaccactcccttgtacttcctctattccatattcagattttattgtaaaattgctttgttttacttgtgggtttttttgtttgtttttgagatgggctctcactctgtcaccctgcttgaagtgcagtggtaatcttggctcactgcatcctccacctccagggctcaaatgatcctccccctcagcctcccaagttgctgggactacagatgtgctccaccacgcctggctaatttttctgtatgtttggtagagacggtgttgctatgttgcccaggctagtcttgacctgagctcaagagatattctcacctcggcctcccaaagtttaggggttacaggcatgagccactgcgtctggctgttgcacttgtttatatttttgttacctgtgtcctattcaggtttgcattgtgcatcacacactatagtgttttattaatatggtatttaataaatgtgttgaattgaatacttattcttccaaagttaggatttaaagcccagaaaagtatctccattttatcccaaaataaaagtagttattaggctgatgatttggcattttattgttttaaagctctttttttttttgagctttagattgtatcctttttatttcctttttttttaattattatactttaagttttagggtacatgtgtacaatgtgcaggttggttacatatgtatacctgttgttttaaagctctttaagaaattgtgtgatagctaaatatacaattgtagtatttgtagtagtagtttgagttttctgaagtatgtaaccctgatgtattcattccttcatttgtttaaataaactttggcacattactagaaaaattgtattattgagatggaaacttacaaattacttatttgcagtctgagtttggtttagatatcagtagaattaacttcagaactcctattccatgttctcaactttgtcacttttttttttttgagatggagtctcactctgtcacccaggctggagtgcagtggtgcgatctcggatcactgcaacctctgcttcccgggtttaagtgattctccttcctcagcctcccgagtaggtgggattacaggtgcctgccaccacgtccggttaatttttgtatttttagtagagaaagggtttcaccatgttgaccaggctggtctcaaactcctgacctcaggtgatcctcccaccttggcctcccaaagtgctgggattacaagtgtgagccactgcacccacccagcctagggcttcctttttattacatcttttttgtagcatctgtttatactaatccaaaattcctggacaatataacctattatgtacaacttaagaaaattagtgtaatgccttacccatagtataaagagaaaattaatctatgataatgcataatttcaaaatgttaatgtccaggcatgagttcactgttaagatgaaaatgtttccaaggggggtagtaaagggtatttgatgataattgtctgtatatcccaactctgaaactttgacttttgagctcaaagtctgtatatccaactacaaatgaaacctatgtgcctgaataactcagtttgttatcttcccatccaatctgtttatctttctaaagtttctcttttagtgaatggtaccactcatttattcacccaagttggaatcttggaatcatcttaactcctttcttccttgccttctatatcaaataccaggtcttgttggtttttacctatttaatttctctggaatttgttttccatgccttagtttaggctttaatagtttttagtttgtattattgcaattgtctaatactggttttcctgcctctgccctctttttcttatgttttgctagagtgatttgtcactcttctgcttaaaattaccatttaggggttcattattgctctctggatgtaatattttctgtgagctagaaatcagtttcatttcttggacaaaaatcctttttaatggtgagtggctgcaacatcgcattaaggaagattctgaagtatctgcggggaagaatgcagtgataagggaatgacagcatgagtcctgctttggctagaccacaggatcctttacagtctgaacctgcctacattccagtaataatgaactgcttgtggtgtcctgcaacaggaactgttgttagtttgcttttggatactttttcacatggcgttttcttggtctggaatggcctttcctagccctattttcatattgtcctacaaaatatttcctgattctttgtttctcagacactccctgtccctaccaaaataatgactctcctgtctctctgctaatttatctaacagtcttttaatgtcttgattatactttactcttctacattaaagttgaattattttatttacatctgcaacatttagtatgaggatgccacctggaaaatacatgtttaatgtttattgaaaggttaaattgcataagggtttgtgttagactgatagcatatctactgagtagcgccccgccgccccccgcccaccaccaagtttctgatcctttttcttttctctcagaatcatcggactcaggtacatctgtgagtgagaacaggtgtcaccttgaaggtgggagtgatcaaaaggtaatctaagtaaatttctcattctaatgtaatattatttgcaaattggaaaggttatttacaacaagttagcttactggttatgttaagtttgttgtattttatttttttcctaaatgcttaggaccttgtacaagagcttcaggaagagaaaccttcatcttcacatttggtttctagaccatctacctcatctagaaggagagcaatta

SEQ ID NO: 11268 - DNA, 1050 bp, Homo sapiens
ctagctatttccctattatttaatatctccatattagttatttatgaagtaaaaccacctagctgaatgttttgttttattcatcctaaacatcctttgtattgacttttaccattgtgggtaaggatttctctctcctccattttttccccctttacactcacttactctatttgatattgtctaaggctttctcatatattgtagtacatgatatttgtttaggacttattactaggaagccttctgattgaaggaaatagggcgatgaattgatgctaatgaatgtgttttattaggtatatcaagttactgtgtatcaggcaggggagagtgatacagattcatttgaagaagatcctgaaatttccttagctgtaagtatacatctacttttttaagaaataaaaatttcattaaggtcaagattaggagactatatctagcttctttctgaaatgaactgatttttataaagttaaaatgtttttgtaaagtctgaataatttaaagcatttttcttttatttgttgtgatgagacctgtagctataatttttatttttaggtgctggaatttgaacttttttttttttttttttaaacagggtcttacccttctcccaagctggagtgcagtggtgcaatctcagtgcactgcagcctccacctcccaggttcaagtgattctcgtgcctcagtctcctgagtagctggaattacaggcatgcaccactataccccactaatttttttatttttagtagagatggggtttcaccatgttggccaggctggtcatgaactcctgacctcaagtgatctgcccaccttggtctctcaaagtgctgggattacaagcatgagtcactgcccagctgaatttgtacattttgatgttattttggaaaatttcagtgtatctccagtatactcatcacccagctttaactattaccaacattttgccaaccttgtcaaacgtaaacttttttttttttcaattgagatagggtcctgccctgtcttccaggctggagtgcagtgatgt

SEQ ID NO: 11269 - DNA, 1026 bp, Homo sapiens
tatttatagcagccaagaagatgtgaaagagtttgaaagggaagaaacccaagacaaagaagagagtgtggaatctagtttgccccttaatgccattgaaccttgtgtgatttgtcaaggtcgacctaaaaatggttgcattgtccatggcaaaacaggacatcttatggcctgctttacatgtgcaaagaagctaaagaaaaggaataagccctgcccagtatgtagacaaccaattcaaatgattgtgctaacttatttcccctagttgacctgtctataagagaattatatatttctaactatataaccctaggaatttagacaacctgaaatttattcacatatatcaaagtgagaaaatgcctcaattcacatagatttcttctctttagtataattgacctactttggtagtggaatagtgaatacttactataatttgacttgaatatgtagctcatcctttacaccaactcctaattttaaataatttctactctgtcttaaatgagaagtacttggtttttttttttcttaaatatgtatatgacatttaaatgtaacttattattttttttgagaccgagtcttgctctgttacccaggctggagtgcagtggcgtgatcttggctcactgcaagctctgcctcccgggttcgcaccattctcctgcctcagcctcccaattagcttggcctacagtcatctgccaccacacctggctaattttttgtacttttagtagagacagggtttcaccgtgttagccaggatggtctcgatctcctgacctcgtgatccgcccacctcggcctcccaaagtgctgggattacaggcatgagccaccgcgtccggcctaaatgtcacttagtacctttgatataaagagaaaatgtgtgaaagatttagttttttgtttttttgtttgtttgtttgtttgtttgttttgagatgagtctctctgtcgcccaggctggagtgcagtgtcatgatctagcagtctccgcttcccgggttcaag

SEQ ID NO: 11270 - DNA, 2473 bp, Homo sapiens
attgttaagttctttctgaattattcagaaattatgcatcattttccttcaagaatgacagggtcagcatgtggaattccaagatacctcttgacttcctctcaagctccgtgtttggtcagtggaggcccatccgagctcagcactgagaagtgttagtttctttgggacccatctaccctgaccacatcatgatgttcatctgcagctgttgcaaggtgttcagattgtataaacataaatgtcacaaaaactttaaaagaagtgcaattctcaaaaggttaggtggactaaagcattctgtaaagcaactgctaataatgagcttacagtggatttgaatttgaaaaatatagtaacaagcctgtcaaatatctgcaagaactatggaataaaactactgatgcagtgaagacagttgaaaagatcaaacaaatgccaagctatatttataatgaacaaattcaagaaaaaggactacggaaagttcaggacatcaaagaagtcaggcaaaactcatcttgacccctgttgcaggcaaaggaacgcagctggaagaaaagatgatataacagttaacaggatgcagacatggcagaggtttcctaaaaatctcattatctataaccatttctatatttacatttgaaaatctcctttggagacttagaacctctaaattattgacttattttttatataaggtcactccgatgaaaggtgattacaaaatcatctacattgctgtctacaaaacagataatatggatgtttgatcgcatctcattgttaactctttactgatatgtttgtaaatacagaagtgaaatgtggacataaaatagttacgctatttggttaatggtactagacaacatgtaattaatgacattcaaaaatttatggctagtgatatatataaagtaaaattttctttgcagtaaaatatgccctttattatagaagggaggatataaggaaccaacagtttgtatgaaaatagctcaaataatatcttttattttgattttaatatttcttattttggtttattagtgtcttagaacaaaatggccttatataatgaagcctagttatgctggactgttttgatctcttttaattgttctgacagatagttggggatgagagccgaataaggtttgcctgaaataactgacactatataatttctgctttggcaaatactaagttctaacttgtcattcctggtagaacaagctttatttttcgagcctagcaatgatctagaagcagatgttatctcagtgccttttgcaatttgttgtgtgggtttttttttttttaaagccacacaataattttggaaaacaatgtatgggtagaacatgtgtctgttaattgcacacaaaaccacttttaatgggtacagagttaaatttgaaggaataagttctagctgaagtattatgaactccaaataatgctttgaggacctccaaaggtaaaagtactaatccctttggccatttattgagagagagagagagagagagtagggtgactatagttaatgtattgaatgttcttgctacaaataaatgatatttgagctgatgggtgtgctaattacactgatttgatcaatacccattgtatgtgaaacagtacatacaccatatttacaattatgtatttaacatttaaaatttctaatataagtatctctcaaactgtggattaacttcttgatttatatttaaatatgaatcttaagcaaaacagtgaaaataaccatcttgatttagtgtttttctcccatatgtgaattgtatatacttaggtgaagacaataaaatcaactgaactgtaagcttagaataggactgaggtaattctgcacagcaactttactaatggtacattgttgcttcaaaactctctctctctctctctgtctgtctcaataaatggccaaagggattagtagtttacctgtggaggtcctccaagcattatttggagttgataatacttcagctacaaccaagcagaatctcttttttttggaggtcctcgaagcattatttggagttgataatacttcagcttcaatttggagttgataatatttcagctagaacctagtagaatctgtttttttcctttggaggtcctcaaagcattattggagttcataatactgaagctagaaccaagcagaatctgtttttttctgaggagtatcggtagcataaatgtgattataaacatagtacacttgatatatggaggcagtgacagctatttttacaaaatttaaatctgcaaatggattcaacatgtttatgggttattaaaattgtctgatttcttaggttctttatagtacacgtgttgaaaataaatgattaagaattgtttcaagaatgcaattatttgatcttaaatttttatgagttgttaaaatagaaattatttgaatatcata

SEQ ID NO: 11271 - DNA, 1025 bp, Homo sapiens
ctactgcattttatgtagtaacacatttaaaacaattaaattgtgcttaactgcaatgttcctaaaagccttatttttttgtatttcccaggtccctatgagaagtttaatgaaatattactggctaatgtggttttcccacctccattaaccatcatattcgtgactagttgctcaggctttttaaaaaacaaggaaactcaagagatctttactgttttatttttcaggaatgactttgtgcctctggtttaaatattagaaaacagaaaaataccagttggctttaaatgtttgctattcagttaaagactggatttgtttaaatgtaatacattgtaatcaaaggttaagtttttaaatctttgtgtttttaaaattgtgcttatgttttaaataataatacttgagttgtgtccattacaaatcagatacattcctcgagtgcaacacaggttctaacgcttataagacctctaggaaatttttttccttttatttatcaaatgaatataactgcgtttaaaagagggctgtaactgcaaggaacaacgattgagtgttcaagactgcctttattagctttacttacaagataatacattggttcacctttctatgcacaataaaagaagaattgggtctcaattttagaagttaagcttttttcagtacctcttaatgaaatatttttaggcttttgcatacttaatttgagagggacatctcccttatccggatagctgggtggattcttatccctgtgcagtagcaagtgctgactgggcaggaggtaaaaagagattagttttgtggacccaatgaggaactccttttaaatgtaagttttcaatgatttgtataaggtacctactgcattacgtctaacacagttgtataattttaccagtaaaatctttatatgtttgaatagattaatggcgaggataaatagaggcattgtttttgctactttgcatatcattggccaatcaatgattgattgatttgtatatccttttaca

SEQ ID NO: 11272 - DNA, 2076 bp, Homo sapiens
tatgttactgtcattgaaatatttttccaaaatcttaccagaattagaggcaaccacaaaataatttacaactgatttaatctttactagctggcgaccttatttctactagttgctatagtagactagaactcttgttttattgtcgttgagtaaaatactaaatagtagccagttttgacttactttggcttcaaagctgttgtaaacattaaaaaaaaaatctttgttttccagtgtaaactgcagttctcattggatttgtatactttgaaattcgggatagtctttatttccattttctactattttttgtctgtatcctgctgagtcttctattttaaatgtcatacttttatgaagcttttttgtattttggtaaggcacagtattatttcaaaaagtgatttgcatctattgaagtagaaaaaagtgaggcattcaacagtcttagcagaaactaatttggggatagattgagaataataaattagtgaagctctaatagagtgcctttcttcaccaggtgaacttaagaatggagaatgaaggggggaggaggcacaagggactggctactccttatgggttctctttagttcttagaggtctttggatgtcaccaagctgagaacagctggaaggggaatttgaacatcttccaaacctctctattacttgaagttgagaagaaagtgattctgtctcacagtagcatatcaattcagtttaaactgcatttatactcaagtgtagtaattactagcccaatatttagtaattgtagattttaaaattctggccaaaactaaataatttaaaagttgaattgtttagcgcgagtgtggtggctcatgcctgtaatcccagcactttgggaggccaaggtgggcagatcgcttgaggtcaggagttgcagaccagcctggccaacatggtgaaaccccatctctatcaaaatacaaaaattggccgagtatggtggtgcctgcctgtaatcccagctaatcagtaagctaagcaggagaatcgcttgaacctgggaggcagaggttgcagtgagccaagatcgggccactgcactccagcaagaccctgtctcaaaaaaaaaagattgaattgttcaaaatacatttgttgagtgtctgttatgtgccaacaacgagggatacaaagtttaggtagtctctacccttagagtacactgtaggggagctgagagatacctacatacagtagtgcacacgtatccacagttccactttctgtggtttcagttacccgtggttctgaggtctgaaaatattacatacaataaggtagtttgagagatactatatttagctaacttttatgacagtaaactgttctacaatcatgtgtcgcttcacgatggcggtatgttctgagaagtccatcttaggtgcttttgtcatttgtgatcatagagtgcttttgcatttcaaacctggaaggtacagcctactacacatgtaggctatatggtgtagcctgttgctcctaggctacaaacttgtacaacatattactgtactgaatactgtaggcagttgtaacacagtggtatttgtgtatctaatatatctaaacagaaaaggtaagtgaaaatcttgatataaaagataaaaagtggcacacttgtgtagggcactcatgaaaggaacctgcatgattggaagttgctctgggagagtcagcaagtgagtggtgggtgaatgtgaagatctgggacatgctgctgtagacttcataaacactgtacagtacactcaggctacactaaatttatttaaacttttttcttcaataatacatgagcttactgtaatgttttcacttgattgattattttctcactgtcatccagtctggagtgcggtggtgcagttgtggctcactgcagcctttatctcccaggctcaagcagtcctcctgtcttagtctccagagcagctgagactacaggcatgtgccaccatgcctggctaatttcaaattttttttgtagggatgaggtcccagctagtctccagctcctgggctcaagctgtcttc

SEQ ID NO: 11273 - DNA, 1026 bp, Homo sapiens
cttccatctctgcatcttgtcccactggaaaggtcttcaggggcagtatgatgcatgggctgtcatctcctaggataactgccttcttctgtaatacgtggtgaaggactgacttgcctgaggctgttttacagttaactttttgaagtaggaagagtacactctaacataatgattaaaagtatggtatagttggccttggtgtggtggttcacacctgtaatcccagtgctttgagagcctgaggcggcagattgcttgaggccaggagttcgagaccagcttggccaacatgtcgaaactccgtctctatttaaaaaaaaaaaaaaaaaagtgtaaaaacaaaaaagtatagtataataaatacataaaccagtaacacagtcgcttattgtcaagtattgtgtactgtacataattgtatgtgctattcttttatatgactgagagcacagtaggtttgttcacaccagcattacgagcccaaacgtgaggaatgcattgggctaagatcgctaaacaatagtaatttttcagctccattataatctgaccacctggaccaaaacattgtcatgcatgactaaattgttctcttttattagttattttttacagtgcctactttataaattaaactttatcgtaggtatatataaagaaaaacatagtatatttagggttccttgctttccgtggctttaggcatccactgggggtcttggaacatatccctctcagataagaggggactactataattatagcacactgacaggtcctatattgtagttaccattcttttatgttttatgtgtaaagttttgttgatctggagaggaaagtcaaaaaaattctgtgaactttagggaaacttacactgcttgcattgaagtagtatgttttgttgcttgtttgggagtcagaaactcttaatgtggaatttagtttctgctctgtcaggccatcaccgatagcacaaatttagtaatctgaccacccagctttaaaatggaagtgtaggcc

SEQ ID NO: 11274 - DNA, 2011 bp, Homo sapiens
acttgaggtcaggagtttgagacctgcctggccaacatggcgaaacccctgtctctactaaaaatacaaaatttagccaggtatgatagtgcacacctgtaattccagctacttcagaggctgaggcaggagaattgcttgaacctggggggcagaggctgcagtgagctgagatcaggccactgtactccagcctgagtgacagaacgagactttgtcacacacaaaaatagattaattacttttaaaagaatggaggtgtatagaggcagtagttggaacaaagaattcacttaggagttacggacctggacatccgataagtcagtttttatgtcatgaatcattttgctttacgttcagtcattatgtatgtattctagccaattgttgagccaattaatgaaaataaatttcttggacaaatatcagagaaacattgtttatgatttatttatgtttactagaaaaccatctgaaataaagctgtcaggttgagaatgagctaggtagaattgattcagaaaaatggatagaaatgttcagggaagctagaactcttctctattttgttatttatgggtgcagttaatttagttgcctgtgaattgtccactatggtttatgtggcatatttttagtaccaaattccttaccattatataaggaagggatttttacagggattactagccagttttaataactactgagaacataattagataaaaccagaaaatgatatattttctttaaaaatgtatgcattaggttatctgctattggattttgcatactagtatttcttttccgaggtataggatatattttgtaaatgcaaaatgtaacttccccccttcatatatttctctaaatggaaataatttaaaataggctttgaaacaagtggcctttgctgtgcatttactgatagtatcatataatgcacgaattttgtatgtatttatgtatttttatggtagagatgggatcttcctaagttgcccaggctggtcttagactcctgggctcaagggatcctcttgccttggcctcccaaagtggtgggattaacaggcatgaaccaccatgcctagcctcgaatgatattactgtaattttagaaccatcaaaaaaatatcaggcctgtcagggagaatgatgaatattttgacagccaacaagttcatcccaatagtggtatacagtatgtatcgtatatctgtgatattaaaattgtaagaggggtaattagggaaaaaatgtctaaaagtaacttcttgaagggagggaggagacagggataatgaaaaggttgagaagccatactttaagggaactaataggattttggtcattttgccatccattttctctggcttggcaacagatatttgtatatcatgtggagcataatcttgttgtgtaaaatgttgagagaataccttgtctaaagaatgattgtagtgatttagaatggtagggaatgaaaaaaattagtgagttttttttttttttaaacaaaccctaagagctgttgtttattccaagctttatgtaacatagctggctagctactatgaacagcagataagattgggcaacatttggtatcaaagataattagaggaatgatgttgatattttcttgttttttgaatgccattaaaattaaaagtaataattgaaaagacccttcatgtaataaaaaatgataccgtgaaatatttctttgacaaactggaaaccttttttttagtctgttcagtaggctcacagagctttatttatatatgacctgtgatatacattttgcataatttctcatgcaaacatcatgcatattttctcactttatgaagtaagaacaaagttcagtatgttctgtatttttttttacgctggaggattgatgtgatatgaagctgattaaaaggaaggttactgataactacaaaagagtgtgctttgagtttcatttttagtaatggcagcaaatgtattcagattc

SEQ ID NO: 11275 - DNA, 1059 bp, Homo sapiens
ttttcatgtacttagttacaaattgaaccctcttctatttttttcctgctcctgtttctgtttcattttagttttccttttccctgattatcatttaggcatgtaagtgacacccagtagcattgctttaattctgctggtgacagtgccaaagctttactatactctttttgttgtctgttgcttttctcttgctaatttgcttgactagataactaagaattcaggtaagcattagctctttgttcactgagaataatacaacttgcaagataattaatttggattgttctacatgtatttcgtttatttctctttaccttgttcatttattacgacattttgaattatttacatacccatatttcttctttcttttatggctcagctcactatgcttttttttaatactggtagcttcctcaaggttggaaaacaagatctgaatactatagaaaataataactatttttctgtggtcatattaaagatataatggctttggattttggggtgatttttctactgtcagtttaaaaaaaacttgtctatttgcatttgtgtgttattacttctagttaagagtatttccaaggaaagtttcatgttacttattttgtttccatgtctttttccaaaagaacttattttttatattataataaatatcagtggaaaagtaggtttcgttatatagaaattaactttaggctgggtgcagtggctcaagcctatatttgggaggccgaggcaggaggattgcttgaactcaggagttcgaaactagcgtgggcaatgtagcgagacctggtctctacaaaaaaaaaaaaaaaaagaaaaaaaagaaaagaaataaaggaaaccccctttttttgtttttttgtttttttttgagatgaagtcttgctctgtcgcccaggctggagtgcaatggcacgatcttggctcactacaacctccgcctcccaggttcaagcgattctcctgcctcagcctcctgagtaactgggattacaggcgtgtgccaccatgcctggctaatttttgtatgtttagtag

SEQ ID NO: 11276 - DNA, 1060 bp, Homo sapiens
aattggtaatcattctgattattttaaatttgtttttctttttgaggtataattcatatgccataaaatgcaggcttttaaatgtacaattcaatgataatttattatatttatgaagtttagcaaccattaccactgtctcattccagaacatttcatcactccaagaaggaaccttgtacctggttagcagtcactcccatttcctctcttcctatctgctggcaactgctaacgtgctctggatatgcctgttctggacatttcatctaaatggaatcataaaatacgtagtcctatgtgactggcttttttccttagcataatgattttaaggttcatccatgttgaagcatgcatcagcatttctttttatggctgagtaatattccactacatggatatagcacttttttcttttaatctatcagtcgatggacgtctaggttatttccacttttggctattaaggaaaatgcccctgtgaatatttgtgtacccattttgtgtgaacatgtattttcagttctgttggatgtgtacctaggaatggaattactgggttaatatagtaactctatgtttaaatgtttgaggaattaccagattatttgccagaggcattgtgccattttattaatacgtgctcatcagcaatgtgcaatggttccagtttctccacatatttatttatttatttatttattgagacagagtctcactctgtcacccaggctggagtgcagtggcgcaatcttggctcattgcaacttctgcctcccaggttcaagcgattctcctgtctcagcctcccagcgtgggactacaggcacacgccaccatgcctggctaatttttgaatttttagtagagacggggtttcaccatgttggtcaggctggtcttgaactcctgacctcatgatcctcctgccttggcctcccaaagtgctgagattataggcgtgagccactgcacccggcctctccacatctttaatacttgtctttttgattatagccaccctagtgggtatggggtggtatcttgtggttttgat

SEQ ID NO: 11277 - DNA, 1050 bp, Homo sapiens
gttaagaaatatttttagtttttaaaattatttatttttagagacaggatctcactgtgttgcccaggctggagtgcagtagtgtgattataggttactgtagcctcaaactcctgggctcaagcaatcctcgtgcctcaaccttctaagcagctgggattacaggcatgagccactgtgcccagctgttgttttagataaaagcagattaagacctttttacagaagaataacagtaataatattgatctctttttactttgtatcctcaccccttaaacactttttaggtttgcccttgttggtgttggatctgaagcatcttcaaaaaagttaatggatctgttacctaaaagagaacttcatggtcagaatcctgttgtaactccatgcaataaacagttcctgagtcaatttgaaatgcagtccaggaaaagtaagcagtcctcagaggcttttattaaaatatgtacattttaaccagtgcatttgttaggtgttatactagagaagtcatcttaatactagctcactaggaactccatttcacaaagtccatgctttgaattagatttaatcactggttatgactgtgggcctgtgtacgagaaacctactcctgttccatttttctccagatgtaacagacccaatactatacaacaatgtgcaagttctatagccctgccattcttgtcctattatttccatcttagatacagaaagaaactacattctaattcttagattaaaggagagctatgtggatgtgtattatggtgggggagagatcactgataaccagaaaatgttcattgatttttctgcttggcaacaagacctttcaccacttggtaaactgaatatagaaaagatttgtcattatacatttaagtacattatctttaaagagatgagatggatgattatgtaattaacagaaattcaagtggttccttttcttttaatgttttagcacttaagacttaactgaagaagtgtgttacaaaatttaaatgatgtaatactgaaattaagatatctgttgaa

SEQ ID NO: 11278 - DNA, 1052 bp, Homo sapiens
ccaggtgccccaccgccagctccgcatgtgaacccagctttctttcctccaccaactaacagtggcatgcctacatcagatagccgaggtccaccaccaacagatccatatgggcgacctccaccatatgataggggtgactatggcccccctggaaggtaagttagtgtgtatctgtgaaagtacttgatgataaaagataggaacaatgactgtaaatattagattgtaggtatataaatatgttatttctgccttccaagaagatgaggtgtttaagctgctaccctgttttagctgaaagatactggtataggagaatttttagatttgttctctttgttggaaaagtagcatgcttcaatatggaaaagtaactactatctctaaagcacatgtcagaagcagctagtatgaattgctatacactgttgtgactaactgaggaaatctgttgagtatgagttaaggtttatgtttttgttttacagggaaatggatactgcaagaacgccattgagtgaagctgaatttgaagaaatcatgaatagaaatagggcaatctcaagcagtgctatttcgagagctgtgtctgatgccagtgctggtttgtgtatttcttgtattaatatttcttatttatgttattaggaatgacctaaaaatgtaagtacaatctagaagataggtcatttacatgtagtagttctttttatattcccaaatcattacctacgatttatttaaaaagcattgaaaaaagttgtgtgtcacagtgtagtggggaaaatccaaattttaagttatttggtatagatttaagtcttacccttgacatttaatggttcaggggcctcatgacaccttatttattcttatatttgcaaaatgataatgtgcttcacacacgtataataagttgagtcaatatcatgagcatgaaaggcttttgcaaatggtgaaacactgaaagaagacattgtcttgcatagttattttatagcacagtacttttgtaaaatgccttatcactcttatcccaagtggtttga

SEQ ID NO: 11279 - DNA, 4989 bp, Homo sapiens
tctaacttcttagggtggggcttctcccaagttagtctgtcgtattgttctttttatttcttccatagtacttaccataatcaattcttacttgttataaggcatatttttcctcattagaacacatgttgaatgatggcaggggatttatctatcctgcttactatatttcttttcttttaagagatgggtcttgttaagttacccaggctggtcctgaactcctgggctcaagtaatcctctcagcttggcctcccaaagtgttgggatgataggcatgagccagtgtgctcagccatgctcgttataatatttctaatgcctacagagtgtgtggtacagaatgagtgctaaataaaaatttctcgaatgagggagtgactgaatgaatgaatgatctatcttttaggtagttcctttttttttctttttagcattgctgctaactttgaaattttatatatttttgaaaggcagacctaatcttcacttggtattcttagatatgtctttagtgtactctatctggtagtaatctgtaagagaaaagagcttgcctttgacatggtccccagttttgtaattattacctttttgacccggtgtaagaatctttgtgtctaaacaaatttgtcatagatatagttatcttgtatcatctttttaagttttgaagtccaaagtaataattttttaatcccaacactttgggagaccaaggcaggaggatcacgtgagccccaggagtttgagaccagccttggccacataaggagtttttctacaaaaaaattttaaaaatatctgggcctggtggtgcatgcctatagtcccagctacttgggaggctgtggtgggagggttgcttgagcctcagaggtcgaggatgaaatgaactgtgatcatgtccctgcactccagcctgggtgacagagagagagagagagaccctatcttgaaaaaacaaagtaataacttaggccttgatcaaggattttagcacctaatgtttgctaagcttagctgtctggtgcagaaatacaagacataaatattatttcgtagacagttattatttccttactgtgaatttagcagaatttatagaagtcttttgggtagtaagctttggttaaattatttgtttttaaaaaatcgcagttcatgaaacatttctacttattaaatacaatgtgaatactatatctattcttgctactggtcataattgttagccctctcccatgcctcttctcctcccctgaatataacatgcgtattagaaggtttctttgtgttggatgctgctcatgaaccatatgttaagaggttgtcatattcatgtatttaagccccattgtgtgttgtgatttcatgacttttatatctaaaaaaaccatattgtagatgttctttagcttgaaacacgagtgctttgaaattttccctttacctttctatttgtgcattcagtaaatactacacatctgttttaggctactagtttaatagatgatgtgatgcatttctgtgatgtgtctggttgctgatttttttgttaatgtttttaatagtgaaatttctggttcatgcttacctggtgagttggtaagtcgttattggcagctcaggatagtaagtttaaaccagatttacaaagaatttttgctgcctaagtttttttagacatcaaaaaattgaatatttttaggctatctaattatggagagcattaatccagtaatttcttttagaagacgtgaacgatcaagagagagggaccatagtagatcacgagaaaagagtcgacgtcataaatcccgtagtagagaccgtcatgacgattattacagagagagaagcagagaacgagagaggcaccgggatcgtgaccgagaccgtgaccgagagcgtgaccgagagcgcgaatatcgtcatcgttagaaggtgggtattccttgttccctgttaaatgtgtgtgtattcttaacagtaactataactccaaggctactgtttatacagtatatacctacattttaaatggtccaactacttgtgaatttaatcttctggaaacatctgaaacaaattataggtaagtaatgacaggtaaaaattttgaccctttatcttatgaatattttattgctgagttatcactttcaggtttcaaatagttaatggtcttaacaaagcaaggaaataatcaagaggactcattgtgtacttctaaaatctaaaaattggggttcttgtatcacatacataggttgcatgcaatttaaaatacaaaacacagggagttatttcacatatatgttatgtgtttggatttttaaaaataaatggaaagttactatttttgaactagttttatttgtccctaaaaatttatgagaaaatctaacacaataatagtttataatacaggagggtgttttctcaacattcaaagagaattttcctttaaaaaaaaaatttttttttttagaagagacactatcctgacatctgctttttgtttttaaaagaaacagtatcctttaatttgcaaagaagatgtaaaagttaatcaattaaaatgggtttagggtgcactgatttatatctaaaaattttaaattgtgtcaagccatatacccaagtttagaataccttgaaataattttctttgatgtttcattcataaatcataatcattgtctttttttctgtattttaaaactttcttgtgtacatttttcatgaagtgggaagagttgtctgtttatgcttcattttcacatgtaattttattttttatatttgttaatagcatttattcatgtgaagagctgggggagggcactataaggcttatgcatgtgacacaaaggttattctgtaaattaaaatattttttctttatatgttggttggcatattcaaattaaattaaggctaaacaaacccctcataggtaaatactctttatgtgattattttcagtaatcatgggaaacttactgaaaattcagtcatggtaattgttagtatttaaattgttatgggcaaaattaaaggttttatcaagtgtatgtaattctgtgacagaataccaatttctttaaccataacagatacgcaaatgaagtccttaaatgcctagaaaataagcatgctatttttatggaacacagatataagctcctacactatttacaattttaagggctttttgagttaaaaggctggttttgatactttgcattttgaatatgcagattgaatatcaaaactttaatttgtagttttccatgtattacaaaatttaatataaatctcaaaacattcttttaatatgaggcaaaaaaaccttttacttttaaaactaagcttattgaaattgatattgtttttgaatgtaaaaattgaatgttgtattatgtaaatctaaacactaaattttaaagatgtagcacttttttcccctgagttaaatacatctgatcccatcttaatgaaaaaattctcaatatccatcagttgcttaaactggattgtgactgggttattagttgaaatgcttacctatgtcagtcatttccattatagaagggtacaggttctgtaagttacctatttttttggactttataagttatcagcaagcttcttgttagtaaaggcatgataatgaaacttgaattcatctacaaaattggatgtgcccatcaaggggcctctaaaccaatttaagcccaaagttaactaattacaatttctactggttttagtaaaactagcatagtcaaccaagtaaacaaagtccattgttaatcttatttgagttagctaacattacattctagtaatgggtacacctaaatatatcatgacttgagtttcattacattcagacataaactacaaattcctaatgtgcaaactattgttgacatttttcttaatcactgatgtaccataccagaatttccatgttttgtttgtacattaatcagaattgagttgtaatactgtatgtgccttcatccaagaaaaattttacataagcatttctagtgcaaaaaattctgttatcctggattattgtacgtttgctatatcaaacagtattgtggatgtagacttgaataaaggggtggggactgggattaaatatattcaagtaaatctttaaaacaaaagctatctgcaaatttgatcaccatcataataaggtctgttgacctttttagaagttttaaaatatgagtccttttgagctttcatgtaaatcttaaatggaccaaatggactgagtgatttgaaagctaaagtgaatgtcactagtaaggctgtatacaaataaaatactaatgtaatctattaaagtgatgatgaatggctaaaagggcaagttcttaactttttaactggaaacgtaatgatcttggcaagctgttaatgtctgtcccatcttaatttttttttgtgtttgaactgttggtaatgttaattgcattctctcattttaaaatgtattggtttttctaaaagtattcaatatctaagttcaaatagataatattttaatgagaaaataccaatattgtaaatttcagtatgtaaatacgttgtgcttcatattctgtaatttctacctctattctcagaccactctgagcaaaataaaagtagttcagtgctttacgattgtacattttttactgaaataattttagtttcatagttgagttacttaaaaggttacgttcctcttgtcacttctttggaacatccctactcagcaaatttgtgttaacaattcagcttttctttgtttactgaaaccaaattatgtttttttaaaatactctttattcaggcttttcctctctctattttatgaggttttacaattctcaaatcatccatgacaatttttaagcattgggtatggggtctggattaaataacttgcctttgctatctgattacttttt

SEQ ID NO: 11280 - DNA, 1031 bp, Homo sapiens
gaatatttagttaacgttgtttaaagaaacctaataaccaaaaaggggtaagggtgccatttatgctatccaaattttatgaatttgtggtagcatgttttgactctccatgaattataaataacaggttattttgagatgttcattttgtaaatcttttgggaacaaacctcatttttctttgaatgtgattaagtttatttctattttactgggttgtaagagcaattatgtatgtgttttatagagtaataaaatgctttacttaaaatgaggtaagtactatgtacagaggtagaagaaaatatgaaatgttttggtagcaagaacttcttgtaaatatctacaataactagaattgtttttatgtaatatgttctagtcaacacaagaaggaattttgattttagagttaactcatatgtagataattatttctcttgcccacctcatttccattcctcttattaaggagaaattttcagatagagaaaagtgaattttatttcgttgagttagtagtgcatctctaaaattatgagaatccttttaattcagtatattaatgtgaaaatctataaaagtgccctgtcaagtatttatttaaatcttaaaagatgaatttaccatgaatttaaaatactaattctaacaaatgtgcatagataaatttctaacagaaacagttataatttgagttgttaataatggcttgatatagtatcttaaaatacaagtacttctctgtgtgttgaaattttacttagtgctcactttagtttacagactttattaaaaaggtgtagattccatttatcatcttagttgttttaacatctgtttacataggcctttcttttataattaatagctaaagcaagtaattgtgtggctttgacattacagattttaccaaatgatacattgaaaacatggacgttgaatgtatttgtcacttttaagcttctttttgatatctttgttgatgtagttgcctacttagacatttgagagtataatatggaattgga

SEQ ID NO: 11281 - DNA, 1057 bp, Homo sapiens
gtgtatgtgatatgttttatggaagagttgaatatttttgttttgctatgactttaaatagtttttccctcttaatgactttttatcccttccagcgcaacagaaaatttagggagatagcattcttttgcagttagatttattaatttcccagtaattattatttcaggttagaacatatgccttgtctctctctaatacataaacctgttttttaatagtgtagtgcagataataaaaataaaacatttgaaagctgccattttgtattttttccccattaaatagtttcactaaatagcttcatcaacataagatgaagatgcaataaaagataacaatagtaatggctgaagttatctgaaagatacaggcatatagaaactatatatataaaagagaagtctggattgtatttttttttcttttgcagttttaaaattttaagttattactgctaggcagtgtgaatgcatatatgtactgatgctcttaagatacaacctaggaaaggacataatagaaaaatttatagcagtggcagaagtaactcttaattgtagagcaaaaagtatttttcagttatttttatttcaaaatatcactaaactgtgccctatgaacatgttcaaactgaaaaaaaattttaaaaaaccttctgccctcttgactcttaaatcactttattattgaagtggtttcttgtcatttatactttcattaccgactgtttcagtggttacttatatccaagttaattgaatgtttcttgtgaacctctacctgaagtttgcatatatatgtattctttaaattttagtttatcaactttattctattttttttcttttatgtgagttttaaatgaactttatcattgtagattcccacttagcttgttttggttagtttataatactacgttaggtatttctatataggtggaatagactaaaagtaaagtaaatgttttaaatttgtattacgtctaaagatttgtacgtggatgtcattaatttaaatgtccatactctatttataaatcttacttacaaat

SEQ ID NO: 11282 - DNA, 2576 bp, Homo sapiens
tgaaaaatatttacataaaaatcatccaagcattttccatttatttttgtagtatgcatattttagaaaatgacttatgaatgtttccatcatcacagaaacagtagctgctatgttttcattactgcttcagtcattaaatttataaggcaataatatttaagaagaatgaaatcagaatgtctcagtttaatcatcaggtaaattggaacatttcaccaccacaaaggcagctactgtttcagttaattcttattttgtgttagaatacataacagtgaagtagatgcacgacttgtgtatgtatagttaagccagcgtttttctgtgtattttggggaatagcaaaatctacatcacaaattttgacacattacagctgaaggaagaggatcaccttccaagacaaaacagtcttcatgggggaaaaatgacgcttgtccagcagtttgcttcttgtgattgaactgaacctgtaaggattcatggataaaatgaacaggaatagatctgaataaagcaaatctgcataaatggtaaccagtagctctacttttattttttatgttgcttaactgttttatttgaaggaaacctgtgtgatttaaaaagttatagcttttgcaactttattactggttatatacatttggccattatgatgtgcaagcaattggaaaaaaagtcaagtaaatgcttgtttttgtagtagtttgttcttgttaaaaatgtttatatgataatgtctgtaaacagcatcactttgattacaatagatgtagtgttgtaataaactgtttaatggggctgatgtgtaaagctgttcaagttatttgatgtttacacctcagggaaagtcttgtgttcagcaatatctaaagataatgttactatgacaacatttttactgtcctttaaagcattgcaatagcgtttttggatatgcctcaatctaatcttgcgttcagtgaattaaacatagtaattaagtgtcttttgcccttgattttgatattagaataggtgattacatggatatttaatatttctatattctgcttttctagctgtttttacctagttagcttgtgactttgctgaatggtatgtaaacttgtaaaaatagagatttgacagacatagcaatctagtcaatgtgtaaggggtcaaaaaaacagaggttttaacacataagtaaaaacccgtacatatttgatgtgtaatgcaggttaattacaacacagatgtaccgaaacacttaattgtgaaccgctaacattgaagaaattttgacaattccgatttgatgctgcaattacttgctgtttttattgatcttatggtttatttcttaagccatagtcagtgtaaatacagccctgcagcaggtaaatgtgagtaaagagagccttatattttccaattggtataaatttttgaaggatgtgatgttcattaacattcggttgtattccccagtatttgtaatgggaaattacagataaaccgtgtctgcacagtttaaggaatactatgtatattcatgcaccgtattgattcatgctatagttacttaatcaaagatttttttcaaacctgccttacatataggcccactttaaaagcacctgactagcatgtgttcttgattgcaaaattggcagaggcagggtgtcaacttgattaggtgtttttatgggaatgtaatttgaaatcactacttcagaaatttgacttaaaattcttgagcacgttaatatgtttttaagatctgattatctttgagagatcttctgttaatacacattggttgttaaagagtacccaaattctaggacaatgcttaaagtgttaaaataccctagatactgtgttatgtgcaactgtagaaaccctccagaaatttccactgctgttcttcactttcatcttgtctgctatcaaaccacttctgacaaaattagctgttttgaattacccatatcactgccagttttattttaaaatattttgtgtttgaagtatctgtgcatgggatcgttgatgtttatcagaactgttcactttcagaaatgattttttaaagcattttgttgaaaatgcggttgcttttttaacattattttagagttgtatcaaaattttcctgttttctgtatattgttgtgtcatttcttggctttttaatattttgactacaatgccctaatgcgaagaagtatggacatataaatattacaagagaaattagttaatagtaaagggttaaaaggtaagtaaaatgtccatgaaaataaaattttctttgaacagtttaaaaatggaatcacaaaaatctaactgcacttgaaatgaaactggaaattttatactaattaaatcctttatttaccttttcatattttatcaatggaaccttttaattgctccttctatatcactcttctccttgcttggctgatctcattacatgactttcgttacagacagtgtgagtgtactagatttgtttgctgctaatccgttattttaagtgttgtcagaaggaaataacttcttggtttgaccaagtaatt

SEQ ID NO: 11283 - DNA, 1063 bp, Homo sapiens
gatttctaggcaagtataggcagtttcattgttctaagaattttcaaacaccactcaaaattacagacatctgtcttgaaatgtttttattgcctatatccgcatgaatgcctctggaagtctgaataataaatttagggaaggacagttttacaatgtaattgtaagaatttcttaattgtaaaagtcagttgtgcacatggttttaagagaagatttttgaaataagtgtaagtcttctgtgttagttttctggtaccataaactgggtggattaaaacaacagaaatttattcccacagatctgaaggctagaagtctgaaatcaaggtgttggccatgttttttccaaagcctttaggggagcatctttccttgcctcttccagccccagatgttccttggcttttggcaacatatctctaatatcttcctccattgtcacatggccttatctttctccctggtctctgtgtcttcttctcttagaaggacaccagtcatattggattgtggtccaccctaatgacttcattgtaattacacctgcaaagaccctgtttccaaataatgtcacatccacaggtgctgagaattagggcttcgtatcttttgcctgcatttatagtcccagttacttgggaggctgaggcaggagtatcatttgagatcaggaattcaagaccagcctgggcaacatagtaaaaccccatctcaaacaaaatataccttttgcagggaggtcacaattcagcccataacatctttatcccatctttgacctcttttccaagaaaactgctttttaacagttacctgttctcaattcctctagaaattactcactcctgtgcatctcatatatttaaatccctaatactggatttctcagcttcagatagtatctttcagtgcctaatgattgattataggtgatcctttttcgtcctctttccaagtttctttttttcattttgccaaaggaattttttcagaaaggatgcctgagaaataaactttcagagatattgcccatctgaaatgtccttattttttcttcata

SEQ ID NO: 11284 - DNA, 1060 bp, Homo sapiens
tataggtgaagtgtgtttcctggaggcagtacatcactgggtcttgttttttcatccattcagccactctgtgtcttttgattggagactttagtccatttacattcactgatattgatatttacattcattagtattgataagtaaggacttccaccattttatttttctgattgtttgatggtcttctctttcttctttccttccttcctgttttccttttagtgaaggtgattttttctggtggtatattttaatttctttttatttttgtgtttctcttttatgtttctaggtttgagcttaccatgaagcttgcaaataatatcctataacccgttgttttaaactgatgacagcttaacactgattgcataaacaagcaagcaaaaagaaagcaataaacactttatattttaacttcatctccccacttttaactttttgttgtttctatttatatcttattgctatctatgtcttgaaaaattgtagttattatttttgatcggttcatcttttcatatttctacctaagacttgtgtagtttacaaactgcaattacaatgtaataatattctttgtttttctgtttacttgccagtgagttttgtatcttcagatgatttcacattacttattaacatgcttttctttcagattgaagaacttcagcatttcttgtagggcagctctggtgttgatgaaatctctcagcttttgtttgggaaagcatttctccatgttcgaaggctattttcaccagatgtactattctaggacaaaaggctttttttccttcagcactttaaatgtcatgccactttctactggcctataaagtttccactgaaaagtccactaccagatgtattagagctccattgtatgttacttgtttttgtgtttatttcctcttgttgtttttaggatcctttctttatccttgagatttatgagtttgattataaactgccttgaggtagtcttctgtgtgttaaatctccttggtgttctataaccttcttgtacttgaatattgatatttttccctgaatt

SEQ ID NO: 11285 - DNA, 1032 bp, Homo sapiens
tgttgaactgtgggcgctgcctgggggtgctgctttaagttattactctgttgattagccaacaagataaataactcgcctttgacatagtgaagcagcagaaattggctttccatttcacttcttctgcaggaaagatagagcaagaaaagcctttttattaatacagcaagtaaaccttgtacaaatatcagtattcaaaatgctttctagagaaagaatagtgcagcactgtgcgtaatgggttatgtaagtggagtcacagaagtcctcctggggacacaaaccaattatgaacataagtgcttattgaaattgcatcagttgtctagatgaggagcttattgactccctggttcacttgggtgggcaggcggctgtgggggagggacgggggggggtgtgggggtggggaacttaaggtgcaaacctagcctaggtgactgttaaattaaggcttaacatttgtttcttttgagtgtttttggttgcgtaattttaaaagttgggaatgctatagaaatatttaaattctattagaatgtccaaggcaaaatgttcaggttaagtagaaatagcttggaccctctgttaattttaaagaaaactgtgggtttgctgctttagatattaaaatgatatgggtttatagagttatgttgtgtatcattgttgctggtaaataaaaaatgtttaattcatttattttaacagtgcttaaatttttctcttaaagtactcccaatggcagaaatgtggatgaatagtaccctcagaagtctaggaatgcagcccaaagtgtgcctgctataaattgaagtttttgatgcctgtagggttttatattttaaaatttatataaatgttgcattttgctatcttacatgcatgtcgacagtattttaaaatactttttttttttttttttttttggtttgagacggagtctcgctgtgtcccccaggttggagtgcagtggcgcgatctcagctcactgcaagctccgcctctcctgggttcacgccattctcc

SEQ ID NO: 11286 - DNA, 1028 bp, Homo sapiens
gcgtttttttaaacgtaatgctgttgcacacttaatagactacggtacagtgtaaacataacttttgtttgccctgggaaaccaaaaactttgtgacttgccttattgcaaaatttgctttattgctgtggtctggagcagaacccgcaatatctttgaggtatgcttgtatataaaatccttccacgttttcatgcttttcctcctatttgaagctgttttgacatatacctaattccataataactttaaaaaatactagcctctgaatctttttgaacttttcaacataattttcacagaaacaacctttttcctcataattcagttcatacgatcttaaattatataattaacaataacaagtgcagttggcataaactggtttgggaatggactgctggctcttattaagcattaagtgcagaagggtagggacatgttaagaaagtggtctgcttagaagactactaggtgtaggtgatgagcctgtgttgggcattagggagtgatttatggagggattggagagctttacttttgtaagtttgatacagtagaagtctgttaaaagagtttctactgaattattattcctctttccattttatagatgaaaaaactgaggcctcagagagttaagtaaccttcccaaggtcaggcaggtgataatagtggagccccaggatttttacctagatgtttattggttcaaatacagcatgtactcttaccttctgtgcaggtgtttgatgccttttagggaatctgatttacccagtcaataggtaatcttgagtggtcttcaggtagtgtttggggtagagttctgtaagttgtcccacatcttagatactggcttcattttgctccttggttcttttttttgcaccaactgtgtaagaaaaatgagggaacattccaagataaaaattaagcttacaagccttggttaggtggcttccgcctataatcccagcacttttggaggctgaggtgggaggattgcttgagctcaggagttcaag

SEQ ID NO: 11287 - DNA, 1081 bp, Homo sapiens
ttttataagatttactaaggctgctttgaagtattaaatatgatactgttcttatatttattgtaggcttcctgttggataaaaaaattggagtaaatcaaccaaaacgaattgaaaatgctaaaattcttattgcaaatactggtatggatacagacaaaataaaggtatgtaactctactttttaaaaattaaaattactgcccaggcagagtggctcatgcctgtaatcctagcaatttgggaggccaaggtggtggatcatctgagatcagaagtttgagaccagcctgaccaacatggagaaaccctgtctctactaaaaaaaaaaaaatacaaaattagctgggcatggtggcgcatgcctgtaatcccagctattcgggaggctgaggcaggagaatcacttgaacccaggaggcggaggttgcactgagccgagattgtgctactgcactcgagcctgggcaacaagagtgaaactccgtctcaaaagtctcaaaaaaaaaaaaattgctggattctataaactcaggaatcaattgcactaaaaagcttggaataggtatgaatctattgtgtatatacacatatatatacgttggtaaaaatgttgaaatatgctatgggactctttaaaaagagtaatgaggcctggcgtggtggttcacgcctgtaatcccagtactttgggaggccaggcgggcggatcacaaggtcaggagttcaaggccagactgaccaatgtgagatggtgaaaccctgtctttactaaaaatacaaaaattagctgggtgtggtggcgcacacctgtaatcccagctgcttggaaggctgaggcaggagaatcacttgaacccagcgggtggaggttgcagtgagccgagattgccccactgcactccagcctgggcaacagagcgagactcaatctcaaaaaaaataatgaaactgatgctctctttatgcttcgtttgtcttagatatttggttcccgggtaagagttgactctacagcaaaggttgcagaaatagaacatgcggaaaaggaaaaaatgaaggagaaagttgaacgtattct

SEQ ID NO: 11288 - DNA, 1007 bp, Homo sapiens
cttacttttttggctaagaagtttggtctctattcagcagacagggaaaatcaataaagaatttgtaagatgccatttagctttgaattcttcagaggaaaaacttgagtggtacactcaagttagtttccatgtaaactttgtgatataattgaatagttacatgaactgttttttgcttatggagaacctgaagcatatgtggtattgttagtggctgggctatgataattcaagtttattgaggccatactctatgtcaggtacatagtactctacaaaatactttacatggattgtctccttcaatcctcacagcaaccaggacaagggaggggctagtgttatccccattctaatctcatcagaggagaaatttaaggcttatagaaatgaaacacattatccaggattggatcctgtacatataaaggatattattggaacaattagtgaaatttgaatggggcctgttgattagatggtaattttaatcaatgttaacttccagattttgatgatgattttgtggttagatagaatgtccttgtacttaggatacacacacacatacacagatacacgggcacacacacacacacacacacacacactgtgtatatgtatacattgagatattaagtgggcatcatgtctgaaacattcttaaatgactcaaaaatattaacaatttcataatctgggtgacaggtatgagagagtatgtgtgtgtctttaccgcctttctacttactctaaccaaggtcatgtataatcagaaagttaaatataaattcaagagatctatggtacagcaggatgactgtagttcctgacgatatattgtaaattcttgaaaaatgcagagagtaaatgttgagttttctcataacaaaataatggcatgaggtaacgcattcgttaattagctagttagctatttcacaatgtgtatgtgccttcaaacatgttgtacatgataaatacaatgttctctgttaaaaaaa

SEQ ID NO: 11289 - DNA, 1040 bp, Homo sapiens
caataattcataggtttgtttcttttatgtaatcccatatttctcaacgactttgttcattttttaaaattattttctctttatttttgtttgaccaggttaattccaaagaccatttttcaagccctgaaattcttttttctgttcggtcccatctgttgctaaagctttcaattgtattttcaaattccttacgtcagttttttggttccagaaactctgatttctttttcttttcttttctttttttttttaagacagtttcactcttgtcacccaggctggagtgcaatggcaccatctcggctcactgcaacctccgcttcccaggttcaagtgattctcctgcctcagtctcccgaagtagctgggattacaggcgcctgccaccatgcccagctattttttttttgtattttcagttgagatggggtttcaccatgttggccaggctggtcttgaactcctgacctcaggtgatccacccacttcggcctcccaaagtgctgggattacaggcatgagccaccatgcccggtgcagaacctctgatttcttttgaatatgtttatttcttcttttatttcctggattgctttagaagtttcttctatgttgattgtcaactctgtcttggatctcattgatcttccttgcaattcatgttttgaattctttatctgtcatttctgagttcacattttagttaagaactgttgctggagagctagtgctatcccttggtggtgttactacatttagatttttcatcatgccagaattcttccactggtttctcctcatctggagatgattgcacttctaatttttgtaattaatttcatgtgagtaggattttttttcttccctataattgtttttttcttttcctttcttttcctccctattggggtgtgactgtagagaattctgggtaggatcttttggttttgcttctatagttctgtgcacttctttcagcaggttttatattgggctgtgcatttgacctacaagtcagtaggccatgcttattgata

SEQ ID NO: 11290 - DNA, 1050 bp, Homo sapiens
aatgatatccttttgaacaacctttgagtcaaaaaatcaaaagggaacttgaaaagtttcttgagacgaataaaactgaaaacacaacgtaccaaaacttaagagatgcagaaaaagcagtactaagagggataaaggcctacattaaaaaagaagaacaatctcaacctaactttatacctcaaggaattagaaggagaacaaactaagtccaaacttagcagagggaagggaataacaaagatcagagtagaaatagagaataggaaaataatagaaaatattaagaaaacccgagtttgtttcttgaaaaaaataaaaacccttagctagacaaaccaagagaagagaggactcaaatcagaaatgaaagaggaggtattacaatggatgcttcagaaataaaaaagatcataagtgacttttatgaaccacatgccaatcaattggataatctagaagaaatagataaattcctagaaactgactcagttttctggaatcaaattctggaaaatggaatcaagaagtagaaacaaaaaagcccaagattagatggcttcacaggtaaattctaccaacattcaaagaagaatcagtgccaattctttttacactcttacaaaaatagaagagggaacccttccaaactcattttatgaggccaatatcactctgataccaaagccagtaaatgtaccacaaggaaaaaactatgggccaatattctcaatggacataggtgcagaagctcttaataaaatgttagaaaatcaaattcagtaacatattaaaaggattatacactgtgatcaaatgggatttgtccctgggatgcaaggatgcatcaacataggcaaatcaatcagtgtgataaaccacagtaatagaatgatataataatatacattataatcttaatagaagcagaaaaagcatttgacaaaattccacattcatttatgctaaaactctcaacaaaatagatataggaacttactttaagacaataaagaccatatatggaaacccatagctaacaatcataat

SEQ ID NO: 11291 - DNA, 1051 bp, Homo sapiens
ctgctaccaggtattatgctaccaggtattatttgagagtattttttaaaaaggaaaactgctaccaggtattgaaccaccaagagtggttcaatttattattttaaatgaagagctttttttcagtgatgtttaaattagttttggttttgtaaagcggtttttatgtttatacgttttaaaacatgtttttgtgttttcctttggtttgttaggctgacttatccttgtataatgaattccgattgtggaaggatgagcccacaatggacaggacgtgtcctttcttagacaaaatctaccaggaagatatctttccatgtttaacattctcaaaaagtgaggtaattttttttcattttagtaggaattcattatagttgtttctgtacttcttttaaactaaatcatattacatattttaatatctcttacataaataagttattataaaatgtcatgttttgctatttttgccattccgtactagaatcatgataatttcttggcattcagttactgaacatcttttcttatatgagcagaggatcattcacactcaaatgtgtactgcattggtgtcaggtattaaataggtatgggggataggacttatttcttgatttgcagtccaaggttcagtgtaagggaagttctctacacactctgttaaaggcatttgttgtgtctatctgtacatgatttaaaaatctaattttttatctttaaaacaggaaaagtaatgccttctttgcctgtgccacaggattgttaaaaggataaaatgaagtggattaagtagatgcaaaaaccttagaaaaataaggcagtataaaaatttaaagctgtaattttaatttgttcttacatgtgaaaggtttgtctacaaatatccggtcaattaaagtataagaaatttaatcctaagagttttatgttaagtctttcaagcatttaattataacgttgcttaccaggagaagttaagatgaacatttttcacacttttggtatgaatatatcttgttcattgtggctctgtatctggttt

SEQ ID NO: 11292 - DNA, 1068 bp, Homo sapiens
acctaatctgatctcagggaatgagaattgcctgtttaaccaagcaacaaatacagcctatacaatttttcaatttctataatactttaatttacatggtggaaaaatgagggcaaaatgcttgtgtatgagtgatttatatccccaagtacctgctcttgaagataaaactcagattgtggcttatcttctgatgctgggcaaaaaacaaaaacaaaaaaattcagaatgatacaacttcccatatacctccctacaagaactaattacctttgtttttgctttataactttggatgttgcactttttgatttttcagagatgctttacagttattgtaatctgaaaattatttgttcaaaagtaaataaaattttcaggtgtatgaatagattttattagaagtgattctaacccagttctcatttgtattcctttagtagatactggtgttaaaagtacctgtattttgaaagaccattacagaattttttacaacctgtataagttatagttttatcttttctagtgacagacttacttcataagattttctgataatatgaataaaatgtatgcttcacatgtatatatgaaataatgagtaagcattaatagaccaatgaaaagaacttagcttacaatttattttcttgctctttaaaagcagtggtaaataatagcttttttttgttgttaaaatttgtaactgtagaaagttcattctgttgggatcacatatttgaaggcaaactaacaatgccatgtgcttgcttgaataggcatttgaggacaggttattttcctgagatttcaggaaaatataccaccaaacatttatgatgttatttgttacctggatctgtagtggattttgtaacacaaagaggcagaatatccagggtaccaggtagggcagtttaggggcagagttaatatgaggtgtactgtaatgtttgagtggaattacatacagtgttaatcaagagatctagtgctatggtagaacttattctgcttgatgatacaggtgactgttcttccttactaagagcagtttctacctgt

SEQ ID NO: 11293 - DNA, 1064 bp, Homo sapiens
tacaatgtgtttgagagaggagcatttggttttgtgtcatatctggcaagaatgtgcttttgtattactttctacattgtaaattataatgcctatcctgcatacaaattttgtatttagttttctgcttgtaagaatctttcataggtcagtaaaataaaatattaagtttactatgccattccaagcacctgactacttttggctttgctacttaatatttttaaaatgttttacagcttgcagagaggacttttatatacattatcttaattttatatatattaaaataagtttaaaacttagcatttatgtttataaacaagctattttggtcaataagaaaattagaagttgggaattatgaaggccgttttcatcttcagactggactcagagtctaatttctttctcatttattttagcgctactttatagagaaaatcgtgatttattaaatcaaatagatgttaatggaagacttgtttttgtttgcatctgatcatcttgcagatcctggatatttaatcaaattgatgcagaagtttgaaagacaagcagcagtaggaaatttttgtttcaagcttgacttttctgacaatatccaacagctgctcatatttttaaaaattagaaacattcactgagaaacgttaaaaacttaaaagcaaatactgtgttataatgagaataggtaataacatatcattgatgctacactttacatattattgcaccattattctgaggtaatcatatgccgaacagattactgcacaaagtaatgctttaggggtgtagtttttatgggaatgaacatgtctggcctgaaattagaaaaaaaattggagccataatctttctaatctatgcttgcttatgagaaattctaggtatatttatgtcaggccaaactatttgctacagcaaaccggttaacctgacatctgagatagtctttaaagtgtttaagtttggtatacaatgcacttgtgtgtgtatatgactcatcctaaaatggatggatgtgtgtaaaaaaattgtaatccaatgcttaaatgaat

SEQ ID NO: 11294 - DNA, 1030 bp, Homo sapiens
tgaaaattttgaattgcacaatttttcaaatattctcaattcagtagcagtgaaacaacacatattgaggttaaagttctttacattaatagtatactaccactgttcttagagtagactcatacccctacttctttgattctaggtttactctaattttaatgtttctcctggaaatgtaagtcctaagtttttatagggctttttagttgccttcttcctcctcataggaaaatatccatttgttaaataaagatattaatatatacagaaatatgtttgtaaccaatattcttaaacctacacttaactgacccactcttttaaacaaaccattattttagattcttagtcctgagtattctgagcatttatagctagtaaactactctctagtttacccttgtacccttttctccaccaggttagttatatgcctaacaagaatcagtttttatgccaatgttaatgtaatttttactttaaatgtgatctaagtgaataaaatatgagcacagaaagatagaactattgttttaatgaaaagcacggtgaatggttcggaaggacttatataaagttctttacaaattgctaaaggattaggtgtggataagcccagaggtttaggaaacttttggttcaattgactaaacagtatggaaaactattttctcacatatctggaggaatggaagcttttgtgtggttggttaatgcagtggtttaataattaattccagggtcagattctttctgtttgttctgccattgtcagagtgtcagcttgtccacaggctagctctctttatggttacaagatggatatagtagctctagttgtgctattctgatataacaacacctattggggaaagagggtctgttttttctttctttcctagaatcctaccatcagtttttcccttatgtctcactagccaggattggtttaaatgccctttcataaatcaattactgacaagagggataggattaccaaattggcttacactgatcacatttcctt

SEQ ID NO: 11295 - DNA, 1026 bp, Homo sapiens
tggggcatagttgctgagttgtatggtaagcttgtgtttacctttataagaaactgcctaaccttctaacatggctgtacttaccttcatttttgaaagatattttagctgggcttagaattctttgtagatagttttcttttcttttctatactttaaatatattgaaccactctcctctgatttgcattgtttctgatgagaagtctgatgtcattcctacctttgttactctatgtatttttttcccctgctttaagattcttgtttattgctgttttgcagctattttactctgagatgttgtgatcatgtggttttgtttttgttattctctttagaggttgttgaatttggatctgtgggtttatagtgctcatcaaatatatttaaaaaatttagttccagtttcccctccttgtgcttcagcctcaaaactacaggcagtgagctgggtgtactacgtttgttctttttcttgacgatctctgtcctgagaagattgttgtgtgatgtctggaaaccattgtttcatatattttgtctagttttctgtttatttaaggtagaagggtaaacatagcctccttttttcatcatgaaatacatccttgccttatagaaaatttcattgtagttttgcaaatatttgtcttttctgaattcttgaatataggacttggtgggagaacagtgtataaaccttaataaattttggcacctagggtgcatgctgtctctcatacttgttccttttcacagattgtgtctctctttgacgtattgtacatcctttcatttccaatatgaaggttatcaacagaatttattgctgaatatttttatttaatatagtacagtgaagatagtggtgacagatgttaacttttcatgtttatttggaagaaaatacagtgtcttcagtcatttttcttttttgtttattaaaaggagataatgattcttagttcactatagaatattagctcccacattgattagagtatataatggctatggattgaa

SEQ ID NO: 11296 - DNA, 1034 bp, Homo sapiens
agaggtcttctaggaatgtatttgggagtgtttataccaattttgagccccatcagtagtcctcatattcatctgacatttgataatttcagaattaaaatttttttccatctattgaggttgtgtttgagatatattgagatattcttcatagtcttttaaaaaagattttttgttttgtcttccatatttaatctacctgaaattgatttttgtacatggtgttagaagtacagtttcctttcccctgcacctaaattatcatattagcattgtgtaccaatttattctaacctccttaactattcagtagtgctagctctattgtaaatcaagtttctctttatatgcatggatttcttatgtctctgttaccttgatgtgtttgtctgtgcctataccaatatcatgttttcttaaatactaaagctttgtgttaaatcttcatgtctgtctgtcaacctttttcttcataagagtcttgacttggccttttgctctgtgacaaatttagaatattcatgagaatgctcccctccaacacaaaaagaagtattgagtttgtaagtggaattgcattgactttagttttctttgtggaagaatcgataagtttatgtattctttcatgttttctctcaaagttttatatttttttcataagggacttagaaatctttagtccaatttatgactacttttgttgcttttcttggttgtaaattaaaaaaaaatttttagttataggtgttattgaaatatagttgacttttaaaattgatttttgtatctcaatgttgctaaactttttaatttttataatttatctgtaggctttttggggggttcatataagtaaacacatcctttggaaatgacagttttgaaattgtcaccagttttgaagttgtcatcattaaataatatttgatacaggattttttttatagatatactttatcagggtaaagaaattgttcataatgctaccttatatatttttttcctctgtagcatctttttcttcttaaggt

SEQ ID NO: 11297 - DNA, 1046 bp, Homo sapiens
aacttccagatgcaccacttcacctgtaataagacatattaacatcatatgcactcatatattggaatatatgcatcacatatgatgcacttgagaagactacatcagctctgtggtgatgtggctttcagaatgcataacttcagtctaatgagaaaacatctgacaaaccccaactgtgggacattctgcagtgtgtatgatataacatcaatattatgaaagaagaaagactaggataagtctcggattggagaagactaaggaaatgtaaaactaaatgtaaggggtgggggacaaagtgttgtaattttaaatacacaaggaattccttactgagatgacttcacacctgaagtaggtgaagtaggaagccatctggatgtctagaggaagagcattcctggaggataacaaaggcaagggcttggagacaggagtatgtccgatgtgtttgaggaatagcaaggaggccagtatggcaggagcacatgaagagaaggggagaatgctaacaggggagattagagataacaaagagtaaggtcatgaaggccttggaggccttggtaatggtgcaggagtccattgtaaatgtgtttcacctctattccgtttgatttctgatgttcttttattctgagcctgaaggggataaagtgtataagtataaaatgtaatacctaacatctagcactgtgtgtagtagatgctaactcagtgattattgaattagtgtacatggtgagatgtttagaaacattttaaagatcatgtcttcccttgctaaaggaatacttttcatttttaattacttcctgtaacataaattaggattctgatacctctgtatatttttaaaatgtaaaggttttaaaataatttgtcaccttcaataatatctatttatgctattgaacagatgtcttaaataagcttctatttttattagttttagtatttgtaatagagtttatttttctttgaaaataactcactttttatattttcaaggattcaacatttttgtaaaagtgaattgattt

SEQ ID NO: 11298 - DNA, 1088 bp, Homo sapiens
ttcttgttagatgtgaaataagaaaaaaaccttaataaactattaatattataatgcaaaggaaggttcttacatttttttaaactttatattctccacagtgtatatagcaggtccagaaaacccatgttcaaaaaagaagctaaaaaaaaagttggggaaggcctaagtccatagactataattttgccatatgtaacttggtctcaggaggaggcaagttttagttttcttccactagctttagatgtgctattttttcctgaggtattaggcaggtagctatgttttaatctttacagaaatagaaatttcaaacatctttttccttgaagtcttgacaggaggactggaacatttctaccaatctctaggtttgaagttaacaaaaataagtatagatatctggtacgtaattcagcaaatgtttgttgaacgaatgaataaactcatcagatcctgtgtcgtgtgtgtgtgtgtgagagagagagagagatgccaacactcctggcattttctccttgtctgccttgcactggaaatcatgatctaaacatcacagatttaattttgtagggatgtagctctgggtcttcactaccttacttttgagcttcttctcagaaagctttcaaaacgtgtttctttcgttctcctacatctatcccatataattcatgttcattgatttatagatttttgcacatacaagacattcacattaaacccaagaaaaacagactcttaagatggcccatggttgctaagtttcttcagagaaagtatgtgagggttaaaagagattggggttctagtgtatttggtatttcaggtctcaaaacaagtcatcaaaatacagacttcccagcagtttgtctccctttttttcttgagttttttagataactggacgctctatataaacacatctccctcagcaaagtacatcccgtttttttctcaatatgtattcatattcccttccttcctccctctttatcagacccatctttgcctaccgtcttttaaggatttaaaatattctcattagaagattttccttctgtatgcatagaggatttgttttt

SEQ ID NO: 11299 - DNA, 1034 bp, Homo sapiens
aagccctggaaatcctactatgtaagtttttatgtcagctacctgatttgctagctgtgtgtcttaggacatcagtctctgtgtgtctcagttttctcatctgtaaaataggaacaatagtacctagctcatgaaggattttttttttttaagtgggagaatagttagtgtttgtgaggggggcactgaagtgactgctgtaattaagacagactgtagaaaataggttagcaatgaatattgaaaacctttaaaatgtaaacattccttgagtcagtcatatgtctttccgtaaatttgtacttcagctgtaacctgacattcagacaatataatataatgccatacttgtttttaacaaaaaatttgaggctcaagtgtttaaggaattaagtacattgagtattacactatttttcaaatgttccttatgtaagcttaagaatattttaatgaaaattatttgaaatacctagtagatgcatatcatcagttacctgatttgtaagctaccctgttctgtgacttaatgactattttattttactgtctgcctcctcccttgccccttttctcttttgttcttgtttgtttgtttgtttgtttgtttgttttgggggatattttgagacagaatttcgctcttgttgcccaggctggagtgtaatggcacgatcttggctcacagcaacctccgcctcctgggttcaagtgattctcctgcttcagccttctgagtagctgggattacaggcatgcatcaccacgcccggctaatttttgtatttttagtagaaacggggtttctccttgttggtcaggccggtcacgaactcctgacctcaggggatctgccctcctcagcctcccaaagtgctgggattacaggtgtgagccaccgtgcctggccttgttctttttaatgtattaccttctcatagttttctttttttgtgcctgtttgctagatttcattagtttcatgttttaagttatccgttttccaattttaaaggttctttagcttctgtcta

SEQ ID NO: 11300 - DNA, 1025 bp, Homo sapiens
aaagagtagtgctgctgtaactcaagttagtgtgacttttagaaaacttatagtattaaaaattaatttcatttctacagtttggttttatcgaattgtgatattctcttaagaaacatggaatatattatagaatgtttgttttatgtttttctgaagaatgagaaaatgttagattttcacatttatggtatgatttacagatttgtggagtgtaaatgcaatgctctgctctgttttctttatgctctaatataattaatttgtttctagatgctggcatcaccatctacatcaggtcagctgtctcagtttggggcaagtttatacgggcaacaaagtaagaattttgtatttattctgggatactttatttaaagagaaaaataagtaactaccaaataaagaacaaccagtacttcctttgtgggtttattgtatgacttaaaaggaaaaatgtttaattttcagagttttattttacttacatagcaaaacctcattatttcagaccttattgatcctatggttgctattacttggatatagcatagattgaaatttatttcaacatcttttacatctgtaaattttttgcagtatttttgaagaatttgctaaactaaaaatagacattctctgtgttttcaattaaaggaagttaaaagcttttttagtttatttgactggctactctgtgtgtgtgtgtgtgtgtatgtgcacgcctgtttattaagtaaactcattacttagcagtttgtaaaatgttctttgtttcacaagtatttcttaaatatttcttcttttgctttagctcagtctggatatagaatctagatttttgactcacggtttaatgcttgttccgttttgcaggcttctacttctatttttttaaagtgttgtaatacttttaaagcgcttagcacagagcctagtgcatagtaagtgctcaataaatgttagctattatcacataaaatttttataaaactaaacaataaaatatctttatattttctcaa

SEQ ID NO: 11301 - DNA, 1374 bp, Homo sapiens
tgtaaacaccttggtcatagcacttatttatttttaagtagtcttttatatctctagaacaagagaagggaaagtattcttgctgaggagttagatatgagtagtaaaggacagatttgaggaaaggaatagagaaagaagaaagaagattataaatcagatatgtagtgtgtaaacagagtaaaatgcttgttaaggttagaaaacatctttgggtcttgacagaattttaatactctagaacagtggttctcaaccctgactgcacccatggaaacacctggggaatttttaaaattccactgccatgattgcccaaaatcacaattgctggagaggagacctagacattaaagttccctggatgatgcaaacattattaactaccattaaaaaatggaaaatgatattggttgcaaaaaaggcattgaaataggagtcaagaaattggatcattgtctttaatgcctcattacttgtgatcttgagcaagtcacttaatgcctagtgtgaattctttatctgtaacctacttggataatctctggagtcttttctattctaaaatactttgaatttaatgaagaaaattgcataaggaaataattttacaggaatcattaaccagctaagtgcaagacaggttgaaggtaagaagccattgagataaagcaccatttatgttgtcctttttagtatgggcatgccagtgagttcctagaggaagctggctgctttgcaaatggaaaaggggacactttaaggcatcagttaaggactactctctcctgcccctataaagattttaggggactttatttaagtatgaatattcagggatttggttgctatgattttattttttcatgtaacttaatattttttatttctagcaaaaaattgaataaagaatgacgtattttgccataagtgtttaagtgatgtgctgttaatcagtttgtgcagtggaaataattaatggaataatttcttagatcatattctttaagggtttctgaaaaatgatcaataaggaatttgactaacaccctgccagataagaggtaggaatctatttagaatgtgttcgtatagtcctcctaatattgtgttgttattatcaattgttagattgaaagaaaaatttgactcaaaattataaccttttaaactttttttaaaatttgtttttattctttgtaaaaaggtgataaccttttttataagatgattataagaaggaattgagaggaagtagtatagtgctttgttgataagtgcccaataaattttaattttactgtccttccagtcacctgctcatatacaagctcatttatacatatttatatttttgcctgttttagttttttt

SEQ ID NO: 11302 - DNA, 1034 bp, Homo sapiens
ttttacttagcatggtaacgtagtaatttgtgttataacatcaggattatttccttaacacctggagagagcctacacattaacttagttagtatttatgcctcaaaatattttgcttcatagcttttactgtcctcagccctgtcactgtgagaactatagcttagactaggttgggtggtatgacattctggctatggagatccagattgaagagaacctttaaaattgtatggaacacttacgttttttcttaatagttttaataatactaatgttggcatttaacctttatgaattgttgattcagttttatgtataaaatttagttacatggaaaaccaactctgattttgacagtaaaaaattccttcagtcttttggtttatttcttttatcaactgcttcagatagaagagaacaggaagctttgttgctattttgctttaggttttaccttctccaccctacagaccctttcctgagaaaggaaataaaggatgttatgatcataggagcaaaaatgaacagcattattggagaggattaaatgtaaaggaagtggaaggtaaaagaatgctcactgaaatggagcatttgtagaggcaagagaagatttaataaggaaatgtcatttgtagctatgagcttttaatttctaaatgttaatgtatgctcagcagcatagattaatcacacaagattaaaatctttgaaaaaagattccaaattttagcatttgtaagtggtggcttgtgttcaagatgtagtatgaaatactgtattccattctttctaaaatgtacatttcttcataatttaatgtctttgaaatcaggctacatctgcatatcatagtttaattgtagtttttttctaaatgtgatgtaaattaacagtaaagatgtctgacagtgccatcttagattctgcattatggttttatacagtgctataaaacttgagaattattttttaaattctgttttaactaagcatattttatgctaggaaaattcccaattctttcataa

SEQ ID NO: 11303 - DNA, 1048 bp, Homo sapiens
ttatttatgtcttaaaaactacctcatgacgttggtaggaaagcatttctttacatggaggtttattttgtgggacattacctcctctggatgttacttcctcagtttacaagtagtgtaaattctcattgattcttttatgaattgtaatggattttctcttagcttttgagaatttagaatctgaaatttgaataaaaagtaaatatattcagtataatttttcaaaatgctctagtttcaagatagttaaaaaattatgtggaatttacataattaattcaaatatagtttgtatttagttccttatcaaataatgcaaatagttggagatacctcaatttcttttgagtgttaagaagagcaagaaaggagtgaagtttttgcaacacattgtgtctttatttggtctgcctatgtttttatcacattgcttataaaacttttaaaatccttgtttgtataaaaagtttctttagttaaataaaagtgtgtgtattaattagtgtgccttctggacaaattaagaaatattttttctatatttcaatgcggttgtatttaataacttataataaatgagtaggaagcattcatatttatttattttatgtgtaattttttttttccggaggaaagctttacaaaatgtagaacatgtttgatgtaagccacaggaaaaagttaattatcttttcttttaaaaattgaagttttaaccgtgattggagataccacaaagaagaacgagtatggattaccagggcaccaggcatggagccaacaatgaaaaccaatacctatgagaggggaacatattacttctttgactgtcttaactggaggaaagtagctaaggtatatttctttccatgtgcaaatgtataaatctaaacttgaaaaaagaagtgtcctcttttatctgtttataagtaccaatacatccagttccagtaatgtgccacatatttgccaactgtttaattccatctccttggcttgacactcttagaagagtgtcccaaaacaattggtttcactgatagtt

SEQ ID NO: 11304 - DNA, 1016 bp, Homo sapiens
cttggggtatggctgtctcagcacaatactcaacataactgcagaactgatgtggctcaggcaccctggttttaattccttgaggatctggcaattggcttacgcaaaaggtcaccatttgaggtcctgccttactaattatgtgctgcccaacaactaaatttgtaatttgtttttctctagtttgagcagggtctgaattttttcatttatttccttttttgccagcagacagacttgagtctgtaaagacaagcaaatacactgacagaagtttaccatagtttctaaaatgtaaaaaagaaaacccccaaaagactcaagaaaattagaccacaaattttgcattgttcattgtagcactattggtaataaaataacaaatgtttgtgcatttttatgtgaagatccttctcgtatttcatttggaaagatgagcaagaggtctgcttccttcattttacttccccttctgtttttgaaaggcagtttcgccaagcttaatgcaagaatatctgactgtttagaagaaagatattgccacaatctctggatggttttccagggttgtgttattactgagcttcatctttccagaatgagcaaaacactgtccagtctttgttacgattttgtaataaatgtgtacattttttttaaatttttggacatcacatgaataaaggtatgtatgtacgaatgtgtatatattatatatatgacatctattttggaaaatgtttgccctgctgtacctcatttttaggaggtgtgcatggatgcaatatatgaaaatgggacattctggaactgctggtcaggggactttgtcgccctgtgcactaaaagggccagattttcagcagccaaggacatccatacccaagtgaatgtgatgggacttaaaagaagtgaactgagacaattcactctggctgtttgaacagcagcgtttcataggaagagaaaaaaagatcaatcttgtattttctgaccacataaaggcttcttctctt

SEQ ID NO: 11305 - DNA, 1065 bp, Homo sapiens
atatctcatatttacaagttagtggattcttttcccatctaaatacaaatactgtattttaaaaatcagaagattgaagcttccaaagcagaactagagagtagaaaaaaggcaatgagttttgatcctttaaattttcatttttaacctatttttctatgaagagtaaaagtctgttggcattaaccaaatcttttgaaaatgaaacatttatgacattgctgtgtttgtgtaccaggaatataaagtggcttaaaatttacctttttctatgcattttgagatatgagaaacactataaaaaacaggattttctatctttcataattaaaccaaagcatctcctcagtaagaaagatagcactatataaatcattttatctattgtgcacaaaccttcacagaacactataccttatttgacataaaccagagtcaaagcatagaaatcaatctagaaaaaaaaagattacatttttcctagtaattcactttgtaaaataaaatgtaatttttcctacataaccacaaaaaacaagtaggaagaaaaatgtggaaggggatctttattctcatgaatataaacaacaatatagattgaagtctcagctgaagcgtgatcatgactggtactgatgaatgactccgaaaaataagatagctcataccaagtggtttgttgtcttggctgtaatctttttttctctttttttgttaactgccatatacagagttttaaatgcacacttttccatttttttgagttctttttatcctgaatcatcaaaatgaagaaactcttgcatgttagccaactttttataacttgttaatatcagaaattaccatgctatggacttcaaaatacaaattactctatttgaaatatttaaaacactactttgaactttttaaatgtaacagttataatacgccttgattttataacgtggttatacatgtaaagaggctgaatccaactaattatatttcacattttctttcaaagctttaattctgttaatttccccctatatagctagtgaaatagatgtgtacactatg

SEQ ID NO: 11306 - DNA, 1034 bp, Homo sapiens
atattttcagcattaacatcctaaatcaacatttccattttctgaggatgtttctttagcactaggcatcgctgagatagaaaatgagttctgagagactttctttggaaacaaaatggctcacccttaaatttccccgtttctggatgaaatctgatttaataatacagtattgctcttcaaatatgagagaaatcattgtaaggaagaatgtgggttttaaagaatagaatgggttggataaatgtttttataaaatagaagtgaaaggatcagaaatcagcagtatcaaaacaacaagaagaactgattaaaccatgcacttgttacctctgaatttctctttgcagaaattctacttcaattttaaaattcagaattaaaaaaaaatattcaaaggatagttaatgaacaaaaactttaggaaagtcaaacatggtgtggcataggattggggctaaagtgaatatgcagtttagaattgctagtgacattgtatcataaaagaactgagtaaagaagaaccaagaatctttgggcacatttgataaaaaataaagttgaaaaggaaatatcaaagatgtattacaaagacaaaaaggatattctataaaaagtaaggaggcacttagggaggatggatattaaaattgcaaagtgttattaatgctgtggttaggaacagcagatagtggtggaaatagtggagatctacctaggcaaaggcacaatgtaggaaaaggatgaaggaaagagaagtatttcataacgtgtgctaatctttgggcaggtgtgtcttgtatgtaaatgcctgtcataaaaggcaaacactgaaaaaagaatgaaaaaagtaaatcttataactcagattgtagatctgagttataaaatagaattaatagaaaacagtttattccctaggttatttttaaatacttctgttgatgatttaattctgaatgactaactgggaaaggggatagaaaacttgtgctagtaaggaactgattacagtataggagagcggtttatgg

SEQ ID NO: 11307 - DNA, 1059 bp, Homo sapiens
tattgggttagaaatctttataaatgtttctatcagcctttaattagaatcctagttttctctctaatccagtggcaaaatctccaaatttatcagaaaagagtccttttcaggaaggaaggagtccttttcatgaaaccccaaagaagcaagggacagtagctgattataagtcaatttttgagaagaatccatgcaaaacaacaattgtggatgacaaagtcttaggacagcaatagttaaagatacaattgataaagaaatttggttatttctatggtatacaacaatttaacataataatcataataattactgacaagaaatattaaaacatcagaatttcaggaatctcaaacaattctggacacttattaacaacacatctatataaatgtaacacaaaaaaagctaaacacacctaagattttgacaatgcttcctgcataattctaacataataaataagcctaataaggctaataagtccctcttggacttcagtgaacctaatatttgaaaaagttattttgaggtcaaaaagactgaatttagaacttgaaattttgctcttggaaagtctgccacctatcaaaggtttaagacacttgatatcacaaaataggattataggtgactataaaatagtcattcatttagcaaaatgctaaaacaagaatattcatactttaatagagaagatgacttaatttccaaaacaataagacctaataaagacaatatgaagccaactaaatctgtcttttgccctcccttttttcattcttctgtagttttattcaaaaggtaaacacaatattttattatctctcacctgaaaattttgttccaaagacaaaatcaaatttttgctttgtatggtgtattactaatgttaaatgttaataaaaccttataagcaaatctgtctaatgttaatcagtttgaccataaggtaagatttccataatctttctataccctattaaatagcatatcaatgatccaagaaaaccctgttattccaacagacaggcccagatgctggccttgcattag

SEQ ID NO: 11308 - DNA, 1032 bp, Homo sapiens
agtcttagtttcgtatctcataggattcttggagggattagtccattaaaatgtatataaaggcaatgagtgatgctggatacttttgaaatgtttccattagtattgtatattattattataactattatatatggaatcaatccaaatttgtttgcttggtgccttgaaaaccctgctctcaagcagctcacagtccagcagggaaaacagaacaaataatttcaatgaaatgtgccatgggcatgagaaatgtcctgtaggtacagacataatgccagggagcaggaagtttatggagttaagttagggaagaagtcagcagcaggttttagaggcaaagagagggtcactgccttttttaaaatttaattttttttttttttttagtcttctggtatggtaaaaaattttaaagtaaaaaaggtgtgtaatcagggttacaaaaattgtgtaatttacaaaataaaggatttattttgtaaaatttctttataatgcattatcggtagattgatttaattatgggactgagtttaaagttatatggagcatgtcttcatttcccattactgtctgcatctttgtgactctacatttaactttatttgtagataaattgaagggctatattcacagccctttgtgagggtgaggcctgggctaataaccttcccttttcccaccacctgtcacccccaggatgggtcctgggtgttagagtagagacgaaaaccattttaggggagaaaatggaatatacaggagcaaaaatataaaaaacagcaatgtgtattctggaagtcacaagtgatttaagtcaatgaagcataaattgcaaggagaggagtggttactgctaaagctggggagaaaactacaggccaagtcatgacaggcctcatatgctcatcaaggagcctgggttttgtaaataattgggtgtcactggtcaatttctgaagcatcatggtcagttttatattttagataaatcattctggtggcagtgtggaaggtggatggaagtgc

SEQ ID NO: 11309 - DNA, 1048 bp, Homo sapiens
ccattttctagctacaaaatgtgcaacggagtgagactacttgatataatttctgatataatcttataatgtgatgacagagagattctttcctctaaatttggcagactgattgtttggaatatcccaagacagaaggaaaaaaattcaaaaagtgctgttgatgcttttacacgtagttcctcatttgaccctcctaacaaacagtaaaatagttgttactatcaacatgagaacatctcttgatgttagaaatgagaacatttcttgatgactatttcagccttatcttcagtgaccttgacaagttactcaatgcctcagttttctcatatgtaagatggcaataataatgacatctacctgactaagttgttgtgaagactggtgagataatgcacataaagcactttgcatggcaccttacttgtgtaggatgcattaaatgttaggtgtaattatttctgttgatgatggtgcagttattatcacactaaactcatgcttttcaagtatgccatgttgtctgttactgttattccctaaattagctaaattaattgccctgaatgtttaaaagtataagtgtaattttcattaaacaagatttcttaatgttaaaaacaagaaaagaacgaaaagaacagcagaaaggcacctactaggtaaagaactagaggagaaagaaggggcatcttcaaatgaatttggcatcacccaacaactgttataaataaaaatattctaacttttgtttctgatccttggtatcaaatagacaaaagattatgagttttaaatgaggtttcatatttgcacatgagtatgtagcattttgaagacactgcacaaatctccaggatagctgagggctgagtgaacactttgtcacagagagtaggctgatggcacaatgttaggagtctactcctcagatagaatttaatgaatgacccagaatttgtagtcctgggtttgaattgcttttatcctttcctttttttttttttttttaatctcatccaccctcatgactttttctgactgt

SEQ ID NO: 11310 - DNA, 1088 bp, Homo sapiens
ttgataaatggtagctactatttatatgtccaaaagcactatatgtggcatattgaaagtgctctaagaaattgctgaatttaagtttgatatgtaacaaagaaggaatattcctcagctgtttctagtctggttttgtgactagctatcttggaatagttatgccagatctgaagcaactgaggcagtatggccagctgcctttggaaacaagatcaaacgatcaataaatatcagttgagctccatactctgtgcatgcaataagactcttgagcttaggagtctataatcagactacttataaaagggtaccaaatgagctaggcagagtggtgcgtacctgtagtcccagctaccagagaggctgagttgggaggatggatcacttaagcccaggatcttaaaaaacaacaacaacaacaaaaacaaacaaacaaacaaaaataacacctttaaaagaaagggtagagggtagaaaatcaaccattataggctacattgtatagaatgtatcttataggagagctgttaaccgagatggttaaggaagattccataaaggaattaaaattgaacttccttagtctggttaaagaaaccacaggggcagggcacggtggctcacgcctgtaatcccagcactttgggaggccgaggcaggtggatcacgaggtcaggagatcgagaccatcctggctaacacagtgaaaccccgtatctactaaaaacataaaaaattagccgggcgtggtggcgggcgcctgtagtcccagctactcaggaggctgaggcaggagaatggcttgaacccggaaggcggagcttgcagtgagcccagatcgcgccactgcactccagcctgggcgaaagagcaagactccctctcaaaaaaaaaaaaagaaagaaaaaaagaaaccacagggccctatgcacattaaagtatctccttattgacttgaaagagttcatttactcagtccagtggtcttagtccttaacaattcttagcccatgaaccttgaaatctgaatgtttttattatatcaaataatgaaagcaaaatgcacagctcatgaatacacagtt

SEQ ID NO: 11311 - DNA, 1032 bp, Homo sapiens
tgaatggtgcctcacaaataactgaatttcctgatttaactggaactgcaaacctggagagtctgtaagtactgagtagactcttgactttgcccagaacatacactgccattagagcttgatcagtcttaacatcagtgagtcaaaatatgtcactgtgtgatgcctgaatgaaagaattatgtctggtttgtgttttaacaggactttaactggagcacagatctcatctcttcctcaaaccgtctgcaatcagttacctaatctccaagtgctgtgcgtatcagtaaggcaataatgttgtgtaaacaggcaacttccatttaggggtgaaatggcagacatgatttcaataatctctttaaaagaggagaaagtttttcctttcaggtctgcaggaggtcaagcctcctttgccctctttggtccaggctctctgacatgatcctggtaacaaatggtaatgtaccctttgttttctaagtcccaaacaagctcccactagactttcagttggcacatgttttctttcagaaaagatatgaagaggccaaaatcactttatttccccctctaaaggctttgcagagcagaacaaaataacataatggatcaaccacccaatatggatgccaaaatcaaaaactgagatctcagatccacacaatccttgataaaggtgatcaaacatccttccagtatagttgtcaatgccatgttctaatgtttcctgtaatggttaaacagcttgcatatgttatttctattgacttgggacttttttcctctgcctttcccatgtgttatgaaaaaaagtagtttacatggattcaaggagacttgttttgaccttccatttttcagccttctccctcaacttccactcaacacaatcattgtcctctcaagcatgttgggacttaataaaaggactcttaatcttttgccatggctctgcactcacatagaaggcacctgtggcaattgagcgcctgcaatttcactataagctttacttagcagcactcagaa

SEQ ID NO: 11312 - DNA, 1047 bp, Homo sapiens
ttctgtttcattttacaagaactatcctgagtttctgtggatggaaacattacatgtaatgcagatatagtgaacactggaaagatttattaaagaattatatttgtgtatactttataaattagtccctcattagatttttttttcttaagcataagactgaacttaaatgtgttaattttagtagaatcaggcactgctcgcagaaggaacacagattgtagagattaacataaattgttcttgttctaatatatatattttttcatttctgtcgtgcttggaaaactagtaaatattatgtctaagataaaatggaatggcccctggatttacttcttataagaagcagtagtatgtaataaagctattagcatgagcaattaagaggctataaagagattatagttacaaaagaaatactgccatatttttaagttaataacttaaaccttctcaaatgggttaaaagttgaatgaattgacaccctgatgttatgatgttggaattttaacttaaactgggaggcattctgtgagccttcactttaccttctttaattattgtccttgctaaactcaacacagacttttctgttatgtgtttttgaggaagttggggtgggaagagtcagggagataagctaaaattgtcttcttttatggggtaattgtactctgtagtctcttggtttcctgtgaagttagtatttatgtgggggtgggggaaggtagcaagaatcatgggtatcacggtactttgtttttgacctcctggctctttcagacagagtgaagaaagcttttccattcttactgttgtagaagtagataggaaataagcttttctcattacagtgaaatatgttttaaaaactagagtagctgggcacagaggcatgcatttgtagggccagctacttgggagagtgaggcaggaggatcacttgaggccaggatttcaaatccagcctaggtaacactgagacctccatctcgtaaaaggcacaaaaactagttagagatgaaattgagctttattttaaa

SEQ ID NO: 11313 - DNA, 1035 bp, Homo sapiens
tgtgtgttcttctcttttctctggtactttctcctgtgaactctagctgtattggcatcccctatttcccacatctctctcctcactggacaccttctgagttttctctccctttcccatagctgggaacacacaacataaagctagacaattgtattgctcacttcatttggttcctttctctcaatagtcactatccttcattgtttgctggggagtatcatgaaaactattgtttcacagattggtcagtatttttagtttagtttattattattattatttttctggtgggaggttaaatccagcctgtcattccatcttggccagaagtggaagtttttatatagggtttctttttcctttctgtttttggtggaattaatacctatctcttctgtacatcttttttccccttcaatcgtaggctgaatgtttgtgttccaaatttgttctctttgttgttatgaactcttaagatggttttttctcccaagattttaccatttccttcttgttggcctgcattaattctcttttctgttctgtaccttctgacaggcgacattatcagcaagatattcaagaattttaacagatggtatgtatttagagaatgtgccagtagatgtttggatagctgaaggtcatcatcatatacatagagtggttttataccagtttgtaatttgtattaaagtgtcttttttcttccttctcattgatagtctgtataatcttccaaaacaattgcattcctctcccccccaccttcttttgcagattcgcttggtgacaggtggtgctacttcctcaaatctttgatctgttcttccctttctttttctcaaggtatattttttcattgttgaatttgtatcatgttttccatcagacaaaattccttcagtacccttgagatttgatttagatcctatttaagactttacattttgtgtattagtccgttatcacactgctataaagaaatacctgagactaggtattttataaaggaaagaggtttaattgact

SEQ ID NO: 11314 - DNA, 1031 bp, Homo sapiens
ccacgtaccaccccttgtctcctaagaaacagttatcctaacttttatcataatcactttcttgcatttctttattagtagtagtattaaaacatagctattgtgtcttttttaaaaaatggttcttccatatcttctacttagtattactgggtttttaagagttttgtttttcttaatcagttgcaccttttgtcttgttattgtatgtggttttttttgggggggggtatcttgttcaaatttcaatttaaattcatttaatcaaatacattatttcttgattttaaaagattggaccatacagaaattatggttcaccctgcccccatactgccaaaccacccaacttgattttgacactatgtatcctttgagcagttttcgtattcattgttctctgccagatgaactggaagatgaaatgaaaacgtcatttatatccccattagagatgtattttagataagtttttgccatataatttgttcccttgtaaaatatctcaaattagtaagttgttaggcttgggggtcttatatagacttttagtaatatctcagatatggtctgggaaactgattaggctattccgtttttacatattgatgcctctgtatccctaaggtaacagtcatgagaatgtattgcctatacattcttttgctgttttagatgcatggtgctgattctttgtagaatttggcttcttatgggaggagtctccaacatgttgcatgtctctggtagtgtagacttttgtttaagtctttttcttcttttagccttcaatttgccagattcctgattgtaatttccattgacctttaccttcttgggatatatatttttttcttttttttcctgacttattttttttctactgttcctgtgagctcttcattttctctcaaatcttaggtagtagaaaggaagaaagggactgctgatgctctttctttgcttcctgtagtacagaggacctactcatgttcacagcactggtagttggtgaatactacagattggga

SEQ ID NO: 11315 - DNA, 1035 bp, Homo sapiens
atttttgcgttagagatcatgaataaaactagagtgaagaaattgaaagcttattctactaacaaatgttatgtgagatgaaattattcacatcataattgttccctgtaacaaaataatttttttgtgacaaatatgcatagagataacttttcaaatatcaattattacaattgataaacataagaagcagaatgttctatggcaggatgatactactcaggaatcaattcatgacagagtaattaagaaatatcttcattatatattattgaagttttagttggactttaaaaaatctagattttgcttttatttttaattggcacataataattgtacatatttatggggtacagtgtgataatctgatatatgtatataatgtgtaatcaaatcttagtatatttatcacttagaacatttattctttgtgttagaagcattcatgatctgctcttctatttgaaaatatacaataaattgttaattatatcatgtgatagtgctgtagaacgttagaatttattcttcctgtctagctgtactttagtattcattaaccaacctttgtctattcccctttccacaacccttctctgcctgtggtaactgctgttctactttctacttcgttgaagccaactgttttagcttccacgtaagagaacatgtggtatttatctttctgtggctggtgtattttacttaacatatatcctcaatgctcatccatgttactgcaaacgacaggatttttttcatttttatggcttaatagtataccattgtgcatatatgcaacattttctttctttcttttttttttgagacggagtttcgctcttcttgcccaggctggagtgcagtggcgtgacctcggctcaccgcagcctccatctcctgggttcaagcgattctcctgcctcagcctcctgagtagctggaattactggcatgtaccaccacgcatggcttattttgtatttttagtagagatggggtttctccatgttgatcaggctggtctggaac

SEQ ID NO: 11316 - DNA, 1058 bp, Homo sapiens
gatgaacagatatgtcatatgaataaaacataagatcacacccttaaaaaatagattgaaggactacaatattcaatgaatgatctaaaccaagatgatatgaaaagggttaagcttcttgtgtagaatatttaggagttcagatgagagtaagggtttttgtttaaaggccaaatgctcctgcattggtttataaatgtagacatttaaaaattggtttttagttctgaagcagcattgttttctgcatttaagccatttcaggaactgttgtcctctagggaagccatgtggaaattttctggtagtttctttaggcaataacagttatgatttaatggatgaatgtgtcaggaaatctgtgattggtgactttactgaagaccacatatttatccaaggaaagactggattacagatttcctggcagttctttcctcaatttattcttttcataaaatagagatgtagataacaatactggttttgacttattcagggtggctgtgaggatttaagtgagatcagggtactttggaaacaaggtgctacaggttgattatcccttattcaaaactggggacccaaaagtgttctgaattttggaatatttgcagtatactggtggaggatccccactccaaatacctgaaatccacaaagtgttcattaaaaacaaaaaatcatttatttattctttagagacaggatcttactttgttgcccaggctggtctggaactcctgggctcaagcagtcctctcattttggccttccaaagtgctgggattacaggcgtgagccaccgtacccagccaaggaagtgttccaaggtccatttcctttgagcttgaagctggtgcacaaattttggagcatttcagatttaagatttttggattaaggatgctcaacctatatttaagttaaaacaattatcactaagtgattttatattggaagtaaattatgtaccaatgcaactatttttttcctgtgcccttaagtcttataaaatataagactttgtaagatttagtagctattacaaattaata

SEQ ID NO: 11317 - DNA, 1034 bp, Homo sapiens
atgatgatttttctgtgtgcattgtctgtttccccatccatttaatctgcctcatcctataactccagaatagtatcccccaaagaatggatatcccaggatatatttgataattttcctatttgtgaatatttagatgcataccctccctttcctcctccccttctcctccttctccttcctctaacattataaataatactgctgtgaatattcttatgcatatttttgtacatttatctgtaggctttaaaatttttcatctctgtacaaacagtatagaattatctcccaccctttctcagctcatcctatccccatgtaagcttctgtttatatgctggtctgatgcttaacagctatttcaggaaaggccatcttacttaggtttttgaaatcaaaacttccttggtgatcttaattacttaaaagactgtttcctgacataagtccatatcacagttgattaacataacacatccgagagaggcagtaaaagtaatgtggaacctttataatgtagtggctaagagcgcagttttctgttgtcagactccttgggtttcagtttcatcaccaccggttattatttgcctcatttgggcagttatttcaccactttcagttgtcttattcacacaaatgggcttctcatcccaatgatgtagtagaatgtagttatataatctgtgatttagggtggttgtaaggattaagttacaatataaggagttcctagtgtataagtgttccgtaaatgttagctaaaaacaggaagatacatacctatttacatttatgaatgaaggagtgatagactctgatagtgcttgtcttgcattgctgacccatgatattctgaagactaatattaataaaaggtctacagaaatagaataatatacactattgaccagacttatatatgtgaaaagttcttaggtctagaagtgactgttttttacttattttcataattaaaaaaatttttaaatggtttgaaatgggtctcaagaatggaatctcaatttata

SEQ ID NO: 11318 - DNA, 1059 bp, Homo sapiens
atgttaattctatttaaggcatatagagacttactgaactgttctgctcttacaagaagagtagagttgtttgttcagttcttctgctattatatttagtattctcatgttagtgtgttggagatagtttttacatgtatttggtaacatagtaaattcattagaactaattaattttctttacctttgctttgagtagaaagatattttgaattcactcttgatttccgttttcctttgtaaccatttctatttctggctagctatttgcagcagaatgctttgcagtttagttttatgttgacttgatactaggttgttaattcacttattcaacagatagttcatctttgactacttactgtatgctagccactcttctagcactgaggatatggctgtgaacaagataaagttcctgttctcatgaagcttttattctagtggagggcctagaatatttgtcagggctttaaatttaaatatttcttcgtcacagctttaaatgtggaaatgtgtgaggcattttcttttgtatgtaatatatgtctcttctgttaatgagggaaaaatctatgtaaaacctttactcttgaatatgcataaactcctgataattcatatagcatacatatagtatttaatatacttcatatgattttcttgcattaatttagataaaatactctgtgcaacgaagaatttaatttaaaaaattgtctatatgtagttttttgggtttctttctttttttcttttttttttcattgctgtttttctgtgaaatatttttggtctttgcagataagccagcagtatgtatctgttctaggtagtctaagtacattcatacttaaatgattcatgaataagttgaaattctagaactgttctcacttagatatcagcttgaagtggtcttatgagctctaaaatataaataccagtgaaacattatgtaaagtagtcaagtgggcacatggcacttaatctggtatctcttacatgtgagttcactgtccaaactggtgtgaaagctgctggtcattgtatatagat

SEQ ID NO: 11319 - DNA, 1044 bp, Homo sapiens
tgacacagggaaaaatggtgtgtcacccttagatagaaaggttgggggagtgcctgcggttgtactggacatccacactcttttttaatatccacagcacctctttcagccacctgggaaattacactgtttatgaaatcaatgtttaaaagaagtgattgtaaacaaaagtcttctaagaacgatcaggaatcaagaatcctatcatttttgcctaatgtgattcaatccctattgatgaaatcaggatgttagaataataggaagtgaactattaagtatgcctctccctctcaaatgatctagatagtatattgcccctcacataccccctctctctgcaaaagatgacagaacgaaaagaaattccagtaagctttgctgtgatcaatgagcagcagtcagtttagcttagctttttaaattaaaaagacctattaacttctaagatggacttttactgtgacagtcaataatgtgtccaatatcacactagtctgattggaagcacaggacccagtacagtaggttggtagactgctttaaaaatagaaatagagctatttttctatggctttgagtgttgttttccctgatcatgtaggtactagaatcccttccattggtgtaactgactcactttagaaagcaagttgctctccagtaggagagccatcaaggtacttctgaatgtcagcattaacactgcatgctacctacagtcactgtcaggggcacgaatatggagtacgtaccgaaagattttggccacatgttttgttagctaagtcaagtcttaaatgagccaaatgtagtatttgctgactaggaagtaagtcatttgaaattaacagtatttaggctgtacatggtggctcatgcctgtgatcccagcactttgggaggctgagacgggaggattgcttgagcccagaagtttaatgttacattgagctatgatggtgccactgcactccagcctgggcaacagagcaagaccctatctcttaaaaaaaaaaagttaacagcatgtaaccctaatag

SEQ ID NO: 11320 - DNA, 1022 bp, Homo sapiens
gaatgacccagccctgctctcaactcttcctttatgattcgtgggtaaaatttgcagaattcattcattcaaaatatttactgagcaccacctattcattcatatgtacagattatggagcaaagtgtcttatgtgagggcatgtacgtttgtgtctcgtgtgtgtgaatatatatgtgtgtgtgtgtatatacacagacacataaacaagacacattgtgatagaaacataatcatgaacaaaaaaatgcacacatattatgttcatatgtggattttacaatcagaaacagaagacagtaatgaaataatcataaaattaatggaaaatgttagtttatcagttataatgattgctgttaaggagaagtattggctctggcagtatcacaggctgtctgggaaatctttcctgagggagtgaagtataagctgaaatcctaaggacgatgatgaggtaatgtggtgaaggaaatggatggacatgatgtggggagggaaaagctttccaagaggaggcaacaaacagcatacgtgacttggaaggatggacaggtcatcagcagagtggccgtggatagcattatttctttcctagtgtgtgtttggaccttattcatgccttgtgcaaatattaggtccatatgggccagcttcttgattacagagagttacatttaagccacataattatatggggcttaattaggaaaacacactgtcaacaaataattgagtctgtttatgactgggtttaccagaccaaaggggaaaattatagaatatcaaatatgagaaaatatccaactttaacaatattagctatgtataatacactacagatatccattccattcaactgctattaattgagcccctgtatgtgatatggaaatgtgccaaaataggggcatttcccttcactaatgcccaggctagctgggagacagatctgcaaataaatatatcatgtactgtcagaagatttagccaaactgagattttagccaaactctgagaag

SEQ ID NO: 11321 - DNA, 1006 bp, Homo sapiens
cctctgttgagattggaattggaagagaacttaattttttgtatttaaaatgcagtgtcatgcctataagcatttctcctatataggactgctttgctagtgtgccctcttgctgtgtcttacttcataaggagttgtatcttcccacctccatttcaatactgccggttaggacctaagtagaagagcagtaaaggctgattgacacacagggggatggagttggtccttgtccattctctcacccttgctgtgcatgtatcaatccttatcccagaaggtactatttagactgtatagactgatttagattacatactttagaggattaaggaaaccatagagtttgggccttggaactgttactgccttgtcctagagttgtcctgatcaggcttggggcctagttacagattagtcttaaagaattgcattaacttaaaaaaaatcaaaccttggcaagagctaaaataatttggagatatctttgcccttgacttgtagacgacatctaagaggatgaagaaaggagagtctaagtgagactctggcctacttcctaacaatgtcttggaagtgggatgatggtaaaggagaaaggccacagtccaatccctctgccttcagatagggaactcaaatcctgaaattactgttttctttctggccttttctcctggttagaggaggaagcggaaagtagttttgagtagtattttgttcatattaccccccttttgttttttgtttctggcccctctaccaatagggcagtagcctcctgccctggatgggtataaggtgggcttggtccaacaggtgcccagagggtacatactcctttctggggagagaatgctccctaccatatagttgacagtggttaggaactctccctttccctacctaccttccttttaatagcagaattcctatttttcccttgattatgtgtattgatcaccctgcaatcctattatgtatctgagtgtgtgtgtgtgtgtat

SEQ ID NO: 11322 - DNA, 1029 bp, Homo sapiens
cagtgaatttctcaatagtaattactgccttaattataacagtagctcactgttgtcaaaagaaatggtataggacaatggtggtaaattatttattttattagcaagtcactgaaatgctaaaatcaagctcaaactttacactgtagaattaactccataaaatgtgacacacgctaaaccataatcttaaaaaaataaagttaccaagcaatttatgttagttatattaccaatcagctttgtttttgctaatcctaatataacaaattctcaggaataatagactaggactctcagggactgagtaagagtagttggaaggatctaacaaactgcactgctccccagttcccgaacactcctacaaccagatcttttaaaaacctttattttctaatgcttaaaaactgttacaaatcgtcccattaaaatagaatcctagggttcactgtacctgaaactataaaaagcacgaagtccaaacaaaaaacaatgttttttagaaaaacgtccactgaaattatgtgtactgttcacaatgccagtgggactgaaaaaacaaagttatccagtcaataggctttatttattaaagactttaacggagagaaacttgatattcaaaaacaccaactcttactttagctatcttaaatttaatagaaagcagcactaattttgctcacctttgggtcatagtctggatcattttcctcatctccttcttcttccccttcctatattaaagttcaaaatgcatccatgaagtatgtacatagtaggtaaactggctcataatgtagggaaaatttaatacaagttactctacggatcaacagattttcatgattacagactttgatgataatacaatttaatttgaaagcttctaatatgaaaaatttcccaacacaacttgagacatccagacagcttttattgaaaatagttactgcagccaacgttggaaaagtttactgcagcttttgacttcttcaaagagctgataaccctgcagcagaacaa

SEQ ID NO: 11323 - DNA, 1031 bp, Homo sapiens
ctcgttgcccaggctggagtgtaatggctcaatcttggctcaccgcaacctctgcctcctgggttcaagcaattctcctgcctcagcctcccgagtagttgggattataggcgggtgccaatagtaaatgacgtatagagtgattcaaggaccagagggtttaaatgaaaatgaaatataggcctgcgcctatataaatataggcatatgccaccatgcccagctaattttttttatgtttttagtagagatggggtttctccatgttcatcaggctggtctcgaactcccgccctcaggtgatccacccgcctcggcttcccaaagtgctgggattacaggcgtgagccactgtgcctggcccgaattttttgtatttttggtagagacagggtttcgccgtgtttcccaggctggtctcaaactcctgagcacaggcagttcaactaccctggcctcccaaaatgctggaattacaggcatttgcctctgcgcctagccaacacaaatgtaaaatgaactaaatgaactacttgctatgttaagtgcaacacacggagtgtagagacaagttggatattaatgccaggtaagagaattcaccctgaattgctacattttcagtgcagtgtctcactgttctctaatttaattcctgagtctcaaactttgagggtaaaggtgcactaaacgtacctcttggcaaatgcagaatggttgtgtgttaaaatcaacatgggactgacactgaagtcagaaattgccatcatataatgaagtttagggacacaagaatgaatctggactttaagagtttgaattttaactataattctattaaaaacttgagtagcagcatcttaagatttaacattatggtgtacaaagaaagcgttcgagcactgtcagctgcgtgattgcttccatgtcagtaaaacacttatttgtgatgctaagtaactactgactttcagcgggaatatatgctagaaaacacaatttttctgcaatgtatttatattgactttcaa

SEQ ID NO: 11324 - DNA, 1069 bp, Homo sapiens
tgttccagcacaccttttcttcactcagttgcagtctcaaccttgatgttcatcatgtttcctaggtacactggtttattgatctgtctgcctgtattaacactgtataatctaattactgtagttttgttcttaaattatattggagcagggtaatttttccaagtttgttatttctcaggaatatcttagctctttttggccttttgctcttccatttagattttttttttagaataagctctttgagttccgcgaaaagccttaggccttttttttttttttggcagtcttgctgtgttgcccaggctggagtgcattggcgcaatctcaactcactgccacctccacctcctgggttcaagcaattctcccacttcagcctcctaagtagttggaattacaggcatataccaccatgcctggctaatttttgtatttttagtagaaaaggggttttaccatgttgtccaagctggtctttaactcctgaactcaagtgatctacctgctgtggcctcccaaagtgctgggattacaggcatgagctaccatgtccagccagtcttacgccattttgattgaaattctatttgagctgtagattaatttacagaaagtaactacttttgatacttagaccttttatgttttttaatgaagtcatataatttcttatgtagaagtttatatctcttgttagatttatttttaaaagaattttaatttttttaaattatgaattttttatttttaattaaaatttctgtttgtgtctgggttatagaaatgtagctgattagttattgacaacaaccttgctaaagccttttattatttctaataacttggggtattttggatatatgacatggggtaatcatatgtataaagactgaattttgtttttctttctactctttatagcatttagctcctttagtcatcctattttattagctaggatctcagtacactgtggaatagacacagaatgagcatcctcattttgttcctgactttaaagggtatcatctttaaaagattgactttaaagggctagtatttt

SEQ ID NO: 11325 - DNA, 1036 bp, Homo sapiens
tacttactgcagagaaagcagcagcggtggaagctcctgccatcacactgcacctcttctgcgtggtacacggtcctcccacaggccccacacttgtttccacctccccagacaggcattctgaaggaataaaggattcattagaatgtccctgtgctggtcgtacggctccctagagggctatttaagcccagggacagctgcagattttcgtttctttatgaacctctctaaccacatctttcaaaggcctgcgttcctccaaaataacctcatctcctctcccaaataacaactctttcattaggaaactggcttgtcgtgcacaagattttttttttttcctgccagacaaaggacctgcattcagtacaatagtacaggtcaccaggcacaaaacaagctatgccattagaatccacaggagttaagaaagaagcgtggggaggggaaaggcaagccttgtccccctccctaatatgcccatttttaataaacatatttttttgaactcagctgaagatcttacccttgggtggaggttttcattacatgtttaattaattgtaacaacactaaattcttaacgtttaacatatataagctataacacgctttctagggaacaaagtgtgttgccctgcaagaacaagttttatatttgtttgctgaaattacacgattgtagcataaatagctgtgtctgtgactcgtacaactgcatgcacggaacttttgccgtaaccacaacaaacgcccatccagatggctccggcttaagtttctatgcttcactaaccccaaggcccactagtgcagccagcagttgggttttcctctttggcaagtcagtcaggccatacagaatctgctacaagttcccttcctaccagttgaactgtttgctgagcatgcaggaatagcctctgaatagtatggcctgctgtaaagggcaagctggaagtacagatcctagggtgtctcactgtcatgtagggccaacattttctcgtctcccttctcaacaaattagtct

SEQ ID NO: 11326 - DNA, 1050 bp, Homo sapiens
ttctgggctatgcagattagaataagcaaaatgagctctctggaaaaccttttctgtaccagggaagagatcgttgcttaatcgctcctacaactatttgtcatcttttatgtaagtctaggccagagtttcccaacctcagcactgctgacattctgggctggataatgctttattctgggaggctgtcctatgtactgtaggatgtttagcagtatcactggtcccatccacgagacatcagaagcattctcctactcccagcaaccaaaaacatctccagatttgccaaatgttccctgggggacacaattacttctggttgagaaccactggcgtaaaccttagtcttttgtttctctgatggatactgccccctttcaggtaacagtggacttttctcatttattctttcttactgccattcattctctcggctccctccttttccctcttgtactgagaacaaccatttgctcaggttgaagtaattactaaagtgctctctgtcagtgcaaagatctagaataaaagctattttaaaagtactcaatgattctaaaattctcaagggccataacaatcctcagaaagtcaaagtagtaagtattcttgctcttctttagcttgttgagggaatgattagatgttgtcaaaattgtgaggcaagtgatatttaagacaaataccaccttcactttttctttacttcctcatgtcttgtgatgctccctttctaaaacttcaaatttatttatcatttatcctctgtatgcacatttttcttttagtccttatctcatgagtcccacatgtatgggatcttagctcattattaggagaaacaggtgatcaatctaatttatttaaaattggaaataattcctaggatttactacattgcttctctttgcatttgtgttttgttaagacaaaactttgtaactcaaaggaatgagtctcatggactgtactgaagtgaaacgaattttcagcagatgggaaagatagttttagacatgagtcttcatttacctcttaactcatgtg

SEQ ID NO: 11327 - DNA, 1076 bp, Homo sapiens
acataagacacatctgtccagattgtagtacaactctgattagcccatttatcataagagaaccctcatttgcaagcaattactgattgttagtgtgctattccaccaaagcgctttgtttcataataaactgacaaagcgtatcttaatctaatcttttgtttggggactctttttgaaataagacataaacatagtggttttacctgtggtcagcctagagaaccttgagtactgtctgttcaaaatagtagttgtagtagctcacctttatggaggacttcatagctgccgggttgatcaagtgtttgtttactcatttcatcttcccagcagtcctacaaggtaggtgctactaatactctcattttacatataaggaaactgagatacatgatcatattgtccatgatcatatatctgatatgtgattgtggctgaaatagattaataccaagattgttcagacttcagagtccatgtttaaccattctttgagtacatacattatttttaatctttcaaaaacccttattgaagtaacatattcatcattatcatcgctgcataaactgtttaaaatgtccttttctttggactgaaaggacaacaaattttttttaaaataaaggtctgagagggaaataacaaatttgagatctttggtggggaactgagataaaactaatatttaaagcagaacctaggaattgaaacccatataggctgaatccagtttattaaagtgttagtttacacctaacatggttaaacaaaatgaaaacaacaaaaaaaacttaaaagttggctatctttggtcaagatgtgcagttgctagctcatttcactttccatctaccttacttcctcctcattgagtgtgtcgcccctggcttaaagagaagctccaaattagtttcctgaagtctttgttgctgttagtatttcattcaaaatccaggatttcttttgtcctattttctgtttactgcactttcttccaacaatatagctttaaatactgtgtatggtatctagttcttgaggttaggaagttgtattcaccatctcttctg

SEQ ID NO: 11328 - DNA, 1030 bp, Homo sapiens
aaatattttctaggtctatagcctaatttgtccaagctggtagcaatatttcctcagctgcatagatccaaggattttagaatgaactgggagttctctattttaagtctcttcatctggtcatttgtcaagtcccatcaatcctccctttgaaaatcttggctgtatttttttctggcatgcagtgtgacacaggagaactacccctagactgggagtcagagagtctggctttcgtttagctttttctccaggcatttgtatgacctccatcaagtcacctaacatttattggcctcagtttccccattttcaaggttcttccagatcacattctgtgatttttcctgaaaacatatttttaatatacatacatagaagtggtaatcacatttttatttggtgtccctacctgattctctgccttctaatacaggacctctgaccactggcatataaatattttggaaacattgctttatctgcttccaaatcttgcaatactatttatgttctggtaatcctttgagtttcacacagatgatttgtgtacaattctatgcatgggtgtcatgcttcaattaaagaatcaaaaccaaaaccaaaaaactcttaaatgctttcagtggcctcccgctgaaatctgatacatcagacttgcatttaaggccccctcaacaacctggcatcactttaaattcccatttaagctcctacaactccagtagttccagagcctggctacaaagcaatattacctggagaatttttttctatggattaagagacatcaaatgtggaacggaaaatttcttttattccttctagttgattctgatgctgctaatccactgttaaatgtttgaagagcattgtatctacctcagtatgtctttatgacagtgatgcttaaacttctgtccacatgataatgacccagaaggattattaaaagttagcttatagggcccgatccctgagttgctgatttaataagttagagatggggcctgagaatttgcattttgaa

SEQ ID NO: 11329 - DNA, 1032 bp, Homo sapiens
cttacaagaccagtgattctatcaggttttgttttcctctgccttgggatagatgtgttgccagagtcatattccttataatactgttatttggctccagttttatactaaaaccaaggacatagtcaggtaatgatttgtgaaagaagaaaataaacttataattgctggcaagaatagaaaatcttttatcaaaatatttaaatatgatattctgaataatttttatcaatatcgggaaaagtttttttgctgaattaaaaacaattccaaacctgaataatttaattttccttcttttctcagttagtgatgaagctcagcctacaggtggacattttcatatacatatgaatctcaccatcttcatatttctagtcttttcatttgttcctgaaaccacttatgcttactgtttttttaatctcaacaaagactatttctgaaatttatacagatcacaggtctcttaaatcacaattaataatttctagtttatagctttctaatatggctcttgtaagatatgaatgaaatacatgactttaatttaatagaggccacatatattttgacctctttgctcattcatacctactctgtaccaactgtgtgctggggataccagggagcacaaagccctctgcttacgttgatgggatcttcttttcttttcttttcttttttcttttccttccttcctcccttcctccctttctctttccctccctccctgtgcctttcctttcctttcctttcctttcctttcctttcctttcctttcctttcctttcctttcctttcctttcctccctccctccctccctccctccctccctccttccttccttccttccttccttccttccttccttccttccttccactctctctctttctttctctctttcttcctttattttctttcctttttctttattttctttctctctttctttcttttcctttttcttttcttcgtcagggtcttgccttgtcactcagggtggagtgcagtggcgtgaacacagc

SEQ ID NO: 11330 - DNA, 1031 bp, Homo sapiens
caaggatgaaactcattaattctagagtagctcatgatacgtaagtcaacctgaaacacagaaaaactatctttatatggaaaacttttaaaaagaaaagtgctgcaagataatgttatttgacatttgaagggaagagatacatattccattgttcaaaaatgatgcaaaatctgctccattacatgagtaatattatatgagccatagtctatacaacataaaaatacacaagtggacattcttagtgttctaataacatacatacaattttaacctgaaagatcaaattatatatataattgtcattggcaattaggcataatagaactaaatgttttagaagagattttatttttttggtaaaagatttcaaagtttaaatagaatcaactttcacttaaatccatttaatagtttgtaatattgtcctatcttgagtctcaattatcattgtatttaatcatcttataataagaaggccaaatatgaattaagcaatctcctaagatatctcataaaactgtagcttttttgttgttattgttcttacctgaatacatccaatagtaggcactgattacttggtaaggcaattttttgttccaggaccattctaatcttgagaaatgtcttcctgttttctgtgggccagaaaagtttatcatctttctttagtaacatgttgccatgattttaaagagattaattatctggggccagcccatagttccttcttagtagaagtacagaaatcccgcggggggcgggaactgacttacctacacacttccacataacatacaatgggttttgccattaagatcagctttaggagtaagaatccaccaatttcatggagaattggaaactctccctatccaaattatctaacttgtatgttgacagtggtgtcccggtggtaattgaaggaaaacagttgtaatagtaatagctaaattgtcttgaacactcactaatatcagctttacattcaatgtttccttcaaagtcatacaatttatgtttac

SEQ ID NO: 11331 - DNA, 1023 bp, Homo sapiens
ccatgtcacagaacatggcttattttagtgctctgccctatcaactaaccaataaataaattataaaattcaaataggaagctctgactcagcaagtaatttttggaaattcatatctcgtgtttttcatctacattagcatcattcaaggagcagtagcatgctcttggctgtggtcctaagtgtttttgaaacttcatttgcaacattctctctagaaaggcagcaaacaatttagaggcaacatgatggtgttatttgtcaagaagattcttatgtatatctatagtttcactttctgagggttatttttaaagagtctggatctttgacgtatttttctattttttgtctaaaagtgggagactaatagtgctgaccaaaaccaggataaccatgatgtaaacggtttctgacagcccttctaatgacaagttcaattttgatttatatcacctttccttttcttttctaatccctccagcctggaagaaatagtctactttggatggaatgtatatctatcagaatacatgtgattaatagcaactggaattaaaataatcacactctcaatatttgaatttgtgtgttttagagaggataggtacatgtaatgcagggttcagtgtagcactttggcccactgaattgaggtaattcaggaatcagtcactgtcagtagttaatatattcaatattagtgagaatgggagaggggaccatcacaaggtgtagaagcttgctaatatccctacaaagaattcattaacttcaatatgatgtgatttgagagaaaacgttctaatcactacacattttaaataagcacttgcacttaataggtgccagggtgccgattatacaactggatattatttcatactaagaaatgctaactattggaaatgtatcagtgaagttcatggaaatatacaaaatgtttgaagtgtgaaataaatgcaaacattaccaatattagatcagattatattaaattggattggggcgtgttagaatata

SEQ ID NO: 11332 - DNA, 1026 bp, Homo sapiens
aaatttattctctcacagttctgaagactagaaatccaaactcaagatgtcagtcaggcagtgcttcctctgaactcctttagggaaggctccttccttgcttcttccagcttctggtagccccaggcacttcttaactgtggcaacataactctaattgctgcctctgtcttcacatggctgtcttccctcattgtctttgtctcttctgttcatttaagaacaccagttatgttggacttaaggcctaccctactcaagaatgacttcaccttaattacatctgcaaagaccctatttccacataaagtcatattcatagataccggggattaggacttcaacatatctttttaagaggcacaattcaacacaaaacacttactcagctaggtgctcattaaaacactggatttctgccattctgaatttaaaaggtaatgatttaattaaaacatcagagaataaaatgacatattgttttacagtttacagttctatatataggcatatatatacacagctgtcattatttcattgttatctgtagaatttcttattctgtctttaaatataaaaaggattatcttctatgaacaataaaaaagataaactaaatttaattaccaattaaagatggggtaaaaaagagcaacaacactctaaaacagaataatcatggatattgtgtaacctctctctttcgtagtttgttcatactgggagactaatgaaatagaatgataaaatcttgtccagagatgaggaggagtattaaatgacatcctgttcatttaatgtgaatataataaacttcaaagtcaaaaatgtgactataataaagtttgaaatttttgaaaatatgacacataagcataaatacgtacataagattaacacattttatctataagttatttaaatttatatacatatccaacctgaaaattgtttaatatttgagttttttatagtgtctaagaatgcgtaaatggtatgcaaaaatattttcaattttttgcttac

SEQ ID NO: 11333 - DNA, 1051 bp, Homo sapiens
atcacaaaaagatggtggggttgaatatataggttttataggctaaatatcacaagcaaaaattgatgagaatgtactggctccaatataaattagcagcaattacaccagacaatttttagactctattatcttaaaggcattcagatcttaccaagtccacaagccatctacttggatataacagctcccgagaggctgcctagcagccacaaggatgctgtagactaactaggttagtaccttccactttcaatacttcgtcaaaacagtttaagatgacagatgggacaaggaatttaggaatcctgtaatggatgtgagattggagagtgtctacagccaagacatgggtttatgataaaagcagattaaagaggatactattgtgactagatgggggatttaggtcatgctgtaaaactcttcagatggtatagagctatatgttaggtcagtgcagaggctgagggtggtgggaatgggtctgtaaaggaactgataaaagtttgggactgaaaagattttaaaaagacagagatcttggaagagctatatgttatatcaaaagctattgtgtgcctgtgcatatgcatgtgtacgtgtgtgtgcaccttgcacacataacctgctgcttactactcagcccccttgtgtcttctccccttccagagtaggccatatacctatgaacgttttaacgctcatgtataaaatctataaagaaaagaaaaaagcaaattactacatttttacctccacagtggaatctgagacactgttatgtcacacaaattcacttttttttttttttttgacagaatctcactctatcacccaggctggagtgcagtggcatgatcttggctcactacaacctctgtctcctggttaatctgattctcctgcctcagcctcccaagtagctggggttatatgcacctgccaccatacccagctaatttttttattttttagtggagacgggtttcatcatgttggccagtctagtctcaaactcctgctctcaggcaatcagcccaccttggcc

SEQ ID NO: 11334 - DNA, 1057 bp, Homo sapiens
tttcataggagaaattatttttccttattgaatccaatatctgaagctttgtctacccagtgttgctagtcagtgttttattgcagactaacctattaatgacctctttaaaagtaaattccaaccacagaacctgtcttcctgtgtaagactttaggtgcagcaaatcatcatgcatctacagcaagttttccactctatattgctactgccaaagaatctcagatgagatatgagagaaaataaattagtctcatatgattcaaaatgtagtgaacactttgcaaacaagtattttttagcatcttaaataaattttggttgaattacgtctcatttacaatatcacatttcatcctaatttcagttgttttccatattgtctcctattgacttctactccatttctcaagaagagtaaaccttactttaatttatctccgaatagaagattgaaggaagaccctgctataagcatagcgtcctacacaaggaatagctagagatgtaggaaaatttttattgattggaaaaaaaaaagtgagctgacctccaatattttctgttaggttttctctgtaatatggcacaggaaaaaataaataataatttgaaaaaagaggcagctttttcatattgctatggagcaatttatgaataggacataagtccttttttcctcctaaaatagggactttatggggttttcatcttcttttttattagtggttggattatctgatcatttacattataagaaacacacgaaaatctagaaaacattttacattttgttacagatttacaaatagcatgttttcactttcattctaaaactaattattgatatcagaaatttgtatcttacctagatcattggttaacaagacagatttttaattcataaactttaattcttcatatggcagtctgattgaaccaatacattttttaaaaatttatagctaattgaagtataacatgaattaaacacacatagacttcaaaataaagcataaatagaagtgcatggaaagatgtaccgatgattggttct

SEQ ID NO: 11335 - DNA, 1020 bp, Homo sapiens
gttgctcctctccccctccagtgaggagggcaagtaagattctatctgggctcctctgaaatccacgagcagctctccaaatagagaagcactgatgtagagattgttgggtaataaaattaatgaggaagccatggtacaaaattttaacacctttcttttctgaactaaagttaaattcttgagtgtaggcgttccttcttgaaagtcctgttactggagagattaatctaccagcaatatacaaagacagattagtgagagatggtggtcccaataaaatcatttataggctaattacattccttcttcactcagttttactacaattaaaatgtaaaaggtctgtttacatttttggtgcctcaatatgtattgagaaatacaatattgttaagcaggttttcactttgcatttctctgctttaatataatgaagtcattatccatgcggacccacaatgctccgtgttaaattcgccaactgctgttctgtacattccctcagccaatttatttcaatttcagaaggagcaaccaactccacagtggatgactgctgactgcagttccacaccatcactcttcaagagtaaactcaaatcaaggaaaaagcttccacatgtgagcatgggtgtgctcaatctcctgttagctgcagccacagtttcaggcctgatagaccccagcttctgcccatggggtgcagagctacagacagctcacctgcctctaccacaggacagatcacaggacaggctgtgtgtgtgtgtgtgtgtattacatcatatatatatatatatatatatatatatatatatatatatatatatatatataaaataaataggttgcatacagaagattttcaaaccaatcattaacacatgtaagagctaggtcatattatttatggcactgttggtggtagccagatatcataaatgcagtgtcataaatacttttgtatgaaattatataattcttagggtaacaccttaaaactcataatttgcagag

SEQ ID NO: 11336 - DNA, 1045 bp, Homo sapiens
tagagcttcactctcttcaaccaggttgctcatcagagtgttcctcccagaggcataaacaagctctagtagatgcaattttctccatcttctaacattccaaaaataaattttagtgcccttcacacattggctttctggcaaatgcctgactggcccacacttaatctgactttgacttaacatagcactggttgcaaaagatgtgaaaaacatgggcagttcttacgaaacagattgtggttctagagcttagtcatatttaagagcaagagttttgaagccagtgtaggtggtaacagccatctgaatgtgggaaacttacttaatgtttctaaagctcagattcctcagttgtaagataggaataatgatagtacctagctcagaggagtgatgtgagaatatgagtaagcactgaacaacgttgtcttaaggcctgagcagaatagtgaacatgaaaatgactatcacatagcagttcaacatgtctgttgttttcatgtgctgccaacatcctgcatttgtgtgactgtttctgtttccagctgtctttatccagccacacagaagacgaaaagctcataggagtcctagaaaacaatggttactttgtctttatttcaagcaatagaaggggaccttctttaggaatgcatgttggatcaagttggagaagttgattaatattgtttaatgttgtttaaattcagctgtttaggaaatggaatgcctgtgctgataataaaaaagatcatagatagatagatgggtagataggtaaataaatgcatgatggatgaattaggtagacagaaaaacagaaacagtcataatatagatgagtggataagtaggtgggtggatggacacagagataaaaacatataagggtgcatagatggataattagatagagagattagatagatagaaagatagcctgggcagagtggctcacacctataatcccagaactttgggaggccaagacggggaggatctcttgagcccagtagttcaagaccagcctgggcaacataag

SEQ ID NO: 11337 - DNA, 1030 bp, Homo sapiens
cctaaggggtcactatgtgccaagcactatgctgtgcactttatgtaagtcgtctcctatattccttgataacacggtctaaagaaggacttcacagccaaggaactaagatgtaaagaacttgagtagcctcacaaggtcagtaattgtcagggtcaattttccaaaaagcctgtctacactgaaaactctgctctttctattgccgttctcgttcctctgcaggtcagctgacccttcctttggtgtagtcaaataaattaccagttggacagcagcacccgccatcaccaatgaataccctgtgttctgtgttctaaagagctaatttggcaggcatgtatcaaaccctaaagcagagttccctcatagtccactactaagtctatactttttagcctttttaaatcaaggggagtatttttcaaacatttttctcattgtttgttaagtaggtgctttagagctcaacatacaccttcatttcttcaatcaggctgttggtaggatattgaatgagaaagaattctgggctgtgccattgttgtatgactttctatcttttttccaccatgacacagataattgacatacatatctgtatcatgttcacaatacccattgcactcctaattctgaagcttcttttccattaaaaaaataagatcacaagcataaaataaagtaagcatggtattatcgtagggacaacatcaaatcagttttactttttaaaggaagtaattaagaaatgttggtgctttaccatcggggataaattactggtgtcccaagacactactgcggaggaccacttagcttgaagcattcacagagaatttagtgggcatcttttctttaaaacttccattgttccaccaactattaattcatctaaactagattgccctctcattcttcatttttccatttgcttttacaaaaaatgttgcaagaagttgtgcggatgcctcactaaattaaaaagtatgtgagtacgaataaatatttattactttttcatccacat

SEQ ID NO: 11338 - DNA, 1051 bp, Homo sapiens
tcctttcaagctaatttttctggctgttttttgttccatgggtaaacagagaatgttcaggttagatatgtaccttctatttgtttttcaagctgttctcaagggtcaatcaatgcttactaaagttttcgagcaagcactaaggtagtgagttctgtgcctgctgggcataattacaggaaacaactttgtttttaaaatctcataacaagaagcacaagcacaatccacaaattacaattcctttgcagtgtgtttgtacccttagcagctcacagcagggccacatcatcgtctccgccagccaccatttttctagctaccttcctaaaatatcagaaacaacaaacttcccagggtgaggaaacatcctgtagttttgcccacatggatcagtatttttcccattctgtcattatgttgctatgaagtagacaataaattattatgaaaatatgaatagaaagaggaagtgagtcatgtaaatcattattagtattctatttcacgtgatggaaaactcacagggatcttggtgttagtccagaattcactcatgttttccctttattttaaatgctgaaaaaaacataggttgtaatgttatcattgtacttgtagaactatatgactagatatgaactaagttacttggcaacagttgagctccaaatggaacttatgcctttattagttatgtaacattagatacctcacttaacctttcaagggctcaatttggtaatatgttaaataaataaattgagctagtatctggcatgagaatcctgggtttgaatttggcatcatcagtttctggccatgtgaccatcagcaagccacccactgtgcagagagattataatgagatgagattagcatgggcattacaaagatttttgccattgctgttgtcaccaacagataattatcttgcatgtgtcttctatagcacaactgaaaatcactgtaaactatattaagagataatatccagcattcagaatatctaagatggtcagaattaggtaggttttaaaactcttatgtt

SEQ ID NO: 11339 - DNA, 1102 bp, Homo sapiens
gcatgttgccaatggaaagatagtaaaaatcttgctactaatacctgcactgctctgctgaaacatttacctcaggtagtgttagctggaatggctaattattgaaaatacaaagtactgcatattgtttatttccattagtacaaatttagtattattctaatgctgcttgcattatttgaataagataaacaattctcagtcactgtgacttcaaagaactattctttattctccccaaagtttgatttactcattctattgtttattcatgaatagctgtgtactaccaaatgtcttgcctttcagtttttcaacagcaatctttactttagaaccttactctcaccttctgatatatcattaagtttgaacatgttgaatgctttgacggttgtattatacatgtaaaattgcttgtatttcatcttttatctagacagcttttatagtttgggtttttttcaaccaagttttcaacatttttaagttatgaagtttaacaggaattgctgacaaatgataataactggcatttttaaactcttcttagtatccactacactaagtactttacatattataaatctatatattatcacaaatcatttacagggtttttatgcttatctcttctctccacctggctctcattttatacagaggaaaactgaagttcagaaagtttaactaacttgatcaaatttatttggcaatttaagtggcaaagctaggagtccaaatccatgaaacttcttatacttgatactgccctgttgttgttatgattaatagcaattatgttttttgacaaatgattttcactgatttggagtaaataatttaaaattatttcatttaaattaagcctgatagtactatactaactgatacgtttacaaaactaaactcttcttagctgtaatatcattagcatttgctcaattttcagcagagacacaaaagaatgccagaatatatggaaagagtatgaaagctgaaccccaaggacctaaatctgatcccaactctaataggaatcactttacagaagctacattttagatccccaatgttatcatctttaaaatgaagataatgt

SEQ ID NO: 11340 - DNA, 1052 bp, Homo sapiens
gagaggttaatttttaagtgtttttactttatcaaagtattcctgactggtgttcagcaatcattggttctagtaatgtttatttggctttttcttatcatttcagtgcccagtatcttttttttttattacaacagacaaatctaattacttctgattaatctcaatagctgtgatttggattatgaatacttcccttccaatctaactgaaatcataaatgtttccatgtcaccttattttttataagcacatggtgtaaggcataccaaataagaaaatatattaacttttatcagagagacaactgtaatagaaaactcaatgtttattttagtatatttatgtatatatgttctattattttaaacagcctgtaaacctaagcctctcctcttatctaaaaatcatccgtcctcctctcattgcctttgcattttcactaaactcccctctgtgtatttatcttgctttttaggtatttacttgtgtgagtagtttatgttttttcatatgtcctgagctctctgccttacccaccatgccttgactataaagaaatgatagctaactttggccaggtgtggtggttcacgcctgtaatcccagcactttgcaaggccgaggcaggtggatcataaggtcaggagatcgagaccatcctggccaacatggtgaaaccccgtatctactaaaaaaaatataaaaattagctgggcatggtggcgtgtgcctgaagtcccagctactcgggacgctgaggcaggggaattgcttgaacccaggaggcagagtttgcagtgagccgagatcgtgccactacactccagcctggcaagagagcgagactccatctcaaaaaaaaaaaaaaaagaattgatagctaacattaattgagctcttgctatgttccagatgcattaaaagctttttaacatattaatccctttcatctttaagccagatgaaatgggtaccactgtaatcttcactgtatagaggaggaaacagaaactcagaacagtgaagcaatctgagtagagtcacacagc

SEQ ID NO: 11341 - DNA, 1031 bp, Homo sapiens
tttattgtatacacaagtcaaacctgaaaccaatctttatctttttagaataatctatttaatattttgacttaattatttcaaacattacaagcaacagctatgactccatttttcccttcttataaatttcacttatgtgcagttttaaaattgtctcagttctgcaccccaggatcaggtatatcatcaaagtatttaaactctttttattttaacattttgttcctatttataaagtttatttttatctccatgccttctactgatatttgttatctctaaaaacagcataaggaatagatagcaccagaaaaaaaaactaagcctttttttttaacattccgccctgatatgctgcaagctctcatgacttgagcagtactgttttattgttttgtttccattagagaataagtctatcacctcggctttgtgtaaaatttggtaaagagtgatttttaaatgagattctgtaatctagtgcaaatggaaaaaaattgattgcagaattaaaacaagttggaacataatttaattagtatccaagcagaagggaagagaaactactttaatgctttaatggaaaatcaattttgcaagaaaatttcacatttttaagcctaattagaaaaagatttacttcacagaaaagcatgtgaagaatacatattcaatcaaatggcaacagttttttaacttccaatggtcaattccttagtacttccttggaatgagttaaagtcattattccttatggcatcttttatgcccaaggatcatgaaagaagtgatgctatttctaagtacatttagcaatcagacggcaactatgctctccaagaatctccacccaacgatcaatgccctgattggaaatccttataaaaggttaattgttggaattttaaacatggatgccaataagaaccttcctggtcattcattcacaacctatcacatttgagaaatacaacaaaaacattaatttgcatccatagcatttcaggaattatacttgtttttcttta

SEQ ID NO: 11342 - DNA, 1034 bp, Homo sapiens
taaaaaatatgactcagaaaaatgcgagcattggtaatttagttttgggctttgtcaaatatcttttaaaaaactcagctaataatacactaaggcttctcatacataatttgtattgttgattaaaacctaagaatggaaagaaaaggctaagtctaatttttttgctaaaagaatgagtaaaaagtaatcagccatgttaatatttcaaacagcaaactatttgaaatgcatttctgctttgaaaggaaaatttgagatgaacaagttctattatacactattgataaagaaagaagatataaaaggtacaatatactcttaaaaatgattgcactttcaaggaaacataaaagaatagcttcttttttggccagtaagaaaactgaagccctgtgtagtcataaatagcaaaaatacaacgaaaatcctaatatgtgtgtgtgtgtgttttctcttcttcaagattcctataatatctaacaatgatatatttgtaacttactctgaattgcaaagcatgtatcaattgtcagttatcaaaagtgtctctgaaaatttgaggtagcaaaaaacaaagaaacaatgaacatgttcatttagtcttccctgcttttacaatttgtcattgaaacctgtgtcttcctcctaatcatattttcttaaattgtacttttatttaggatttggtgattgagagtttgcgttttctgtttgctagttgattgcttaggtggccaggtggttggtttctcttcatccaattgcatacaatgtatttctaaaaggatttttaaggaaatgtggaatatcatgtagtaatatgccctgttgctcattcctcctaaatctctctcttatctccacctctgcctcctttcccgcaacctgccttggtttaggccctcaccacttctctactgatgacaacagcctctcaaagcccagcccccttggctcctgccttgacgttactaccaatggcctcatcctaaagcaaaaatctcattatgcctctctcctgtttaaaatat

SEQ ID NO: 11343 - DNA, 1032 bp, Homo sapiens
ctcctgggttcaagcgattctcctgcctcagcctccagaatagctgggattacaggcacctgccaccatgcctggctaatttttatatttttagtagaggcggggttttgccatgtttgccaggttggtctcaaactcctgacctcgtgatccacctgccttggcctcccaaagtgttgggattacaggcgtgagccactccgcccagccgccactgccattttcaaaatggtgaaaacatgtctttgtcaaggaagatgttgtagacggaatgttttggttttctgggcacagattgagcacctgagagtctcagtaacacacctggtttggctgctttgctgaagacactccgtacattgtgacttgttgctctcaccatcaacaggaattgggctgtgcaagcaattctgaaagaagtgttgtctactgctgtgaaagtcatcaactttatcagaccccagtcctgaccccagccttttcaagaaattttgtctagaaaaaagatcacagtagaaaattattctctattgcacatagtttactgactttccaaggaacaaatggtaaagtatgtaactgaacttcatgggggcagagggaaagcaggtaactgatcagaacggtttaggagttctttcatggttttgttacatcatagatgtttttggtcacaagactcagataaattttttgattcaagatcgtagagtattatgtatgctgctaaaagaaccaactcttatagctcagccatcgtttctttagttcctacctaatggagatgggttataaacttcccagcatggaggaaggactttctattgtctgaagcccattgagaaagtcttattcatttctctgcaagcagatgtcttcaacacctgaaacaccacagaattcttttgagtgttacttgtgctcagatgattcatgtttaatgagtacctcaccaaagatggctccattgatttacaatggttatgatgagatatgaattcaattcagtcttggagttttgacctatatgag

SEQ ID NO: 11344 - DNA, 1031 bp, Homo sapiens
atttaaattttaaatggccacatgtggctagtagctactacattgtacagtcagatctagaacatacataattaacttaggtaaatttaccatccagagggcccaaattactctacaaaaatgtctaattttaacttttgtaaaatgtatatttacacaaaatatatttttgaattttctacggtaggcatttattcctttgtattattaataaaataatgtcaaggtcattaatgaggaatttagctgttgaaaaggttactattttttttttataaaccactgtacttcttgaaacaataggaagatacctgatgcctaagataactataaaatatagatttatactaagatttgttgtttcaattattatcatgtttaaaaaagggcaaatcacttagtgtagttttgtttactaaaaggaattgagagttaaattatatttgattaaatatttatgatattatattgtttcattaattatatcttattcctaaattttatttagatttgtattctgtttatgttccttagtattatacaattagcagtctgtaattgataaaataacaataactttttgatagtttgaggaattttaatacaaaaataaatggatagtttctagcatatttagggaaagaagtcatccgtaaagtctttgacatttttctaaaccactaatgatctcacaatttttcctttgcattcaataaatagtaaagtgattttaatggaaatggaagggatttttctgactttcagagatgaaaccacttttgtcatccattgtgtaatattgtacctttcaatttattagtgccagcatgacgattgctataataatgatattaaaaagaacagtaaacaagtttaggaacaaaagcaataggaatatactgcaaaaacacagtaataaatactaagttttaaaatatataatagtgaaatttgccatcagataagtgctcaatgctaatgcatggtttattattataatcacttacttagattaattgtagtttgtgtgg

SEQ ID NO: 11345 - DNA, 1031 bp, Homo sapiens
ggtcacacagcatgaagtgtctttccttcttattcctttttcagcttcatgaacctattcttcaagatcaaaatcatagatcagtttctgcatgtcaaattctttgagcttactcctttctcatgttttcttttgtacaaaatgtctaccacatattgcatatattgaattctttgttagatgcctctacaggacgatttgaatgataccatcacctgcttttatcctttcactattctgggacctcattcttttagttttatctcttttatttcttcccccacttctcactctttttcttattctcttcgctgccatttcccagcaccatgtgtcatatttaatagcaatcacctctgtaatccaaagggaaccagctagacatatgatgtccctctataagggtggctttaattccagagagaaagtgaagagctgagattttctattcttaatgattaagattaaaggtacttttgatatgattaggatgacctatttttaccactgaagtacattttaggttgggcttttcattgaacagaggttttaatatttggtgattgttaccaaccttcgaataattagatgaaagccaaagacattctcctgggaaacatacagacaagttctacgttaaatttcagggggttcaaaagagtcctcagtgttcatgcaccccatggtgtgttattcttaatccccagggtctacaggtatatataaacttactcagacctttcttgtaagaatgagtgatggtatgaaaatgtgtattgtccttgttcttcaggaactttgtgcagatatttaaagttttgtgcaacagctctggaagcctgtgtccttaaggcttagttttttctgggagacgacgtatgctttcatcctgtaggcatcaattaattataagaatatattctctctattacaaattgctagcaccttattttttctcaggaagcaggaggaaatgcaggttagcaggacatcttcttttaaaaatagaagttgctaacataattgacttc

SEQ ID NO: 11346 - DNA, 1047 bp, Homo sapiens
tttttttggtctttttcttgccttttggaactggctagaacttgggataggatgttgaacaagactggtaagagcagacacccttgtcttgatcctgatcttagggtaaaggcaagaatggtgctaactgtaggtatttctgtaaacacacactttatcaaactgaataattgtttttgtatttctaatttgctgaagtgttatttttaattatgaatgaatgttgaattttatcaaatgctttttctgcctctattaataggaatatgtgatttttctttttaacaatgttacgtgaattacattaaataattttcagcttttgaaccagtcgtgcattcctgggacaaactttaagtgattgcaatgaattactgtttttatacattgattcgtataattaataattattgttattattattaatcaatagtaattttccttattctgaaatctactgtttgtagtaatcatatagccattcttttctttgaatcatgtttgaatcatagatcttttttcattttttcatttttaatctatctgtattatgtttcatgtgggtttcttgtagacagcacctacttagttcatatggacagcatctatttgtttttatgtttatccaatctggcaatctccatcatttagtgttttcagataatttacatttaattattgatatagttatatatctgcctaccagtttattattattctttttgattcttctctttttcattctcttatttcattctcccccttctctcttttaacttattttggttctttttttgtagcttttattaatttgtgagaacgtctatgattccattcataccaagagtttttgcacattcttcttgggccatggttattgcttggtttttaatattcatctttgacagttttttttataagagtgtcatttccaccttaccctaggtcttattatgacccaatgaaagctaatggcaatttttcctacatgagtagccagattctccataaatgaaagtttaaaaaatgatttttctctacttaaaa

SEQ ID NO: 11347 - DNA, 1022 bp, Homo sapiens
tctttctgcaaaattggttgcttttgctgtatctttcatataaaaaaaattccccagagcccttatcacttttgtatttagacatttagaatagatattcataattatttattaatatctgtctccactactagactgaaagcatcttgaagcaatacgctatttttgatcacccctgaacccagcgaatgtttgcaacacaggagtcatttagcaaatattcattgaatgaatgaatagaagaaagaacaaggactgccagatgtgctgttggttaaaagtttgctcactgttttctctagctattagagctagagagtcactgaaataatgattattggggtcaccaaaataaatgttaatctttcagaaaaaaaattttgaatatgcatttttaaaagtcccgtcaccatatatatatatatattaaccctaagcgtctgtattttatgtggttactcaactctgtgggtttttttgatttcagatagataccagctttgtgaacttaaagcaagcagtatgaatatagttcttcaacagtggggattatctgatgtcagggcttctctccatatccagcctcttgcaagtcctggaaaatcatctctgggtgggtggccactagaggaatttcattgttcactaacagactcagaaataaagttattatttagccatagggcagcctcggattcctctggaaggtatgcctatggcagccagcattaagaccaaatcgccatgaggctgcctgtttacagaggtttgtttacatacagtatccactacacattttctctgacttcattaataaactgagacaaagaaaccatttccttactttccaggttagctgagcaatttatcttaattactgtcaacctttagtgactaccatggggattctaagcattcacttcactagtaatgatgtaaattacttatgaattttcaataggcagccatggatttttggcttgtcttacatgcacttttttccccaactgaaattatatgtg

SEQ ID NO: 11348 - DNA, 1033 bp, Homo sapiens
tttcagacctcagacaatctttgtatttctttacttagggtagttatttctttcttgttgtgactcctagctgttattatctttattccacctccattaagacaaatctacattctcttctttttcacacatatccttcctgactcttaaatgctccagagctgacttggttggtcttgaaagtatttctcatttttaactggtaaggactctatttgggcattagcttattgttcattgattataacttttctttcttattcactactgtttcttttatggtttctttttttttttttttcagaattactttcacaatgagaattagcctcagggtaacactttcgctcgtaatggaaaaattattaagtcatcctctgtgtttagcaacaaaggtttctgacagtcacgtgtggttccaacattctggtatttattttatttctgttttttttgtttcttgtgcttatatatgtctacatttttttcagctgcctactgaatcactcttctatcgtgctgttcttcaggatattattaaagattgttatggcatcaccaaatggtatgaggattttattttaataagaataactatgttatattgtaagtaaagtgacttttagtcttcaggtgaatttatgcagggtcactgttattagtagaagcaactttgaatttgagcataatgtcaataacaagtacacaacaactgtatcttaggttaattatcattaaagtgggggctctaatgattccttcttgtcctgaaagcttgttgtaatgataaaataatctatgtaaaatgtactttagaatttttgaagtattaaaatattaaatagttcagtgacgatattatatgagcaagagtcatatttagaatgtttcataaacagcataacactttaattagaacagatattgatcataaacaactattatagcataaacacttaactctaattagaacagatattgatcacaaacaactattatagcccttcaggtctctgctagtagaatactagca

SEQ ID NO: 11349 - DNA, 1025 bp, Homo sapiens
tccataagacggtgaagaatggtataaaattggagccagaataactggcttatgggaaaaacttaagtgcttgtccttttggattaaaaaaaaaaaaatcaaagcttaacttttttaagctgagcagcaggaagttaatattaaatggcctattttcctggctacacagtgaaatcaattattttgtgatacataagatatatatctattatatggtatctgttacacctaagatgtataggatctgagaataatgtgtatgtgtaggatcctgtatgtgcaggatctgagaatgatacagaaacctacaaaaatatattttctgccttctggaacctatacctattcaagtgactattaaatcaaggcagtgataaataacaaacgaatggaagaatcgtaggggctatagaaattcaaaattagaaaagattattattagtcatgttaccaaaaagaacatgtacatttacactttatcataaaggaagacttcagttcaactaagatgtagaagagagtggggaactgtgtaatccattaagaggaaactgcatgagcaaatgtaccaaggcagaaatgtggaagacagtctgaaacaattagtagactgatctaaggagaaaaaactaaatactggaatgtaatgggatatgcggttgagaaatgtgattatagtgggccctgatggtttaaggactttcaaatttatcccaataaatgggagaggtattgaaagcttttggagcagaaaagtgacaaaataaaaaggctcttagaaaataacatgtaggaagaggtgaagaagagagacttcagttttagaggtcttaattaggaaatagttggaataatcaggacatgatgtaataaaaagtggaattgagatgccgtcttgaaattgagctgaagaaatatgttttgaatatattttaaaggaagaattgatagaatgttatgtctaattaatcagaggtgttaatatttatattgccaagagtaaatgaggcttcattccttgtttt

SEQ ID NO: 11350 - DNA, 1034 bp, Homo sapiens
gacaaataaactgatacgcagttgcctagggcttatgctcaagtaggtgctgatgcctaaatggagtctctagagtcaagtgtctttattggtttgtgcttttgttgaacaacccattttgaggaaatttggtttgcattgcatgaagactttatagatttcaggcaagcagcaaaaatgagagtttaggtagctgaaagtaggaagataaaaatttgttattgattattattagtgacattcaggcaccaagtgatgctcttcagtgaaggtatctaagtaaggttagaaatgcttcggcctgtatgactttttaacctggtacacttaaaccttagctttaaggcaccttggggggtttctgaataggtgaatgcactatatctgaagttttaaagtcctagttaataaaaacctttttaaggaacttgttgtaaaatgagttatactttttcctttctttttaaaatactgtatgtactgtgtagtagaggcagggttgtgaacgaatgctggaccaagataaaagattacagttttagtcttggaataccactgtactagctaagtacttgagctgctcagctctcatgaactcagtattttaattggtcaggaaacaaaaataataatagtaactgccaaccacagagtgagactcaaatgaaataatatgatgaacgttctctgtggttttaaaaagctgcatggttatatacttagctgtagagtggttggaccagggggctgaatgacttggttgatcactgtacattaagtacagctgtccccgcttatccttggaagatttattccaaaacccccagtgtatgcctgaaactgaggacagtaccaaaccctgtatatagtatagtatgttttcctccatacatacatacctgtgataaagtttaatttataatataaagtaggcacagtaagagattaataataataactaataacaaaatagaacagttataatatacaagcaccactactcttgtgcttggagtccatattaaataaaataa

SEQ ID NO: 11351 - DNA, 1027 bp, Homo sapiens
tttccctcctcctttcctgtcttttcttatcttcctccattctctccccatttcctttctgtgctccctctcctttctgcactcacctccttcacctttcatctgtaggtgacactaaaccgaggtttaagaagagccaccttggctgggtgcaatggcttacgcctgtaatcctagcattttgggaggctgaggcaagtggaacacaaggccaggagttcgagaccagcccagccaatgtggtgaaaccctgtctctactaaaaattcaaaaattagctgggcgtggtggcacgcgcctgtaatcccagctactcgggaggctgaggtaggagaattgcttgaaaccagaaggtggaggttgcagtgagccaagatcgcaccactgcactccagcctgggcagaagagtgaaactccgtctcaaaaaaaaaaaaaaaaaaaaagccacctcacagagttgatggcagtgtgagtgctgctttttgtacattacctcattcagttctggacacaggaggggtctccaaatcatgctgcgtgggccagggagtctgatggaagaagtcatacttgagttatggctgtctcagggatgctgtgagttgactagcttgctgggaggctggagtctggctcacacattcagaacatttgcaggttactgagacaaccagtaccaaggacttgttctggagactaaccagatatggaaaacactgaggtaggcagaaatcagtttgtgatgggctattgatggtaaactaaggagctaaatggaaagctctggcaaacccttgaatgagagagaaatgatctaacagagaatcctctaacagaagtaggatgaacagattaaaggaaaaagtagggggagaccaggtgggaatctttcgcaccaagtcaggaaggaaatagagttgtcacaaaagctgagggaaggaagaggaggagaggcaaattcaagggactaaagaggttgactctttagaacttggcgatgatgtgaaaatgagtaagaaagagttt

SEQ ID NO: 11352 - DNA, 1048 bp, Homo sapiens
aatgagagcctcctccagagatctttgagagaggcttaaggaagcattcctctgttatttgttgtgctatgttcatctggttctaagtcaagataaatattgcttcatttgtatagttgttttcttttgcaatttgctcatgagtgaaatctctttaaaacgttaacatttgattaaatatacttgaatgcttacaaagagtttttcatataatttatcttgtttatctttatagcaacattaagggactggtagatatttatgttcctcttggtgagttcattgaagagcaatctgaggctttatataggttaggaaatacactttttatattttgggaatccagcctgtacagtgcttattatcaccatttctgcagttatgaggttactcttgaagacaagaaaatatttattaatgaattttcaaattgctccttatttgtatatttctctctgcttaatgctaccaacatttccactctttggcatcaagtgttgataattcttttactgtcttctgtgaatatctcaaaaccacatgcaaatgcattgcaaaatgcacagtcagattttacatcttgcaaaggatgcaggattccatgaagtcagggaaagtggctcagtaagatctgcattaacatataaacccctaggcaaattggtatggcaggattggatcaggcaattatcaccatagataatgacaagagaagcccttcaagagtctgattgaaatatcaaaggattacgtgagactcttgggaaatcaaaacccttgactatttttggcagaaacagtgtttttgttcagattttactgtaagttgtatgaagtaagatttgtgtggtcctgttatcacttaagaaatataaattttaccttattttatatttataaaagaatatgaataacctgaatatctgtatacttctcccagatatcatatttctgtctctactatgaaaatctggaattctgtgtttattctccagttttttaaaaagtagttttaccctgtatgtgtatattcctttatttagatatg

SEQ ID NO: 11353 - DNA, 1089 bp, Homo sapiens
agttttctatgtacttattgatttaatgtttatggtcattcatttatggttaatttcaacaaatacttactgagctcctgtgtgccagatattctagtaggtgctggtagaaagtggtaatcaaagtatagtaccaaacttttaaatttcctctggttttaatgttatgtttatgataccctcagagggaacagggaataataatgaagatgataatgatagccagagattatagcatacttaacaggtgctggcatatttacctctcacaacaatccttaagtcacaagtactatttattattcccattttgcagatgaagaaaccacggcttattgagatgaaggtacttgctcatggtgaggtcatggatggcagagctagcattagattccagttaatcggcctgcaaagtaaattttattaaccactctgttaagtaagaaacagtgttactgaatttgaagtaagggaaaaaatttgtttttcagatgaatgacaaagacttcctggaggaaatgggctttgaagaaggggaactatccattcaaaagaaactctcaccaggaagaggcataaaagaatgagatggaaaagaacaaagctccatgggagaatactattcgtgtagtttggctacatggggacagacacataaggcatgttgaggaatacaagataggaaaaagattagagacagattgtggcagacatcaagtgccatgacaaaatgaatgtatgttgttagtttttgagcaagaatgttgagcatagtcatctcctgccttaaaattgttatcttgcagtagtattcacggaggattataaaggaagcaagtagataagagagaaaaagaaccagaattaccaatcatgattagaaggaacaaaaaggacagacacaaaagacagggtgttccttaaattgtttgactttaaaaccaaatgaatattggagtaagaaagaagtggtaactgaaaatcaagacactgacaacagaaatagtcagatgtggttgaggaacattattttaggaagatgaggaattgacctttacattgagtttgaaatactactgtagaatccag

SEQ ID NO: 11354 - DNA, 1034 bp, Homo sapiens
taaagtggttcatgtatagtacctgatttaacttttaggtgtgagaaagccttacagtatcccttctagttgtttctaatttcaaatctggaaaattagaaacaagttattttcattaagcttttaaattgaaactctgatacagtatagtacggtgagaaggaggtgaggtgtactgaattatgttaggatgttctgatatggatatagtgaccaactgattatgtgcaaaatatttatactgtttttcatcatgcaaattgcaagtctgtgaaaagtagctcaagttgtttcactcattattttaatcagtgaaagtgcttagagtgtggtatttctcatattttcatgttgtattagtttttgctttaattttgcaaaatgcttttcatataacatttaaaaacatctctaggtaactcaagttttaattatacgtgataaacattcttttaaatggtttattagttttcagggtcacagtgttttttgtgtttgttttttttttttttgatatttcctgtagaaattgtgaaaatgacagcattgctttatcgggggaactaaagatatttttaaaaatatttagccaacattctacttcctcattttctcctactaagaggaaagagtgccagtgccatggctcacgcctgtaatcccagcactttgggaggccgaggcaggcagatcacttgaggtcaggagttcgagaccagcctggccaacatggtgaaaccccatctctactaaaaatacaaaaattagccagcattgtggcgcacacgtatagtcccagctacttgggaggctgaggcaggagaatcgcttgaacccaggaggcggaggttgcagtgagctgagatcatgtgactgcactccagcctgggcaacagaacgagactctgtcttttttttaaaaaaaacgaaaaacaggaaagattgtctaggtaaacttcttgacttgagatgagaaggagcttcctcatcatccatggaagctctatgaaggcaaatctccaacatcttggggg

SEQ ID NO: 11355 - DNA, 1069 bp, Homo sapiens
tttaattctaaccccaaaatgcacctaatttcccaggttatgggtcaggaagactttaataagggacttttcatagattgtatcctagtctttatataataataacagcgcagctaacagggcagagagatcatttgcactagggtgtccagaacactcatgtatatgtaaagcactgttctctgcttctctatatagaagacaaatgaacaattatacatgtttattaaatgatttcaaggtaaaactattatcacagaaactgaagctcagaaaggttaattgggaagcaatctagagaagcagttgaaaactatcatgcctagtcatttgaactcaactagaatactaactcagttatttccactggtgagatcaccttagatgggtttcttaatctgctgagtctctgtgatagtttatttttgcagtcaggcagtgaatgaaagagttaggactcaggaacgttttccctgaatccagagtttttccaacctgcttttcggtaatactcatgtggaaatttctctgatcacacctgcctcacaagagaaggcagaactggtggagggcctagagttgaacatcattaagacagtctcccacaacatagtctttatccacacagatgcccacagctccttaaaaagccctgatatcagactaggcaagagttttatagttctggagttctcattcctgtgcccttactaactcatgtgtctcttatatgttctgtaaatacagagataggttcactagggatacaaaaagactccaaatgccactctgttctctgggaggatagtggcacagagccaggatgttccaaactgaataatttaatgccacattcaatgtttgtaccttatccacatatgtcagtacttttgagtctttaatccttttctttatattcactttttaattttcaacagctttattctgagccatagttaggaaatccagctttgatatggtaatgaaatttactttcaaataaccttaacatgaatataaccattacagtttttacaaagtgcagacatctttttacatgtccccagta

SEQ ID NO: 11356 - DNA, 1104 bp, Homo sapiens
agggttaaacctctcattctaagctaaacaagattactctgaaggctggcattcaggggcttgtttttagtgtaatgggttaggggctatggcacaccccttgcagttccactaattgaactctttgggtacttcagtttctaatagttagctctagaaggggcttgccatgggtacgcaagaaattgctcactgcttgatttccccacgttagtttaatgaggaagaatgggtcaccatgccaaccaaaacaccatagcaatgggtttagaggcatcctttcttgatacttgcttcccatttaggggtttctaatatactacaaacgctatagagtgtcagacaaaaaccaaataggatttgaaatcaatgtgtcctctcgtacaatacatgtaagtgactatgttgagttatcctgaattttacttcgttgtgtattcagacttttttgattaatttagaaggtagcaaggcacttaatgttggtcttatttttcagttgttaatttttctttgctagcagttttcagctattgatctatcaaagctcatctacatttaatttcatttggtttctaagagcttttattctactgtagtaacaaccatttaaaaatttattttttagaacagttttaggtttatataaaaattaagaaaataaggcaaagttcccatacacccagtttcccctattattagcatcctgcattagtgttgtgcatttgttgcaattaatgacccagagctgatacattattatatcaatagtttattcagattttttagtttttacctaatgtcatttttcagttccatggtgtcagctgggatggcacatttatttgtcatgtctccttagactcttgcatgtgagtttttcagactttttttgtttattttctgattgagacagggtctagctctgttacccacacaggagtgtagttgcacaatcacagctcacagcagcctcaacctcccagactcacgcaatcctccttcctcagcctctcttgtagctgggactacaagcacaagccaccacacctggctgatttttgtacttttttttttttttgtagagatgggctcttactttgt

SEQ ID NO: 11357 - DNA, 1026 bp, Homo sapiens
tcctaaaatcaatccatttatccaaggagccctgatacactttattggaaaatggtaacaaccattgaaggaataaatacaaaaaaatttaagtaaaattcaggaaaatatctttcaagtatgattaaatgagagactagatgatcatcttaagctgttatgtgtttagctggagatgtactaatgctttctgatggatgcttgaactcagtgggaaacatgatggtgtactatgggtttaagtgaacaaaagaactcattataatccgaaatactgaatatcttaagatacttttttatgccccttaatctttaaattttttcctcacaaagtctggatatgcccactcattgaacctcttttaatattttttgcgataccaaacattataaaactctttaatcttgtctgttagttggtgtgggggagaaaacaaatgtttctaatcttacagacaggatgatcattaataaggaaacccatttttcttttaaagggaaacagaacaactatgacaacttgattatgatgaaactttgattaatcacatggatatgttctagaaacaattcctaaccatactttcagccatgcattccttcttgtcacatgttcagaaattatgcctttgaggggagtatccagtggtaactattttgggaaggaggagagctaagagaaatcctattttactgacataagaaaagtgatggatggtgaatataaaatagaaggtgctagatttttgttatgtctggatagccttttctctgtcttataactttcagaaactgatttttatctactttattattacaactactatcattgccaagggcttaatttggaattaaatgagccttatgcttaagtaatttattctcgttagtttgccaaaatgtaggtctcatgatggttttaatattcaacagcaggatgtttacatttttcgttcattgagactaaaatattccttttcagtttcatttatgtcccagaaaatctgagatcagaagacaatattg

SEQ ID NO: 11358 - DNA, 1021 bp, Homo sapiens
gctcactgtagcctcgactctatgggctcaactctgtgggctcaagcgatcatgacatctaacacgccaagctaatttttgtatttttttgttgagacgaggtttcaccatgttgcccaggctggtctcaaactcctcttgagctcaaacagtccactcgcctcatcagcctcccaaagtgctagtacaggtgcaagccattgtgcccagcctcagacactgtcttaaacagcttgtttatattaacacacttcatcatgaaacagatgagacactattttcccactttacagataaagtaaactgaagcacaggagttttaaatttcttagaggcacacaggcaaatctgagattgaaagattctgtgctctttttttgcattaaaattgataactcaaaaccctttcatttttcaggtacagtcagtagtcacccaactaaatatatctcaacacacatgacccttcttctcatcctcatcatttgctgggggactctgctttcaggactcaataccccatctccttgtaggaagtaagaaggcaagaaaagaagccaaggttgagggcaaggttcactggagagccgtactatgggggcaattattggtgctgtgccttttgttatttttaatattgaaaaattactattatttggggagaacaaagggtacacagaaaatatatttaattttcaacatgattaagtgtagaaatagcgattttcagggaagtgagctcataagcagaaacagtataaaagaacattatatctataatgttttattgatgtattctgatgcctggcaagcttctttatagctttgatcttgtttagtttttttgcttttcatctccagatcttctatgccatttatcagttttttcatacttgaatgaaatatttgtttattttaagatcatttcttgcagtttctggcccagtaagtatacaataatttcagaccatgaagacccctactgaaatctggaagagcatgaagcctttgtaggtgatct

SEQ ID NO: 11359 - DNA, 1061 bp, Homo sapiens
tggtatttctttaggcagaaataaaccaaagttttgggaaaaaagcctcaatatatatgtttcaaatttagaaaaaaataacctttatatgtagaaataaaatatttagaattaaatctattagagaatataaggttttagtaactgttagtgagtttactgaactcatggtatagaattttggtaaaaaaaatatcattgggtttgcatacctgtgctaagagctgccttcaagaagaaagtgctacctaaggcatttttaattctaaatctattaattataatatcatttgatatcatttgaatccgtgcttacagacaatagttatataatatgaaatttaaacagcacttaattctattcttaataacaatagatatcatgcatttattgtacagccttgtatttagccttttattcatgttgtcaaatttactaaaatctgatatttcatacaagaaattattaagaccaggtttaacagatttgcattatgatgttgatttgtcttttcatgtataatacattttcagagacaaagcagatgaatcgtggctcagtgatttacacagtcagattttataagtatagagttcactttcaacctcttcgctacaccactcactgcaatgtgaaatgtaattgatttttagactaagaaagagtcaatgtccttttgttgttgttatggatttgtttcggtctgttccaaatgatatttaaaaaggtaattcaatagagcattaaatattgtattaggaattagatttcaaaatgcagatgaatttaacatgctataatcaattcttgattatcttacctaatggaagaattatgtctgttgatgatagagattttgctactataagttaattgtcattttgttctgtgttgtaagaatcttagtaaatatccaatctgagaagctaagaaatgagcaagaaaataaactaaaaatttaagagtagagaaaatataaataaatcagaatgcagagaaacaataggaagtaatgcataatctaagatcttgttctctggaagatcagcagctttgggta

SEQ ID NO: 11360 - DNA, 1019 bp, Homo sapiens
tattttcctccatcatccttcatctaataaaccttttacttacacagatttgaaattgaaaaaatgttttttcccatatcttcaataaagaggaacattttgatttaatttgtaattctttacagtagctctttaattatgagatattttcccaagtttattgggctgttcacagagaacgagggagaaaaacaatgaataggaaacaaaaatgaatttattagagcaattttttgtataaaaagcttgtgtgaattttagaattgtatttttgagaaagaaacttgtggtatggaagagttaagtgtcataaatagctacaagtgatgtttagttttttaaactattatttaggtgagaagaactgacaaatcaccttctgaaaacaatgcaaatgttctcgctcgtaaattcaaattctactttaggtctgtacattatgttgtgagttcagtcagcagaaggagcataaaggaagtctgtttctttctcagccttctgtgtggcttgtgtttaactgaatcatttatttttgttggattcttctgtgtgtgtatgtgcatgtgtgtttacctcaccttgtttcggaatatatttaaagtggggatattcagagtaaatttttgacatgatggtttatatgcttaatgttttctcctgtgtttagttgttcttaagtggattgctcaaggcatttagcatgctgactgtgaaagagatggtttttaactgtatgagatttgaactttcacatctttcaagtgtggaagcattaacactccagtagcgttaagctttttataccacctgcttcccctattttgagttctggcgattttcctatgattgcttccattggcactcttgaaaatcaatgaggcaatcctacgaatatgaatatgaccatataactggattagtcattaatctatgaaatccaaaaagaatatgaacctctaatttttaagataagtctctttatttcatttcgtttttccattatcagaaaggatacaacc

SEQ ID NO: 11361 - DNA, 1051 bp, Homo sapiens
taccacacattttgacttctgaatgctttaaatatattataaaatggaattggctgctagtttcaagagaagaggaatagaaattgagtggtgttttcactctttaatcaaaactggccgaagggaaaatatgtaaaaatgaaatgcaactatattagacttagactggagagtaggattttatataagacttatatgtttacaagatatattagaaaaatattgattattagtacttttattacagtcagtggaatgattcactcagtactttttttaaagtttgtctttaagaatttgtgtaatatttacagaatttagaaaagttcaaacggatttaaggtttcccagaatgctttggcacattttatagatcaaatcctcttttatttttctgccaaaaatgtccttttcctctctttgcctgttcagattttatttcttccgtgaagtcttgcctgactttcttaagcagttccttttttgttttttctctatacttcattagtaccggtctcagtatcttcatagtaggacacttccaaatagaatgacacatacatatgtgtctgttttttgacactagatatggggcagggggtgagtctttactttttatttcttcagtacctgccatttcaatgtattagttactatccctgtacccatgtgccttttcctttataagttatttaagggctggggacatggcttttaaatgtttttgttccctccctcccctccagtactcattccctcattaatcccttcatttggtcaacacatatattgagacttatttcttcaagctaggtattgctttaatcctcagtgatctgtgctgaaaaaaaatgaatgagggtggcatgattatagagtgaacacacagtaatcttccaaaatcctagatggggagatgggcacaagaggggcgtgcatctcttcagtgcctgtgcttgacatgtgatatttaatagaagcttgataacaacccttagggagtattatcccctttttataaatgaagaatctgagcttcaaaggtttgagg

SEQ ID NO: 11362 - DNA, 1035 bp, Homo sapiens
aatgtccatcaatgatagactggattaagaaaatgtggcacatatataccatggaatgctatgcagccataaaaagatgagttcatgtcctttgcagggatatggataaagctggaaaccatcattctcagcaaactatcacaaggacagaaaaccaaacactgcatgttcgttctcactcataggtgggaattgaacaatgagaacacttggacacagggcagggcctgtcatggggtcgggggctgggggagggatagcattaagagaaatacctaatgtaaatgacgagttgatgggtgctgcaaaccaccatggcacatgtatgtaacaaacctatgtaacaaacctgcacattgtgcacatgtaccctagaacttaaagtataatagaaaaaaacccagaaaatttagaattgaaaaaaaaaattcgaactctcagtgttgttgttatttttctattgtttttctattctctctttcatttatttctgttctaatctttattgtttccttccttctgctgactttggacttagtttcttcttctttatctagtttcttgaggtataaaggtaggttgttgatatgagctctttgttcttttgtaatgtacacacttatcacttaaacttcagtcttaggactgcttttgctgcattgtatttcgttcttcttacgttttaattgagcatttaatatgattttatttcctctcctagtgtatcaattatatttctttaaaaattttcatggtggttgccctggagtttgtgatggacactttatactaagtatacctttaagtgacattaaactgcttgatgtgcgtacaattaccttacggagtattcacaattcctccctcctgtcctttatgacatctctgtcactcattctacttacctatatgctgtaatcatctaattaattattactattgttacattaaacagttatttagataagctcagaaaaagacaaatattttatttaccttcatttattctttctataaccctcttcattttttaat

SEQ ID NO: 11363 - DNA, 1075 bp, Homo sapiens
attatttactgctgatttttaaatctatctcctgtcatggaccttgatcacaaatgttatttgttgggaatataaaaagtagtcttgcctttgtgtaataaagtgattctcaaccttggctgcacatcacgaattgcctagggaacttttagcctattgagacctaagtcttatcagacactctgattgttttctttttttttttttaattgaaaagtaaactttactgttgaaaatgccaacttggggagggtagaaaaatcacacacaaggctgccacttcacacctggagggttgcacggtggccgggcagaggtgctcctcacttcccagacagtggggcggccaggcagaggcgctccttacttccctatggcgcagtggccgggcagaggtgttcctcgcttctcagacagtggggcggccgggcagaggcactcctcgtttcccatatggagacactttgattttaattggtcaaagacagagcccaggatcctttttgtaaagctcttcaggtgattctaatgtgcagttaagattgaggacctctggtttaatgcacagcattctgttcttgatgggcgttggttctgtcacccagttccagacaaactgctgtgtgaccttgggcatcgacttagactctctgtgtttcagtttcctcatctgtccagtgaggtattaattaacagcataaaaatgcctcaaagatatggcaagttcactttcagaccactgcagtagagcaaatatcacaacagagtcacacaagtgttttgatttcctggtgttttgattttatgtttatggtataaacataaaacatgtttataccatacagtcatctattaagtgttcaataaacatgatgtttaagaaaacaatatacataccttaaataaaaaacattttattactaaaaaatgctaacggtcatctgagctttcagatagtagtaatctttttttgctggtaaagcatcttggctcacattaatagctgctgacccatcagggtgatatttgctgaaggctgggctggctgtggcagtttcttcaaataagacaacaa

SEQ ID NO: 11364 - DNA, 1049 bp, Homo sapiens
aagatgaacattttaaaatcttaatagttgctatactgccagattattttccaaaaagcatagcagttcacattctcactggcacaattgctgaatttgaataatgtccattttttatgttattattgacctgaagaattaaagttgctatcttactgtttcaagttacatctttttggctactactgtggtaataacaggtattttcatttatgtatgtattatcatttgtcattttctgtgagacttgattttcatatcttttgcacattttttagtgagttttgttactgtattaagatctctgtcttttctactatggcatttgtgttacctgtcttgtttgagaaggcctccctcacactgagattttgttaagttagatttttaattcatatggaatttattcttttatggtttccagatggagtccatattgagattgtgttacagctattaagaagcactcacccttcttttaagctttcatctggaaatagatatgtgattagtgaaaatgcaagttgtagatttatccctgtagttaaacacaattggcatatgtgcacaaagaggaagggggtgagagagtaagtaccaatgtgtacatatcatttttcaggggaagggagaaatggaaactattaacattcttctgaaacaacaaatagttgtgtgcttcttctcactgggtatccctaactggcctcttactctcttcctggcctccaggatgccattgtgttagagagataatcctgccttctcccaaaaggtgtgcttttgcagtgttcctcccacacaaaggctaggcccagcagctcccagcctcacatagagcttaaagatctcctcctaccatgttggcatcctgccccccttagagcattggcctcttctgcatgatcacagctgattgcaagcatgtctgtcccagtgtgttggaaaacaaaagaaaggaagttcagggtaagagtttccttttatggaaggtacacatatccattcaggtcacgtttcattggtgagaatataattatgcccctgaa

SEQ ID NO: 11365 - DNA, 1120 bp, Homo sapiens
tcagggaaaatggggtgtcctgatagaagagctgtggtgtctgcctttgaggagcacacagttttgtgaaagggaaaaacatttctttacatagaagtagataatgcagtcctgtagatccaacatccgcgtatgccctgggggcaccaagtatggttaggccagtcagttgagaaggttgaaaaggccagagaagatgtcctaggagaggagaattgccttggctgagccttggaagaggaatagtgtttaaccaagcaatacctgctctggggagcatttccacttttgaaggaagatgtagacaatactgtggtgtgttcaggaaatgacagccactctatattgtcagaatataaatcttgagatctatagtgataagtgaagaggctaaaccatgcaaatcagcggcgagattatcaaaagccccacctgccacactaaggggatcctttcgtggtcagaaagaaagtaatacaattgagagatatttgttccatttgcattgtagaggatgaattttgtggacacgggttgggcgaagaaagaccaatactacttcagtattccaggtgaaaaaagacttgaactagggcagtagtaagtacaggagggaagaaaaggtatatttgaaaagtatttaggagataaagtggagataaaatggacagtgcttggtaattccttaacagggacaaggaagtgaggaagagagagaagtttctagcttaggcgactaagtaggttctggtactagttatttagattaggaatcttggaggtcaaacatatctgatgggaaagaaaatgtgtcaaagttgattattgggtatcctggaagcgtgtcatgcaactgaagattagaggagggttcggggatggagatacaaagaaagcctactttttaaagtcaccggatagaactcagaacacttaaaatagatgctctaaacataaagttcataaagagatactaggaaattctgtgatctacaaacacttaaaaaacatggcacattagtgccagttggggaagcttacaagggaattattcaagaggttggagaattgtgtgtgtgcatgtgtccatgtgtttaagctggagtctgcagtattgggt

SEQ ID NO: 11366 - DNA, 1030 bp, Homo sapiens
ttaaattctaaggtccatcattataattgctctcttacctatataacctctactcctttgcctctttttgccttatcatatatacttggcaaaaatcaacacccagttaaatccatctctgcctattccatgcctgcatcctgaagcatgaataaagaaaaacactttactttttctttattctttattttatggatttaataactcactttaaatccatatcagtaacctcaagtgagtcctcaaagatgggtgacaattgtactgtagttttctaaaccattgtacctcaacatttttctagacatttattcataccttactctcaactcttaaagttctagtatatcttcacctgtcattatactcagctgacgaccttgcttttctgtcactgaggatatagaagtaatcacagagaacttccacttgcttccatcgtcacgtctaaccatctattaacatctgtaatgttacttttccttctgttattctagataaattattcgtgcttccaattcaaaccaacctcttcatttcttcgctagatgcctttggtcttgactactacaggacactaatccagcagttacacttcctctctttctgtcactgtctttctcctgtattaacaaatgtttcctctctgccagatttttcccatcaacatttaaatatattatttctactaaaattgaaaagcaaaaaacttctcaggctaattcctccctctagataccccttctctccttctctatagatttctctccttctctatagctttccattttcatttcaacccactcagatatgttatgtcaccaaaactgctcttatcaaagttactagactttgactagtaagtacaacactcagcatcgttagattaatttgttctcagttctaattttatttgtcctgtcagcagcatttgacacagaggattactcattcctcctggaaacagttttttcccttactttccagaaacttccctcctttgcaaccacctaactctggtacctcttgt

SEQ ID NO: 11367 - DNA, 1040 bp, Homo sapiens
gggtcctctcagatttcctgatttattcctgcagttgttctggagcaaaaattcagcatggatcctccacaggctgctctgtctgtccaatcagagctgcaatctagtcctgcctcccgtctgccatgatctctcacagttctctaggttttgcatttgagtcatgtgaaagatgttcctgtgacattaaagacatcaagaaacccagctttgaaaataggatcgtctttactgaagaataatttccggggtaatattcttaagttagtagatgcactttaaagtctgttagaaataactaccacctttgaaattgctctgttacaatcactgtttgctcttcccccaaaccaaaactgttggcattttgatagccatagaaatgtataacacccaacactgtgacaatcacacccatcataaaagttaaatgaacattcttgtaacacccactgggacgaggcagacgtaggagggaaggattgagcacacaggataaaatgtgtctctgacaaattgaaagtactccctttatacagcattgttgtcttagttgtcatctgtgtctgatttgttttattcaaagccatttcaaaagcacaaatactgtgttgaaactgagattcaaaatgaatcatttccatgatctgtcagaatttgccttgccattgctagattttctgtgttttcccttgctatgtctccaattttgtaaatcttttttgatttattcaaaatatgactgtagtcaaaataagactacaaagaactatcatttctgaattgggagtgttgcattgcttatggggttttgttttatgatagccttttgtgaagatcatttgtttaattgtattaatcttgcattttaagtaaggacttatttttttcattttggttggtgccagaagggttaacatcatgattatcactgctgacaacttaatccccaaattaattgaaattctgactcccctctattggggcgactcttcactcctggctctgctctcagcagtctgctaaaaatgttttttaaa

SEQ ID NO: 11368 - DNA, 1049 bp, Homo sapiens
aacaaaagtgagaacatgtaaatgtaatatttgttgttttatatattccagattcagaacaatttgtgggcaggaaatgcaagtggtggttctgtggttacttcatgcatgttaccacgtgacacttcctcctgtatgacaccttattctcactcgcctcggacagattccagttacacggggttttcaaaccaccagaaccagttcagccacgtgcccctcaacaattttttcactgactctcttcttactggggcaaccaatggacatgcatttgaaacaaagccagagtttgaaaggaggtcttccagtatcgcagttcttcgaatgaaagccaaggagcacaccgccaatatttcatgggccatgtaacatacagtactcttttatttttcttttaatagcaaagttaaacattcttatttctcatatttaaaggataccacaataagctgctgtgtgtggaattgctaaaggtcaagatattcagtgagaccagcttaaatgaatagttgttatttaacattaaaatctaagaatgaacctctgaaaagactaaataggtttaccatgtgccagtctccacaaaccctgttttagtagtaaggttttctttttctattgtacaagtcaatgaaatatgatcacgcaacttattaaagaataaatgtgttaaacaaattcttctgttatagattgatttatgttacttctgtataacaagaaatctcatgtaaaataatacctgataaagaaggaaatgcactggggaaaatgtcaagatgccaaagtcgtcaggtaaatattgaatcagggtgttctggggagttaactgctctctctctctctccaaaaagcagtgggcaaaaaccctgttgctgagaatttattttcaagcctcatttttgtttttgtttttaccctttgatgttttagtgaatttccactctgttaaacaagggatcttttaaaataaccaacattcgcatgagatatttgggcatggtttcctgaagccacatggctaaaggtgataactgaagtattct

SEQ ID NO: 11369 - DNA, 1049 bp, Homo sapiens
cacactcacactgtgtttgctgtaaccatatttacatgattgcaattagagcaaaaaactccattctatcatataacattcctttcaattagaatgcctccttgcccacatttttcaggtagctagtctgtactcagcaacaggctctatgattcataacattttatggagcccctgataatgttcctggcatgtttccaggtgctggacatacacagtcaacaaaacaaggtgtctgccttcatgaagctcacattctaatggggaagatagacaataaacaaatatgtaatatgtcaggagaagaccagctataaaaaaaaaaacagtaagataaagtggagtcttacccagtacctggcagacagtgggcactcaaatatttctaagtgaatgaagatagtatctgtatgctaaagctaataccttttttctctttccaggtccatcgccatcatcttggcttatgctggccaattccagatacttacatgaattcaagaccagttattatcaacatgaacctgaacaaatgtgactctgcctttgatattaagtgtttgtttaatcattttttaaaaatagataatcagaaatttgttagactcaaagatataatatttgatgtataaaatgcaaataaaattagtttatcattatattctaatcttgaatattctaccatatttaaaaatatctcaaggtttctgttcattatgaaacatcaatatgttttctaccatttgtgaagaaatgaattttccagtttcaagtacctattcaaaattttattaaaaaccagcaaattaattttaatctctagccataaaaacataagtaatagtaagctcctaagcttggacaaaggctggattctcttcactataactgagtggtaatttaaagacaacaatttaatgtcactaattttcaaaattaaatagtttaagctcaatttaattttgctagatatttaacaaaacatacggctcaacctcataacctatatgtgtgtatgtctacatctgtgtatatatcataggatttga

SEQ ID NO: 11370 - DNA, 1063 bp, Homo sapiens
aagcggcgtccagggtagtgccttctgtaagaaggaaaaaacaaaaagttttagccttgtttagtatcagaatctgtcttgatagttagagtgagagccgcgcagccgtgatcctcgtttgggggcgagcgaagaattgacaagaggtctcggcatcccgaccccgcccgccttacctgtagcaccattcctttcgcggatcgtggggcttgatggttgtggagctagtataaagtcaaggctctagagaggagaggttagtacttgtccggaccactgccgggggtggagagagaagggatccaaggactcacctgtactattgttgccacttgcttggttacctagggtgcccttccatgaaagcgccttctctggtgtttaccactcttactcgtgcaagttttgctcatcctgctcgtctgctcacaatcatgctggagtatgatacatctctacctaactttcctaagaagctgtagacttaaatctaaatgacatttccaactatctggaccagtgctttgtctttttttttttttaaacgctgctttaaaaaaaaaattactgtacttgacagtaaattttcctttcgaaaataagtaatgagtttctttttaaacccccaatttgggtaaaataagtagctcagtacaaaataaaaagatactgattttgtgagatgaattttaaagacattagttagatttataggaatgacaattttactacttttctgaaagattatatgccaaatactattcattatcttgtttattcttccttacaatccagtgaaataggtgcttacattgtcctcattttccatctgagttaagaaactgaggcttggagaagctaagtaacttaaatagtgtgattgaacacagatctctctggctggaggacatattcttaacttctatacacctcctcagacattctgggaaaccaatatttgtgaagtgcttgttcctcaatcttgctatttttattaaatgttatattttaattttgtaagtgtttactcaataatttgaattaaacattcttcatgttcagt

SEQ ID NO: 11371 - DNA, 1028 bp, Homo sapiens
gtaaaatgtagatattaatatctttaatggtaaatgcagtgatgagcttttgtaccctgttggaccaaggtactttaataatcactgatcgttttttccttgtaggagagaagccacaagtcttaccgtcccttaacagtattgacatttcgcttaaattatttgttaagtgaactaaaaccaatgtcatatcatctcctgaatatgatttttcatgctgtggttagtgtgatatttctcaaagtatgcaaactttttctggacaacaagagtagtgtgattgcttctttactttttgcagtgcacccaatacatacagaagcagtaagtaaaactatgaactgactttttttctttttccttttttacaaatcctgcacagtgattataatggtatatatttttaagaaaaaaaaaaattaaccctgactttaatccaaatatttgaagactcttaaattcgtacagttaattcttaacttcctagtatgcaaagtataacttcctactgtgtaaaatttttaaatttaacatttttgaaacataaacatttttcattcaataatataaaatctgtttagaaatatatacatgaatacagttcttcggtcactttttttaatgaacaagatttctaaggactatttaaagtttattgtctttttaaactttatttttcagatttattatgagatgtaactttttgaatttatggtgcctttgtatattaagaacattcgtattttaagaaaatatgtaagaagtacttaagttctagatattctaccatatttacgtggttaccattggagaaagctggataaagagtacgcaagatctctctttactagttttgaaacttcctataagtcttattattatttcaaaataaatttaaaaaagtataaactgttaagagtcactaataaatgtctatttatgtaagattcacaaattcaccacctgagggcacccaaagaatgtttaagaaacaaatgtgcacttgaaaagttacggaaattaaagta

SEQ ID NO: 11372 - DNA, 1574 bp, Homo sapiens
ctaggagcaaaaaaatgttttgaaaggattttggagatggatccaagcaatgtgcaaggaaaacacaatctttgtgttgtttattttgaagaaaaagacttattaaaagctgaaagatgccttcttgaaacactggcattagcaccacatgaagaatatattcagcgccatttgaatatagtcagggataagatttcctcatctagttttatagagccaatattcccaaccagtaagatttcaagtgtggaaggaaagaaaattccaactgaaagtgtaaaagaaattagaggtgaatccagacaaacacaaatagtaaaaacaagtgataataaaagtcagtctaaatccaacaaacaattaggaaaaaatggagacgaagagacaccccacaaaacaacaaaagacatcaaagaaattgagaagaaaagagttgctgctttaaaaagactagaagagattgaacgtattttaaatggtgaataacattaatatttatcgtgacaatggtatcaaagaacatcaatccgtatcatgtgattgcttttactgggagctttgaaaaaaagttcaagggttcctaatggtcaatcatgagctgccttgaagtaggatcaaaataagattttcattaaagacctgtattatcccaggatgtatattatgtatcgctgttttcagagtgtgggtgaatatagcagaaatattacagcggaagtgacaaatttacaacttttattatagaaagaaggtgtttctggcaatgtaatctttactgctctcaattaaaaataattttgaggcctgaatgataatcccttgaggacaaatccaacatgtgctggtttattctgttaattcccatttatttgcctacttcatttttcttgcacctcttagaatctaactatgaattgaaaacacttaagtaattctgtttaatcaagggatttacactacaaaagaatgctggctttttttatgttgtattccttagttgagttttagaaggaatgcttgatgaaacattttaaaataagtcatgacatgttagcttgagaatgtattttcataattgtatacttgtttttaactttaaatgtaatttttaatcaggtaaagtttgacacatgtatagctacatacacacatttttaatggtgctcatatatactgtattttttgttgtttagttttacttattgagagtgtcacaacatgaatcacataatcatgattttttttttttacttttactccccaaattattcatgtttcttagatcgtagtcattgagaagtcccaataactctaaacttttgagttataacgtagtaaacttctctttcatctttgtgttagctctgtagtcttaacctggattttaatttttttgtttccaaagtcacaattgaattattcttagataccttaagccactgaattcagttctgtttgactgaaagcaaaacaacgtgacagtttattttcaaacactaacttcttgatattttgttatggtatatctttttattaaatatttattttgactaagctttcataaaatatttgaa

SEQ ID NO: 11373 - DNA, 1030 bp, Homo sapiens
aattaaagtacattttaaatgagctttataataccttaaaaagttggttctaatttaaaatatgaaagctctggctatcatcctgggatagtaatttctaattatatagtatttcaaaactatatattttttagttcctttgagataactaatttctaattatatatgtttcaaaaaccatatcctgtattttttttaagaattgttttataaataggtcataagatacaaggtctgcattagaagacccactcttactaggttccctaaggatctgccatagatttttttttttttttttttttttttaggtagtttaaagcaagcactgataccagtgggagttggtcttgatctaggagattctgttaagcatccaaaaacaatgcctaatttcagttcttaggttatggcttgtgactccagataaaagatggagaatacctcatgtactgtgacttgaaaatgaattcttaaaattcttaggctctctccatgtatctttcttaaggaaaagtttctgagtgtgatctctcttttgccatagtatcaagtggagggtagttcagaaaagttaataggaaatcttttgtgacagcagactataatagaagtttgagtaatattttaataaatttatataattcaaatgataaaaatgtatcaatgttatccaatgatttttattaaaaaattaccttattattagaactgtgcctattacataaaaagtgctcatgtatttgaattttaaataatttatttaaatcaagaccaccataagtcattaataatttaataattgttttaaatcagtggttttcaaccctcacttcatattagaatcatctgaggacttttaatatggaatccacctcataacaattaagtctaaatttctggaagatggagccatgcttgtttttccaaaagctctttgagtgattctaatttgtagtcagagttgaagaccactgctctaaattagtgcaggaaaatgcttttatttctcccatgttaacttttaaaa

SEQ ID NO: 11374 - DNA, 1054 bp, Homo sapiens
aaatggccttttattataccacatgcttgactttggttaacattaatattgttgtttctgttttatttggagagtgtaattatttgctgctataattcttgaatatttatgatcatcttttcaaatcatactgagtgtttttcctttaatgagttttctccatgcataatctaactcattattcattaaagaacaaaaaatgctatcatgaatacaagcttattaaatgtttcccctgcttttcacatgctgtattattaaacatgccatatctgaatacatctaaaccatcccaatttcagcacttttcagctgttttcttgtcaaaagcctgcttcttaattttgatttattataagattaatattggggagaatagttaaattaaaagcatttactagcagaaggcctttggttctttgacaattttcttcttggccttgaagtaaaatagccttaatgacaagaattcttactgttttcttttcatccatgtatgaaaaatgatcattccggaagctaaaaaacacttagtccttcgaaataaaaagaagtaagcacccatgaaagaagagagatgccctagaaaaacaggaggattagaatgggagtgccctgctttttatttcccatctgctttcaaatgtgtggatcaccctttgaggtctgcataaaataaagcaagtggatgagggcagaagttcattcttggttagaaaacctttattatacttgtcagcaagagctgcaatcaggcttatcattgagaaagacgttttcttatacttattcccagatcgcgattatccaaatagatatcttcttttcaaatttgagatcagtataatgtaatttttgagttccaaatcaatagtctttctgttatttccctttcccacccaaattggaagaaaaatgatatagatctcccttaaccaatttatttatggaaggtgttcactgtacacactacatgctttggtttaattcttaatgggtttcatatttactgtagcttcactctcaggtaagctagaggttaaagttttctaac

SEQ ID NO: 11375 - DNA, 1047 bp, Homo sapiens
tataaaactttgtaaatctgataacctgtaggttgagaattgaagagagtgagtcatcttgttagaggatatgatctgagggaagactctagaattctccttaagtgaaatgcacagccaattttaacatctggtttagctcttcagaattttcatttctgtgattgtgtgtagttgaggctttatctattacatgattattacagaataaactctgttagctttcctggagattctattgtttctctatgaatttgccttcactctgttgaaattgcattgccagacttcccaggacagtctagaaaaccagcttgagcccacctctctagttaataggtgagaaatgtttccctctactggatgaaaaacacctagatcctggttagaagatttaaatgtatgttttgtttgaggatgaaatgtttatatagagtacaaatggaagtaaaagagtaattgcaatttgaccccaaaaaagctacgtggcgctcccatctggctgttcctgtactgaagttctcagtaagtttctactttaaaacagattgttctaggaaagaaggttgttctaagagcagagttattcttttaaggtggctttatatattaaatattttccattttatctttttctgttctgtagggtaaataagtattagtatttgtttaggaagaaattaggtagcagaagtaacctatcccaaggtcacagaagctggcagatccttttgagctctggtcctttgtttctaaatgttttgtttatttgacctacctccccagctagttatttctgtggggaagcaccctcagttttggccgctgggcttctagacaggcccacagctaattgccctgtagagtagctgggtactgtgcttgtacagtgaaagatgacaatgcttttacaaataggtaatcagaaatggattctgttgaatgtatttgcatatatgatagtttaaaaggggatgaagagatgaggtcttagctcctaagaatcattctgtagggaaaggttggacaagggatcaatggaaaggg

SEQ ID NO: 11376 - DNA, 1047 bp, Homo sapiens; identical to SEQ ID NO: 11375

SEQ ID NO: 11377 - DNA, 1047 bp, Homo sapiens; identical to SEQ ID NO: 11375

SEQ ID NO: 11378 - DNA, 1073 bp, Homo sapiens
ctttgagggaaagatgtatattcagtatcttttcatcacatacaattcttgttgagtatcacacaattagtagataaggaacaaaatcagcaacttctttctccacagtgcttctctttaaggtggagaacttgtgctgaattgtcactttttgacaggagtcagtctgttctctgtccttctagaggctgaagattgtaaagacaaaagtgaatggatttagtttggataccatgtgcatgatgcttctttcctgctagcccattttcatgattctgattttctttcgaaaagcattttaaagtggtaaggttttgcatgaaaatttaagtggataaataactaacagttacatattttacctgttctgaaaaggatataccattaattggctgtagatgtccaatatgtgacccttgagatgagcacttgaaatatgactggactaaggaattgaattttaaattttatttaatcttaaatttagccatatgatgctagtggtgactgtgttagctgtagaccctcaaaagcatgaaaggttcaaaagtagcagagtttaggacagactggaattaattggcagatcaagggcccagaggagcccaattctatctgcaggtttgtcaatttagatgagtagacaagtgcttaatgaaacatgctggattttaaaactaccatcaccaaaagttggatattagcacatctgccttaagctagtagtttagatgtgaatcatttctggaccatagataattactcatttaaatttatcggccttttttttgaaagatacatttggctgggtgtggtggctcatgcctgtaatcccagcagtttgagaggctgaggcgggcagatcacctgaggtctggagttcaagaccagcctgaccagcatggagaaaccccgtctctactaaaaatacaaaattagctgggcgtggtggcgcatgtctgtaatcccagctacttgggaggctgaggcaggagaatcgcttgaaccggggaggcggaggttgcagtgagccgagattcttatatcataaattactggattgtgctaaatca

SEQ ID NO: 11379 - DNA, 1073 bp, Homo sapiens; identical to SEQ ID NO: 11378

SEQ ID NO: 11380 - DNA, 1680 bp, Homo sapiens
gtgaaagtcagagcacatattgtatatgaaagtgggttgtaaactaaaaagcacacctatgagctcagggttaacggtgttaatgtactggcagtgcaaggtatcagtgtgagtggtttagactagcaaataagagggcctgtgtcctaattctcttttatcactattggggggaagggcacggatactcattgaagactattaaaaacaagatttaacaatggttatttgtcatttattcacaacaggccatgaagattgtggttttccccattttgtcattggagaaactgaggatcgtttagttaatgacttgtttaaagtttcccaatttggcagtgactgactctaaagtccttggaagcaagacgtttaaattttgtactttagtttcttcatgaatcagaataaagatacctcacatgattaatacgagagcaaaatgaaatggtggtgaaagtacgttggaaagttaaagactttgtacacatataagatggtgaaattttatctgggacttgagggcatttatgagttcctccaattgagtaataggctaaggataggccttgtttgatatttctttattattattattattattaatggctcagggcagacaactatttcatttaatcagaaacaggatagtactgtaaatgatgtagtatcttgtgtatggaaccttggagggtgtacacagccacactagcattaaaagaatgaatactctgtgtaccatttgtgagtgactgtttcaagagtaattacacatttactgagtattcattaagtggaaggagctgcactgggtcctgcagagaagtttgtatctaagataaatagtaatggacatagttccagtggttctgatcttatattctgtccatgtcgctcttcgtcctgttgttcaatcatgtggaattgccaagttgtttaaaagcattgcttcagttgacttctaggcagtgattcttaccttgttcttgtggtgtttaatataacttaaatttaccataggtagcactgatttttctttatctcttcagcaggagtagaaattggtatgcttagaagcagattctaaaagcagtttctcttcagaacatcttttttcataccacttgataagcatcttgaaacaccatggctgtagctgcagtaaaatgggtgatgtcaaagagaactatcttgaaacatttatttccagtccaaagtaagtgaaattttttttaatgtttaaaaacttttaaacttttaagaattaagaaaatttaaagcatttagttattgtatatgcctgtaatttgcaggagtgtttgcagcaatggaaagtgggagaaaacctaaatgtcagtcagaaggggaatggataggtcagatgtggtgtctcatgcctgtaatcccagcactttgggaggctgaggtgggaggattgcttgaggccaggggtttgagaccagcctgggcaacatagcaagacccccacctctaaaaaaaaatgtgggttggggaggggaatggataaattatggtacatctgaactgtgactgtcatgtagctgttactgacatggaaagatctccaaatagaaacaaaaaaagcatgtcagaaccacatctatatatatctatcatatgatcttatttgtatgtttaaaagatgatccatcatatgca

SEQ ID NO: 11381 - DNA, 1070 bp, Homo sapiens
aatttgtgattaattttagcttttatttatttatttatttatttatttatttatttttttgagatggagtctcattcttttgcccaggctggagtgcagtggcgtgatcttgacttccttcagcctctgcctcctgggttcaagtgattctcctgcctcagcctcctgagtagctgggactacaggtgtgtgccaccacacctggctaatatttgtatttttagtagagacggggttttgccaggctggtcttgaactcctgacctcaagcaatctgcccaccttggccttacaaagtgctgggattacaggcatgagccaccacgctgggcccagaatgattattaggccgggcactaattttagctttaggctggagtgcccactgcactccagcctgggtgacatagtgagagtccatctcaaaaaaaaaaaaaaaggtaatcattttgccttgaatacagtataactttatttctaaaacattcttttttttagcaacgtagagcttgctctgacttctgatggcaggacaatagtatgctaccacccttctgtggacattccatatgaacacacaaaagtatgtatgagaaaatttcttgcagtttttaatttgctgttagaaatgtttgcacttctttatagtatccaaaaagaagggagtcatctgattttctttgttttagattttcttttggctttttaattttactattttgatttttctcttatttatttttcatctgctttctttacagtcttttttcagaatacaaaatgaaccatttaaacacaattatggcatcagttttctggtctaaaaaatttggtagatttctggttaaggatcaaatacatctagtataaaattataaaatgcattatcccatgctaccccatattataatctagacaattatgagaaagttgtattttagagtgctgggattacagctacttttttactattggttctgacagtttttttttttttttaacatttggtgaatttctttatttttatgttttaatgggccaacataggtatatattttgaatggcccagt

SEQ ID NO: 11382 - DNA, 1031 bp, Homo sapiens
ataagaacattaaatgagggctttctttttttcttttttttttatttgtagtagagacacggtctcgctgtgttgcccaggctggtcttgaactcttgaactgaagtgatcctcccaccttggcctcccaaagtgctggaattacaggcatgagccaccacacccggcctttctatttttctttctcttttttgagacagggtttcactctgtcacccaggctggagcacagtagtgtgatcacaggtagcctcgacctcctggtctcaagtgatcctcccacttcagcctcttgagtagctgggactgcaggtgcatgccatcacacctagatagtttttaaattttttttgtctgaccatgttgtccaagctggtcccatgctttggaactcctgggctcaagtgattctcctgccttggtttcccaaagtgctgggattacaggcatgagccactcactgcacctggcctaaataagaactttattattggaaaagaaacctaaaatttgctgtgagaagaaaaatatttctgactaatgaataatgcactaagtgaaactttgttttgataacttatttgcccaccctaaagtactatagtgaattactgaatatggtaattgttttattgtgatctcaaacaaatgctggctaacattcccacatcttcatgatgtttgttactgattattttgtagcctatccctcggccagatcctgtgcataataatgaagaaacacatgatcaagtgctgaaaaccagattggaagaaaaagttgaacaccttgaggaaggacctatgatagaacaacttagcaaaatgttctttactactaagcaccgttggtatcctcatggacggtaagttttcttttcttttcttcaatccctactacatacagtaaaggaacacatggattttcttgcaataacaaacttctgaagtggtgttttgcatgaggaaattaaccctaagtagaatcacctactatgttgtactttttttttcttttctgagacaggatc

SEQ ID NO: 11383 - DNA, 1054 bp, Homo sapiens
aaattctcaaaataatcctttgaaaagggagtataattacattttacagtgactcgaaccttacccaaacaagtgggagagccaggagccaaactatcaggctccaaagcttttttttagtgcatcacaatgacaaaggggtggttttctttcacccaagaatgtgctttcctggaaatttttctagatagaatattatgtaatttgttttgaaggttttttttcctgactgtcttaaagattatgctagctttagaacacatgcaaacagctgcagctctgtgattaaaatgttaaggtcactagaatagtgttaggaaaatgttaatagataattctgctgcctctattagcttatgtatgatccttaatagcattgcttccccttcagtttctatttaggaggtgaagaatcttttaataaggtagaaagttgctttatttaaatttgtactgtagaatgtttgtgatacagtatttgtaaaattgatatgaaaaataatttctcaaagtctattgtttgatctagttattttaataaaggaactctagaagtttcaagtggccagtgaagtgtgaggaatagagagtaaaggaaataattaataatggtgaccctctgttaagtggtttactttttccattaatataaatttcatttggaaagattaaaaaaacaagtttgattgaacttgataaatcagaaatatttaccagctttgtcgatggtgtattcttgaaaaatgtttggttttctttcaggttgacttatatccaaaattctacaaattcttagctatgttataaatgtagaaagaagtgaaaaatcaaaatatgattatgaagattttcttctcttccgagtacaaagctctgctaaataaggatttacccaagatgcccacatccacatacttatgtgtcagtgctttggagaattaactttgactttattctactggaagtatagattaacactgtgctttctgggattttgcttttcatgggttgctgatttttaattttgctaaataagcacatagtccgtgatcac

SEQ ID NO: 11384 - DNA, 1022 bp, Homo sapiens
aagatgagttgaatatcagcccacaaacactggtagtaagcaaactattttatttgctaaaggcataaataaatgtctcctttgcttttaggcaaagggaatgcttcttcagatttttttttttccccagaagttcaaaataacttgctcatagtcttcccaaaataattttcaaacattctaacaccaaagaaagatactcccaattgagctcagccatcagcctcctactattttttaatgtgctgtttaaccttgtgaatgtgagaatattttgaatgcactgggaaggaatactcaggaacaatatgtaatgtgctttctagttttgcacaaaggcattcattttgatttagtaacaacctcatacttacatagcatatccttctgcagaaatgcttcacagccatgactgcttgaattcttgtcatgttgcttgtaaatgagctcctgtttttagatggagaaatggaggcagagtctcacaattacatgtgagaatagcaagtagaaccttatgattacttctgagtcttttttttttttttttttttgagatggagtttcacttttgtcacccaggctggagtgcagtacagtggccagtggcatgatctcagcccactgcaacctccgcctcataggctcaagcaattctcctgcctcagcctcccgagtagctgggattatgagcgtgcaccagcatgcctggctgattttttgtattttcagtagagatggggtttcaccacgttggccaggctggtcttgaactcctgacctcaggtgatctgcccaccttggccccccaaaatactgggattacaagggtgagccactgtgcccagcctcttctgagtcttcaattcagcaagaatgtctcttttttttttttttttttttttgggacagagtcttgctcttgttgccttggctggagtgtagtggcacattctcagctcactgcaacctccacctcccgggttcaagcgattctcctgcctcagcttcccaagtagctg

SEQ ID NO: 11385 - DNA, 1057 bp, Homo sapiens
cgaatgccatccccttgagttaagtcagggactatgccttgttcacatctgctgcagccatcacagaacctttaaaaaagtaggttcttaaatcttaaatgagtgcatgctgtgagggaaggaaagcaaatagactttttggctcaaataaagaattgatgtgtttagaagacaggtaaagagaaaagggacgagttgttggatgatcttgatatctaggctttgaatctgggcttggcagggtaggtgcatgagccctgaatataagggagctggcctagggagagaaaaaaaaccatcacttcaactcctgtcttccagggtgttgacatcattaactgccccacatccaccagatttccccagatcttagttgacatagagacattcattctgtttctcaccttaagaaaatccatcctgagttagcttcagttggtgctgctgctaggctttatggtgataggctttgggaggaactgagaatcccaaatgctaggtggtatctgaatgtggcattacgagatataatgctctaaactctgcaatttctcttgtaagacggaaacaattcaacctgttctttgactccttttctgggttttcttggctccaggcttcttagaacactgatcacactgttccaccacccccaatctttacctccattctctctaccctcccagcccccaccaaaacacaattcttttcaggcaagtgcaccatacaggtgctctggtggtcccgtaactgaggatgtagttgccagccttttagcaatatcaagagttctctggaggctcttgagagctgtggccttggttaaattggacagaatcacctttttggtaaattcccttccgattcatttcacaaatggcttaaatcatttatgttgttttgttcaatccagtcaggaaatgaaagcattgccattttaattgttttagaacagcattttacacctaatatagactcccaaagccagccaaatgcagattttggctcctagatcgctgactgcatgctgactgtgttcttgagtgtggaagaaaac

SEQ ID NO: 11386 - DNA, 1003 bp, Homo sapiens
cccgtaaaacgttttccacatggcaatcagagccatcttttaaaaatagaaatcagactttgttattcctctgcttaaaacctcctcctaggactttacattgcactgagaatcagagctcctcaccagggcccaaaagggacaccgtgacctggggactcctgctggcttcttcagtcacatctaccattccctgccttctccctgtagcccagcacaggcctcctctgtcactccagtcggccaagtcagtgcccacctcgaggcctttgttccagcctagccgttctctgtgcctggtgtgccctgctcccagttttgctctaataagtggctccctctggtaatttaggtgtcaggcctccttgatgaggcctgcctgatcaaattagccacctcccaagtcactttctgcaacattatcctgttttgtttcttgcacagcatttaacactatctggaattatcctccgcacttgattggacttgttacttgacaagcgaatttcccttctctagactgtaagctctttcagaagtagggcagctttaactgcctggtttatcctgcatccccagaccccaggacagtgcctgtcccatcaataattatgtgttgagcagatgcatttatggaccagatcatcacagaggattttgaaattgaaaaaattacttaattaaatgaaatgtttaaaattaattttttgggattctgaagggaacttttatgattaaatttctgtgtactacaggttgcctattgtgtagtcatgttttagtaaaagttcttttcctgaggcaggaccatttcagatgggaaagataagttttctgtgctctagggacagtctcctgtctgccttgaacacattagacagatgaccttaatgatcggaagagatgcattggaaatacattcctttccctcatcagcagtgcttttgcattagcattgagcagggtttgactttcttggtgatacagaaggtgcaagaagctt

SEQ ID NO: 11387 - DNA, 1040 bp, Homo sapiens
actctttttgtgtttgtccatttatttcaagtccgttaggggcattttctcttgtctgtgctgatttgctttatagaacttggttcagtacaacaaacctaaaacagctccttgtacatagtaggtactcaggacatgtttgttacatgaatgaataaacctttaggggcaagatctcctgggcttttgtgaagaacatgcagactaatacattatgttcctgcccttaagcagactactgttttagcagggctacttcagaacctaaagccaatgtttgcaatagaagcctaataaaggaagaatgtagaagtgtgcaatgtagaaaggaacttcgggcatataaatctgactccagaacctcagatccagcctctattctggctttttagtaggcgagttcttcaagggagagggaagtgtggttatcatggacaactgaatcggggctttattcacactaggagaaatgacccggaacttggtaataagatgaaagaatgatctttcagagtcgtagtagagcgttgtctaacaagacctaaggctcatctgattctgtagaggatgtgacttcattttagatgttaacttagagaaaactgatatgatgcaaataatttctggcaggtagaaaagataactctaaaggttttgttttattgtcctatagaatattcacatactacataaaaaaataacaaaaaatacatacaaaaaattctaaattacatacaaaaaaacctacattttgtatgtaatttagaatcttattccagtatttttttttctaaaaccgactatatgtatcaatttcttagccaatttactgttttcattaatgaggtatatgtgtctttgccatgctcactatatatttgcatgtggattatacttttaacattttgaaaattatattttgacattcatattcagtaaagtctttagacatgaatgtacatgtcattatccaagttacctaattatatcataccatgtaacttttaaatggacacatcgcagatgtcacaataagggaa

SEQ ID NO: 11388 - DNA, 1032 bp, Homo sapiens
gccagagcactgcaaaaaagggaaatttgtcatttgccttggggaacaatggctttcaccaatcaagaggcaaaatcaaccacagtctcagagcctggagtaagatggaaaaatcttcctgttgtctttagaggaggaggttacatcatttcttacagaaatgagccttgacaacccccacatcccgatactgcatcctctttgtaccacagtgaattgttgccatgaagctgagacaaggcttggtatgggcaactccaggcatgggcaactccagacctcatcctagtggtgatcctgggctccttcttcataagcaatagagaagcagactgtttgggaggaggaaaaagtagtgatgggacaagttcccaaaaagaggccatgggagggagttcagtgttacatgcagtcaccttttgggttttgtctctattggattattctgttttttgtttctcattggagtctagaaatgtttaatgatacttgatggtacttcctttatccatgtaaaagtatatctaagaacttctgcatatattaacactctgtaatgattaagccaatgtaattagagtattgtatcagcaagagaaatatttttctctagacatagataaatcaaattttttctttcaaatctctgtgcaattgctccaaaatggaaatcagttttatgatttcatggattgtcatctccttacaacagcagactaatgaacatgatgatttatgcaaacaaaatatactcatttaagaatatgctcgcattggccgggcacggtggctcatgcctgtaatcccagcactttgggaggccaaggcaggaggatcaccaggtcaggagttcgagactagcctggtcaacatggtgaaaccatgtctctactgaaaatacaaaattagcctggcgtggtggcaggtgcctgtaatcctagctactcaggaggctgaaacaggagaatcgcttgaacccaggaggtggaagttgcagtgagccaagattgtgccagtgcattgcagcctagg

SEQ ID NO: 11389 - DNA, 1027 bp, Homo sapiens
tctgttccccaggcaggcacagtcatagcttactatagcctcgaagtcccaggctcaagcaatcctcccacttcacctcccaagtgtcaaggattacaggtgtgtgtcaccacgcctggctcatttttatattttttgtagagatgagatttcactatactgcttaggctgatcttgaactcctggccttaagggatcctccatcctcagcctcctgaagtgctgggattacagacatgagccaccgtgcccaagctcctgttggattttgatgggaatattagccccacacacattttctcttctgaaccaggaatgtctgtgcaagtacaccacatagactccttagcatgagccatataagggcaaaggtcacatgtttaatgtcccataaacatcatttattttgtttaaagtagtctatcccaatgacaatgacagcattcttgacctgagtcaattctctttgctggatccaaagtcaaggataaaagtgagggtcacttggcatttgcctccttgaaatgtagctctctgagggcccacctgtgtcttgtgtcctcttctttcctaatgaagtgtctggcacacgaagtcatgattaacgaaggtctcagtgaatgaaggaaacacaaaaacgtatgtgtacccctcagtacggggaaagtgatggagaactgtaaatgctactgtcattgagtcaaaaaatcttacacatgtttcttatgcaagttatgtaacttctctgtgcttcactctccttacctctgaaagacagataatcatagaaccaacctcataacaccgttataaggaggcaatgagagagtatttgttgagtgcttagaacagtgtcaggcacggaataaatatagaaatatttgatgatgaataaacaaatgaatgaggggtgcctggcttttactcaggtttgcaatgtttgctgaaagagtgaatcaacaaatcctagaccagaacgttccaacactcacatccttggtgctcagctgttcccaggagtagtagt

SEQ ID NO: 11390 - DNA, 1112 bp, Homo sapiens
ttttaatagagatggggtttcaccatattggccaggctggtctcgatctcctgacctcaggtggtccaacggcctcggcctcccaaaatgctgagattgtaggtgtgagccaccgctcatggcagttaagataatttatagtttaaacttagttaataaattgtgtattgtgaacatcagggatggcttttatcacagtgttatttcattttcttctgctaatcaacaattgtatgtgcaaggtagttcatatgttaaacagtaagtgcaccagaattatgaatctaaatctttcctaaggaggtgtgctgatagctgcttatagagaaaggatttgttgtttttttttttaattaggagggaggatatcacaaactggcagaaaaagaccttttgaaaatgaatactatagaatttcagttattactggcttataattatgcttttctgatatagtaattccagttccatttgtaatgcacaatatttttggaaatgtaacattacttatagatacaaatatcatcattgacttgggctcagaactcttataatagcagggaatattatgtgacataatgcttgctatattttgctattttaaaaaatgatacatttatgtttgtttcgaagtggtagattttttaaaagattggacttaaaagccggaagagttggttatttgtggtattctgcaaataaaaacatcttcattcctactcacagttttaaaaaattcagattctatctctttgctataattctttgatgatgtaatattaactcctgccaaagaggtacctaacaacagaaatactttagataatttactgaaatttcagttcacagttactgaggtagaagctggccatgtttttccactaaaagatacaaatattcacccaagtttattgattcaaagacatgcatttttttcatcagcagttttataataatcacaattcctaaaccaagcactttgtggaaatttgctccttgctatgtgttttttccttacaaagactttccaccagtaagattgttacaatgtaaggtaagaaaacagtgtgaactatgtcacgaatagttaatacagtatacagtattaagat

SEQ ID NO: 11391 - DNA, 1035 bp, Homo sapiens
gaccaccgaaccccagcgatttcagggcctagagtccgtcgtcgcctgacaggtgtagccagaggcgccctggccgtggccggcctctatctcgggcccgcccagaattcccagacggtgcccggttgccaggctctgggctggagcggtgtctcttccttcctgggaatggatgtgcggcgggggggactgcgcccggctggggcggggccgaatcgtgccttttagatagtcacaacttagcctcctccttttccatccgcgatttttttgggtcagtatccagagtgcttcaggtcactgttcaccgtcaaggcgtggccctcggaatgaaggcagcaggtgcccgttttctaacacggtttaaagtctatttgtgggacctactgtgggtagttagggccagggcatctcagcatctagattcgattcttttgtcctttgctgttgcgctaggtgtagccagttcttctgactcggggctctagatgtgagtgcttttgtgtgggactattttaagacgttctctgccatcttgaatgaaaaaaatcgggcgagtgtttttgatgccatttttttccatcagacacaggtcaaaactcgcacccctgtacgtatgtgtattgcatgtatacgctttactttcatttatccaactagattttaagaaaatttaaaaatgaagtggcccatgccatacagcgagagagcgaggcacagacaggacagaatgctaaatgttgaaatatgtacaaactgtcattgaaggattaatttctgttcttgcggcctcccagaggctacacccagtacgcgatatccgaggtgaatctttaactatgaattggattagaaaaaccggcaggagaaaatgtattacagggaaagagaactgattatgccaagcttgggaagtgtgaaagtacctggtgtgcatttttagggggcggggtgtggagggtggctatgtaaagtggcttgatgtggctgcaatgaagaagcagtggaaaatgtggccattttaccgaagtgaag

SEQ ID NO: 11392 - DNA, 1052 bp, Homo sapiens
taattactataatttaaaaaataggttttaatatctgatagcataagacccttcagctgtatttttcttcaggattgcctttggctattcttggcccattatatttccatataaattttagaatcagcctgtcagtttttgtaaaaaaataaaaaataaaaataaaaaaaccctactgagactttgattgaaattgctttgaagctataaattaatctggggaaacttaacatctttacaatcaatattgaatcttccaatccgtgaacatttattgcttgccttctaaatgaatcaagcaacttctcatctcgttctgtgctctaggactgattttacaaaatgagaattatctgtttcttcagagtatagctaaattggcctttcctggggaaaagagactgaatgttgtctatcagctcaatttcttttatggttattgctcaggtacaattttctattttgataacttttttattctgaaaggcagtgtaatatagttaaagatatgggctctggagctggataacctaagaaatcctaggtcagctatttattagttatattagttaatgtgactttgagcaggttacttaacttgtctaagcttcagttttctccatattaaataaaaataacagtaactatctcgtaaggtagttatgagtactaaatgatttaatataagtgaattacttagatgagtacctgacacattgtaaacactcagtaaatgttaccttttattaaatttttccaacaaattgctttttatctaggttttcaaaattattgatatattcttagtagtctctttagtttcatttatagcacaaattagatctgattgttgttatgtttttctttttgttttgcatagatgtgctggagtttcaacttaccagatagacttttcttttttttgagacagagttccactctgttagccttgtcgcccaggctggagtgcaatggcaggatcttggcttgctgcaacctctgcctcctgggttcaagcaattctcctgcctcagcctcccgagtagctggga

SEQ ID NO: 11393 - DNA, 1046 bp, Homo sapiens
ctgcagtgcaacctgcttcggggctgaggtgggaggattgcttgagcccaggaggttgaggctgcagtgagctgtgatttcagcactgcactccagcctgggcattgaaataagaccctttctcaaaacaaaaacaaaaacaaaacaccaactctggtttataaccaagatatgcaagaagaaattccatgtttaatatgaattataaaaattattcttggggaacaagtctgcttttttttctgcttatgttgtgtcatttcttctgttttggcttcttcacagatccttggggctccagtttagattaaaattttgtttctgttttatgtctaaacattcaagaaaagtaggtagttctctcttttatgtattttttattgcatttattaaaatgtaagtccatttgtctcaagctatgacacacacagtgcctacattattttttttagttaccttggtattttatgtgcagctatattgaaggttttcatttttttaaaagcattgtggaaagaggaccagacgaggagtcaagagactgactgacataaattagcaatgaaattctgaataaatcacttaatttctctagagcttgtttcccaggatcatcctttataccatatcatcctttggtatgaaatttttcttaaatccattctaggggatcggaaactatctagtgggttgagtaaatgagagtaggcccttagaggcttccattaattaggaaatacaggaaaagaatctattcatttccagtctctttttatattagaaatcctgactcaattttagttttccctggttctgtaccaggtgttctctgagttcctagaagcaaatcatgccttaaggatttaggagaaaaggcccaaagctcagtgtactcgacaggggcacagtgttagaaagtgtactaacttcgaccagatgtggtggctcatgcctgtaatcccagcactttcagagggtgaggcaggcggatcgcctggggtcaggagttcgagatcagcctggccaacatggtgaaaccccatctc

SEQ ID NO: 11394 - DNA, 1026 bp, Homo sapiens
ttaataatcctatacaatgtcattcatttccttcagcaaggtatcctgttaaaagtggctgaaaccatcaaaagttggatttttttttctcagtgcaataagaaagatgacttacttcacaagttggtaagtggtcacttctttttgccacttttcagggttctaggttattagtgaaataattggtgaatcagaatttgttttgctatcaatttggccagcaattgatttttactagagattctgcagtaactcaggatcttttaatttgggcttactggtattgtttatagcttttaaagaggttattagccactcagaatggaatactctgatagttattgaaacgttatttgttagattgctaatttactattgccctcttcctccattgacaggtatccctctctataggtaaaggaatatgtcattagtgggatcaattcaatctgttaaatcacagaatttcccaaagactcgaaacagtcaacctgaaaggtctttgtgatttttgtgaggctttgtttttttctactctctgctgtaacagaactccaggggggaaatacttcaaccttctgacgtcctaacaatacaaaatccagggagtatagcctaaaaattcaagttatgtggttctcatggctcccagaaggagtaatgtagttacaagtaagcaggtttcaggatctctgctggcctgtaaccttaagaattatcattcctgtaaattaacatttgtaaggagattgtttacaaagtgctttcacattttgatttggtaatctaaacaacactataagatttagtctgcttcagtaacgagaaaaccaaggttcagacaatcagtttgttttaataacttactgagtgaattgtctaaaaatgttcagctagaaagtgatagagccagaatttgaacccaggtctcttggttccaaagccatgctctttctgctatagcatacgacctctctagctcaagtattattattttttggctgactaaaattacttttttagcaa

SEQ ID NO: 11395 - DNA, 1060 bp, Homo sapiens
ctcccaaatacctgggactataggagcatgccaccatacctggctaatttttgtatttttttcagagacagggttttgccatgttgcccaggctggtcttgaattcctgaactcaagtgatctgcctgcctcagcctcccaaagtgctgggattacaggcacgagcccctgcacctggccagggcaaatatttaataagaaattgcatgtgattttctttgcaatatgattattataactctttccaaatattgctgtttttcagctattctcagacacatcccccttatactcccctctttcttttcttttctttttttttttttttttttttgagacaaggtcctgctttgccacccaggctggagtgcagtggcatgatctcggcttactgcagcctgctcaagtgatccctccgcctcagcctccgaatagcagggactacggatgcatgcaaccacacccagctaatttttaaattttttgtagagaaggggtcctactgtgttgcccagtctggtctcgaactcctgggctcaagtggtcctcccacctgtgcctctcaaagtgctgagattacaggcgtgggccactgtgcctggccccctctttcttatatatacacattttcaccaaagcattcattgctttaaagatgtattttagtctgttagacttgcaattgatatgaattttaaaatgtgtacatatttttgtttcaattaaagtagtataaaagtacaaaccttgtccatatcatggtctgtggtaagtatgtatattccaaattgatgatgattatttaaaattagaggactttattcaaacaattactcatcaagtgtgtatcatttctaattggaaaaatgtgtacatattcttgatctagtatgtgtttctatgcaaataaagtttgattttaggaaaagggatttataatatctctgaaatagtatttttacttttaaatctataaaatcggattttaaaatctctaatttgctttttaggttaaggattccatatattttttatttttttaaaagtggtttcagaagat

SEQ ID NO: 11396 - DNA, 1049 bp, Homo sapiens
ccttttttcttttttttcttttaattgagatgggatttcactctgtcccccaggctgaagtgcagtggcgctattgtggctcactgcaacctctacctcccaggctcaagcagtcctcccacctcagccttaggcacatgctaccatgctcggctaattttttgtatttttggtgaaaaaggggtttcaccatgttgcccaagctggttttgaactcctgagctcaagccattcacctgccttggcctcccaaagtgctgagatttaagcttattttaaaataagcctcgtaaattataaatttttcatttcatattatagaaatctgtttctgtttttctttatgactcagggtaataattcttgaagatgaacttgaaaagcttgtttgtactaaagaaacacaagaactagtgtcagaggcttatcccatcctagaacagaaattaaagttgattcagccccacgttcaagcaagcaacaattgctgggaagaggccatttctcaggtcgacaaactgctacgaagaaatacagataaaaaaggtacctgtgagagatttctttgccatatgcttatcagacatgcttattccactctggtaggattttattaggtagacttcttgtctttatgatgaaactagcttcaaaatttcttagtttacttttttttaatgttgaatttatatgtacaaagtgacactgaatacaattcttggctctcattttgtaaattaaaaatgaatatgatttgaaagttcagtgaatcatatctcttttttaaaaagactgaaatgagagaataaattttgatagcatttttctattattagaacttccagaaactctttttcagttaggataataaaagaatgagtttgatagtctggggctaggaacttgagtttttcttttaagataaaatacttaactttagtcattcaaaaataatatacaaatgatataattagtggcactgcatatttagtactaagatctaaagacattgtgtcattatttaataatatatcagattgctttgtgct

SEQ ID NO: 11397 - DNA, 1095 bp, Homo sapiens
tcagatatgggaaaagtcagtaaaaatgatactgaagaggaaagtaataaatccgccacaacagacaatgaaataagtaggactgagtatttatgtgaaaactctctagaaggtaaaaataaagataattcttcaaatgaagtcttcccccaaggagcagaagaaagaatgtgttaccaatgtgagagtgaagatgaaccacaagcagatggaagtggtctgaccactgcccctccaactcccagggactcattacagccctccattaagcagaggctggcacggctacagctgtcaccagattttaccttcactgctggccttgctgcagaagtggctgctagatctctctcctttaccaccatgcaggaacagacttttggtggtgaggaggaagaacaaataatagaagaaaataaaaatgagatagaagaaaagtaagaaccaagattcatatgaagtgatattagattgttccttttacaaaagtgtttagcttcaagactggaaagggaatatgagtgtaagtttactatatataaagctaagatgtggatttacaggaagaaccctggtttgaataactgatctgaaattagtagttacctgtaaatggcagatcttttaggaaaataagagaaaggtaagggctcttttgaataaactgctgttttatttgtggcacaactgatcaatcttggaaattctttaagtatttttaataagaaatgaattatcatttcttgccagaatttgctaccttaaggtgattgggaaaattctgttgcaagaacattaacatttagtatgactcctttttactgtattcttgcagttaataactgcagctattatgttaataacaagttgtttgtattttatttttgtttataccagtcttaaagatccaggttctgaataaaaaaattaattgatacaattgatgtgtgctggggtttggaactaaaagtagtttcaacagtgcgtgggttatgacatttcttatgtttctttgttcatgtgtgtatttagtagttaattttaagatgtcctagtgatctttaaaagaaaaatattgtaccattttttagaatt

SEQ ID NO: 11398 - DNA, 1050 bp, Homo sapiens
tgctttactacttagaaatagctaaatttcaattttaaaaatctttgtgtgttataactgttaaattattcaataatacttagggtttactttcttatttaaatcacttatttagtttaccgacttcatttttctttggatttagaagaagcaattatggaaaaacttggtaatctctctcaacctataaccttacacaggaagaattagagtttaataatttttaattcttttattgtatgttacttttattacaccagtttgggggaaaatcttcataaaattgtatcagttttattcagtgttctctaaggtgataccttttaattttgaaagactaaataattttaatcgagaatttccagtctttcagtctgatctatttaattcactacttgttacataatccagtgaaaactctacttgttgaaattatgacataaagatcttgcagctttatttgagtatttgttcttttgtgtagtttccatcttttaaaatatttaaaatattttcaagataaagtattatcttctctgcaaaaattcctggagtaattttctctcataatatttgaagtcagtggttctcagttgtattagtggggtaactacatcaaaataaataaagtcttatttttaaaatgcaaattttagaccatactcccagtgattcttagttggtctttttggaatgagccataggtaatgtttatgtccaataaaatctaggaacctctgtctggaactttgctcttcttgccatgaataccttaggaagtattaaaaaacaggccaatgtaatatgagtaggttttcttgtttgttacttttctaagaatattttacttcccttagcaggcttttggctagctttcaaagctgccaccctggccaggtgcggtggctcacgcctgtaatcccagcactttgggaggccgaggcaggcagattgcctaagctcaggagttcgaaaccagcctgggcaacatggtgaaaccccgtctctactaaaaatacaaaaaattagctgggcatggtggtgggtgcc

SEQ ID NO: 11399 - DNA, 1286 bp, Homo sapiens
ggattacataaggtcagtagttcgagaccagcctggccaacatgttgaaaccccatctcttctaaaaagacaaaaaaaaatttagccgggtgtggtagcacacacctgtaatcccaacaacttgggaagctgaggcaggagaattgcttgagcccgagagatggaggttgcagtgagctgagattgcaccactgcactccagcctggccagcagagtaagactgtctcaaaaaaaagaaagaaagaaagaaagaaagaaaagctagaaaatgtgatattccttaatcaaaatttatttactcgtatagtgttttctctgacatttcacttgttacctcaattaatgtcacagattaaaaaggaaaaggtatttattagcaagtcttgaaaaagttcaatgtgttaattagctgttcagataggacagatctcagagtttaaaaatatacttggtagaaggcaaagtagtgagtattaataagattgaggggttgtttatttaactaatacttactgaagaactactatgtactagatactttcctaggttattttcacatacattcacattttaacctcacaaaaccaagcaaagtaacctacttgtgcttagatatccattttgttttttggtaatggactgtcttttcctatttattttgactttacccagcccttcatggctttacccagccatctcattttacagatagggaagtggtagttacatgatttacccaaagtgacatagctaatatgtgtagaatagagccagaatttcaaacctagtgcctgactgcacgtttgttccttttactctctatttttttttttctttttgagaccgagtctcgctctgtcgcacaggctggagtgcagtggcgtgatctcggatcactgcgacctcccgagctcaagcaattctcctgcctcagcctcccgagtagctgggattacaggcgcctgccaccatgcccaactaatttttttgtatctttagtagaaatggggttttgccaggttggtcttgaactcctgacctcaagtaatctgcccacctcagcctcccaaggtgctgggattacaggtttgagctactgtgtccggcctgttccttttactctctataccaaaattaactcttttcattctgaaagaatcgtataggagtgcactaagttttattataaattccttgaccctagctccttctgggtgtttgggtacaataagatttttttaaagacagcaactgctaattgatgttatcagtaaaacagtgaagg

SEQ ID NO: 11400 - DNA, 1028 bp, Homo sapiens
tttaataactttggtttaacaatcctttattttctttagctgttagctaagggatgtcgatatgaattggttgcattttactgcaagttagggatgagtttctaaaaattttatgatttaaaacttgcataatttaaagaataattctgtcaagaatggccgaagtggtgccatggtggtggtagggtaagcgttgtttgtaatttaccttccagcttttaaattatgagattcttgatgagtatttaatgaggaatcccgttatttaagatgtgtgcatatggtgagactttattattaataataacttttatattgtacgatcagatttgtataaaatatcctgcttgttttgagtttctgtaagtgccacaaccaaacatcatcaggtgcccgaaaatatattaaggaggctgaagggagatttcgtagtgttgaggaagaaaggttgggttgagaatcacaacatgtaagttttaatcttggatgccatttgggctgttgtagaccactgaatgtctggttatgccttcctttaaaatttttcaggctaaaattttatgaatcagaattttgggggcttggtagtgattcccctggtctccaggtggaggtggaatagccttctttgcatttaggcgtccatcattactagatccttccactctaagaagaggatgtcagctattctcgtagcctgtgagggcccatgagtctgtatttgatgagcacaggatacttgcattccaggaatcttccaggggctatattgtcctattctttccattaaaaaaaaattattaaaagtttggctataagaaatagtgttacctgagaatgaattaagagatacctatttcttaaattaaaaaaaaaaaaaagataactatttcttcaaatactctaaattgctcccttctgaaggcagaccagcagggaggagtgttgttagaggactgttttatatttgcccttgacagaattcttctgacagatgttttaagtatgatgccattaacatttgttct

SEQ ID NO: 11401 - DNA, 1207 bp, Homo sapiens
tttataccttatatactcttgaaataatagtttttcttattttattaatatatattaggtttatatttttattttattgctataggacttcttactactttggtttgtatttgtgaaagccaacctctctatgctgttccatctctagtatagtgagtgaagatgaagacattagaagtgtgccttttgccaaggcatatactgtttaaatacataatggagttctgaggagttaaaaatttctttttcccaagcagcaataaatcattgaggaggtggccagcatgatgaagtgtcttctgcttttaactgtggcagcaaggagtttccttaaaatcagaacatataacaaccattaggaactgagaaaactctaataactgcttaattttatttttaactacagaagttaatgctttatttgtatctcacagcaaaagttcaaacagaccctccctcagttccaatatgtgacctgtatcctaatggtgtatttcccaaaggacaagaatgcgaatacccacccacacaagatgggtaaggatcatcaaatcacttccagtttaatttctgacagttatagcttagcaataaagcagatttgacatttctcagaactttgctccactactttaataaatgcttataaatttgtcataaagaagatacagtagaagccctcttatccaaaatgattgggaccaatagcaggttattggtcatttaaaaagtatattaaactgaggatcacaaaataaaaattcttgtagataaaggttaacttaaacaaatttgtttttcacctctcttgaaatttgggtatggtttagtacttttcccccctcatatgtattcataatgcgttatctacaattccatttgggatttctgagtgatataagggttgatgtctactatatctttactttttttttcctgaaaccttttgatagttcttacctacacttaatttgacagaagtattttttgatcacttatccttagtgagatttatcagggtagttagttttcatggaaacagtttttttaatgttactttttttttttttgagacagagtttcactcttgttgcctaggctggagtgcaatgctgggatctcggctcactgcaacctctgcctcccgggttcaagtgattctcctgctccagcctcccgagtagctgagattacacgcatgcaccac

SEQ ID NO: 11402 - DNA, 1955 bp, Homo sapiens
tttttccttttgataaatggttagtataacatgtaattctctgattcctacaatttaaaaaatatacaacatgaacaaataagatcagcatttaaattggtctaagttagactcttattttctagtaaatttagttaaaagtggattgtgtttctctgactttctagcagaatcaaattccttgtcttctaaagatatgctattttcatagcatcagagaactgttatttatttatattcagaaagtgctcagatcattcccagaaggtatttaaggtttttagtaaactttctggacttgatgaactatatggtattaatatataaaagtaagaatgtaaaagtaaacaagttccctttgcttttttgttttagtgaaaagttggaagactgttcacgcaagttaataaaagagaatggattaaatgcaggcctggcatttcctactggatgttctctcaataattgtgctgcccattatactcccaatgccggtgacacaacagtattacagtatgatgacatctgtaaaatagactttggaacacatataagtggtaaattcttgcagaaaattcctaccccagcctcctcctgaaaaactagtttttgtctctgttaaatggagtgataaatactgaactcccaaattttgttcttgcttcctcatttcattaggaaaggtgtgttgaggcagatttttaaaaaaattttagtgcacttataggagagagaggcagttgtgacatttacttgaaagcatactactaagtagaataaaatgaaaactgttgggtagttgaggtttattaccctttgtatcaaggcatgaaagacattatcctacctttctttaggtcattgtttcatatctcttttattcaaataataacatttatttaaaatacttaagtttatcagccttaatatacatgtttgcttttctgaattctctccaaaacctggttaggtaagcaccttgttatcttacttacaagtgagaaagcaagcttagaataaatacttgcctaaggtttcactaccttggaaaagtaaaagtatattcagagccctgtatactttctctgccctgcgttactatttctcatttccctagtcttttcttgtattcattttgtttctgtttatatgtttgtataactgccagggtgagcactgaactggtgctgtcttggggtaatatatactaaccttgtaattctttctattctgaatcctttatatacttctacattttgtctctttgattatgaatgatctttgggtatttggagtgcagccttcatttgagccttcattctatttttctgttaaactagcaagattaatagattaaatgctgtaaagtagataaattgactagctgataagtaaaattaaaagaggaattttctctttcaggtaggattattgactgtgcttttactgtcacttttaatcccaaatatgatacgttattaaaagctgtaaaagatgctactaacactggaataaaggtatgtgaactgtaagcaccatttcattcccaatattttgagcactttaaggtcttttaaacacttaacagcatttaagcacttttaaggcctgtttaagggctttgggtaattaagaggaataaaattgatccatttcccttatggttttaagcgggtaagtgtatgattgtgtaccaaaggttgtttttttgtttgtttgtttgtttcccttgaactttgctaaaatttattaaaacagagtttggatctatttttgcctgtcagttggcagtggtttttttgtggttcttttttagaacaattttaggttcataataaaattgagcagaaagtacagagatttcccttatacccacccctccccaatttcctccattgtcagcatccccaccacataggtatatttgttaaaatcatttgaactagcattgacca

SEQ ID NO: 11403 - DNA, 1070 bp, Homo sapiens
tctttcaatttacattgaaattttttaacatttgaagatgattgaaatctgcatttacatcttttatatgcaggtctttgagcttgctgcacacaaaaggaaattcacatcataataccctgtagtaggtctctagtggggaatataacacacacacacgcacacgcgcgcgcacgtagacacgtaaacatgataagatggcctccagctggtgtcctattcagctgccatctataattaggtatgggctattatacattctggcttttgattgttgaaagagcaacaataaaagtttttggacttcaactactaggacacagctaaggtctgggcttttcttaatgagggaaatcagttcgtaactcttttgccaacagttaattttggattttctcctcttaggcttccaagaacaaaacacttgttaaatgtcatcaatgaaaactttggaacccttgccttctgccgcagatggctggatcgcttgggagaaagtaaatacttgatggctctgaagaatctgtgtgacttgggcattgtagatccatatccaccattatgtgacattaaaggatcatatacagcgcaatttgaacataccatcctgttgcgtccaacatgtaaagaagttgtcagcagaggagatgactattaaacttagtccaaagccacctcaacacctttattttctgagctttgttggaaaacatgataccagaattaatttgccacatgttgtctgttttaacagtggacccatgtaatacttttatccatgtttaaaaaagaaggaatttggacaaaggcaaaccgtctaatgtaattaaccaacgaaaaagctttccggacttttaaatgctaactgtttttccccttcctgtctaggaaaatgctataaagctcaaattagttaggaatgacttatacgttttgttttgaatacctaagagatactttttggatatttatattgccatattcttacttgaatgctttgaatgactacatccagttctgcacctataccctctggtgttgctttttaaccttcctggaatccattttct

SEQ ID NO: 11404 - DNA, 1045 bp, Homo sapiens
gaaggtttatatgaaaccaaaagtactacaatagtaatagaaagctcatcttctgtttattaattatagataaatttgagttgttggtatagaaaggtctcagttaatgagttctctcaccaatattagctgtattgtaatattttcctcctgtgtgattatactaatatatttctttttattgaaagcttgcaaatacagaagaatacatagatggagctttgtctggacatctgggtgaagttttaataaggtaacaaacagcagtagtatatgtaaggagttactggtgagcattaggaatacctgttctaaatatattagtgcctcaattttggaattacttttttttaaaaaatcactattataatactttacagttagacttcagaagtctttgaaattgttaaacttgtcaaaggtaagttttcaaatgttttggaactggccaaaagatttttctagtgttgatgtttaattttctagctcttagctataatcttttgcagtggcaaccttttgcagtggcctttgttgcgggaacttagttttgaattttagttgggtctggctgttttgttatattgattttctgtactagcttcaaagctccaaattctggtaattatttcctttggaaaatcataaagatgtcattttataacaaccatatggtggaaaataagtgccatgtgcttttcaacaaatctatgtgaaacttttttttaaaatgaatatatttaaaaaatttttttaaagacaagaatattataaatatagtattcagtattttcataataaaaatatagtaattcatatcatacatggtttctggttggaacaacaaaatcgactttttctatttacaggtgtaataatgtcctttatatcagaggtgtggaagaagaggaagaagatggggaaatgagagaatagcatcttttgtgggggattttttttatatatatttctagacaataaagatttgtttgtttttcaacttgacttgtgaactatttgtattcagatatttacaagcaaagct

SEQ ID NO: 11405 - DNA, 1042 bp, Homo sapiens
agatgagggtattaaaaaagggatggggaagaaaaaaggaagaagagggtgaggaaaaggagacagagcagaagaggaggcaagtgcgggaaaaagggaaagggagaaggaatagaagaaagatgacaggaggctgagtgaaagtcattttctccccacattttaattattttatatttcctacatttttaagataaagtatgtgttaccttaaacatttttttaaaaaattacttgggcatttgcacacccatgttcctcattattcacgatagccaagacatggaagcaagaatgtccatcaatggataaatggattaagtcaatgtagtatacacatactatggaatattattcagcttcaaaaggaaagaaattgaccgggtgcggtggctcacacctgtaatcccagcactttgggaggccgaggtgggtggatcatgaggtcaggagttcaagaccagcctgagcaagagggtgaaaccccgactctactagaaatacaaaaattagccagtcatggtggtcggtgcctgtaatcccagctacttgggaggctgaggcagagaattgcttgaactcaggaggcggaggtttcagtgagctgagatcgtgccactgcacttcagcctgggcaacaagagtgaaactccatttcaaaaaaaaaaaaaggaaacaaatcctgtcatatgctataacatagatgaaccttggatacagtatgctaagtgaaataagccaggcacaaaaagacaaatactgagtgattccacttacatgaggtatctaaaatagtaaaacttttagaaacagaatgtagaatggcagttgccaggggctatgggagggagaaaagaggagttgtttaatgagtatagagtttctattttgcaaaatcagaaagttctagagatctattgcttacagttgacactactgtaatgcacacttaaaatggctaaaatggtaaattttttacatgtttatttgtcacaattttttaaaaagatgacttggataaggtgtgtaatatacaacaatg

SEQ ID NO: 11406 - DNA, 1049 bp, Homo sapiens
ctcagttgaaccacctgccttggcctcccaaactgctgggattacaggtgtaagccaccaccccgcctgagcagctttatgttctatgttattaacacttaaaaggcctttgaataaaagtacccttgagtgtttaaggagagccaggagggagacaggactccaggtccagccagcagcagcgcccagccaagaaggcagggagaaaaatgctgcgaacgtccagtcgaatcctcccgggttggggtgtcctgccaggccagcaagccagcacttctcactagcaccctcagggtgccacgtgtactcaggcagcagggatgaagagcgcctcaacttcaggctggccaaatttggtgagatagttcacgctgcagtttaccggtgccagaaagcaaagaaacctcaacccaaaccacaagaaaacctctcccgggagccgacagagttggcctgttcagagacagagttccagcctttgttggcagcacgtcattcttagaagtctggaatgggtgtgagtgggtgtgtacgtgtgtgtgtgtgcacactccaaagttcggctttgcacaagggacagcctaggctccaccttacccggtgcctgtaccatcgcagtgggaagggctagttgcaccccagtggcggccccaggctgtgcctcctctgcctcgctgaacagagacaattttaagaaaggggtgtattagtttcccagggctgctgtaacaaatgaccccaaacttggtggctcaaaacaatagaaatgtattctctgaaggttttggaagacagaagtgtgtaatccaggtatctgcagggccccgctccctctgaaggccctagggaaaaatccccccttcctcttctggcttcttgtgggctccagccacccttggtgttccttgacttgcagctgcctcactccagtctctgcctccacgtcccatgaccaccttccctgtgtgtgtctttctgtgtcttcatgaggacagaagccattgatttcagtgcctacctcaaatccaggatgattctgtctcgacatc

SEQ ID NO: 11407 - DNA, 1009 bp, Homo sapiens
cagcgttgcggacgcaggggctggctgaagggcccaggagagacaaagtttaagaagtggagactcgtcgctcttaacaatccttaattcctgggagctgttatatcttggcttcctgctcaggtcaaaataaaaatctacacagaaatgtttcataactcaccatttgttatttgaccagaaaagaaagatggtaacataagcaggaaagaaccttaaaaagagttcgcagtttgcagtaataacatggtgatagaactcccaaaaaggcaaacagttgcgcagaatgaatagcaaaattaagaaaaagtcactgtaatcctaatagcaatataagaaggaattaaagtgcacatgttcacaggatgacatacttcattgtatcaagagctagcttcatgaacctgagctacctcgaagttattcctttttctccatatacaaatttatatactcataacatggaaagttgtgaaacccttgagcgagccaaaaatttatacatgaatacaaaatacgaaaattagctgggcatggtggcacatgcctgtactcccagctactcaggaggctgaggcaggagaattgcttgaacccgggaggcagaggttgcagtgagctgggatcgcgccactacactccagcctgggcgacagagcaagactccttctcaaaaaataataataataaataaataaaataaaatattttttatttatgcatataacaactatttattgagcacatactgtatatcaagtgctgttcaaggaactaggaaaacatcaagttaacaaaacatataagaatccatgtccttatagagcatatgtttttgtgggtataaacaaccactaaacaaatatgtaagtaaataatcttacaaggagatgactgctagggagaaaaatagaacagggaatggtgttggaggatatgagatgaatgttgcaattttatcttttttttttgagacagggtctcactcttgcacaggctgttgtgcagt

SEQ ID NO: 11408 - DNA, 1033 bp, Homo sapiens
ccaggtgaaagaccagcctggccaacgtagtgaaaccccatctctactaagaatacaaaaattggccgggtgtggtggcgtgtgcctataatcacagctacttgggaggctgaggcaggagaattgcttgaacccggggagcagaggttatagtgagccgagatcatgccacttccctccagcctgggcaacagagcaagactccatctcaaaaaaaaaaaaaaaaaaagaacaaaggaaataaacttccagaaataccctgagatcataaagattcagtctgtgttccatctgataccatttactctctgagtctggcttttgcagcaggaatttgtgagccatgccaagatcttgaactgtcaaaggacttagttacagtcagaacattttagtgctggaaaggtgaaaggcacctttttgaaatacagagggcccttgtcattcttgagggcagtctcctgaggccttcctcagttccccagttccccgttactggcatgtttatacaggctcctggcttacatcctcatcacatgttttttggacaggcatgtgtttcctgtgcatatttttacttggtgactatttttttttcctgcaaagaaacacttagacagttttatttttaaagatgaagagtagaggccaggaatggtggctcacgcttctcatcacagcactttgggaagccagattacttgaggtcaggagttcgagaccagcctggccaacatggcaagacccctgtctctactaaaaatacaaaaattagctgagcgtggtggcgagcgcctgtaatcccagctacttgagagcctgaggcacgggaatcacttgaacccgggaggtggaggtcaccgtgagctgagattgcaccactgtactccagcctgggtgacagagcgagactcttatctcaaaaaaaaaaaaaaaaaagaaatgaaaaagatgaagagtagaggtcaacaaagcctcgttgagataagtctgctgagcttgagctgttattagtcgagtggtttcttcccca

SEQ ID NO: 11409 - DNA, 1054 bp, Homo sapiens
acattatttacctaatagataatctatgaattagaaagcttatatttataattctaatttatgcattaattgtaggtcagtgaagctgtgctggcaattaacttacttattggaaagaagaatactagaatgcataaagttaaccaagtggcattaccaaatatcccagaatttgctgctctggatcttttgtcttcgtatacagattatttgcttggtatgtttggatgtctacatattatgcaaaaaaactgatatatgtaatatagaatcaagtttcaaagatttaattgtaatttgttggcttttagcttagatgggataatgtttgggggcacttccaggggatcataggggtcctagggccaaaatagagggctcttagctcactgcacatgtgtacctgttactcagtcagctgctgcatttcagatgcatgttcttttaaaaaaatgatattttacatctgtttcttttccagttcacacatatcaaatgggaccttttgggactgtttgcctctctgatcctttcatccaaaatctacatgcactctcccactctgatatgcctccctcttcttttccttagtgattttatatttgtatatatgtttgattatgtgtttaagctctttctctcattaaattatcatcagctacctgagagcagggtcttcatatattcaattttcatctacagcaaattgcacagtgcttgcacatagcagacattcaatatcaacatttgttaaatgaattaatgaaagaaattagcaaaatttaaactggactgcaatactgtttatgtttttgcttagttactcctttgatagtaaactataatataaacctctatatcagataactggtaacaggcatttaacattcatttatgtgtttttccattatttcactcaaaaaatatttattgagtgcttcttgtgtgctaagcacttggataggtgctaagaagcaagacactagtcttacttccagactgacatttcactaacatccacctctaattttgcttggtgctaggccagcattga

SEQ ID NO: 11410 - DNA, 1030 bp, Homo sapiens
gctagttcttccctgcagtagtagcaaagagaattagtcttagtaattattaatagtaatgtgagccatttttgaaagctactctgtaagctatactcattgcttgtcttcttagtgtgttagcttttataatcgcaattcttataatagtctagtgctatagatgttcatggattgtttgatgctccataactcctcatttagataactttttagtaacagcatcttccagtggcgacaaaatagttgtctcaagttgcaaatgtaaacctgttccacttttagagcttgctgaaggggtaagtgattttttttttttttaaacttttaaaaatcttagttttgcttgactggcaattgcttattgtggtgcttgcgactaaatataaaggtttttaaaagcattatttttaacttaagctcaaaataatatagtaacacttaaaaatgagatatgtgtacttactaaagtatttttaggtaaaatagttttgaatataggggaacaattgaagacttgaattttgttgactaggcacttcatttctccattttccctcagtgggagaggatctctgttgctgctattttaggacgatatcccacataggttactaggttgacctgagcatataaactctaatgacacagcactgctttactgatcttgggctcaggaccatcaggaacagactcacagctgatggtagctctctgcttcagattctgtccacctgtactgaggggcctgtctgagcctcccccatactctccttaaacaggttggctttgtcaaaatgagcttaggtcccagggcgtttaaatgaagctctcactacgtactgttgccttatccttttttttttttcttttgagatggagtctcgctctgttgcccaggctggagtgcaatggtgcaatcttagctcactgcaacctccgcctccccagttcaagcgattctcctgcctcagcctctcaagtggcagggattacaggtgcccaccaccacgcctggctaatttttgta

SEQ ID NO: 11411 - DNA, 1030 bp, Homo sapiens
gcatagaatgtctctggtcgataaaggcagactgaagtcttcaagagcaggcaaaacatcttaaccatctttggatctttgtatcctaagatgttcaaaaaacttgttaatgtcaacatcaaaacaatttcaacttctactctaccactatatatatgtactactgttatgcattatgccttaggatcagtgaatcagtatttgggagctttttttttaaagtataaaaataacagatggtatttacaagtgtgacataattctaagagttttgtgaatattccaaattagttgctatgattcttagccctctttcccatagttaacaaattgtatcataatgctgttggataaaagtaagattagttgagttcaaattttcaatctattttaatttagttatgaaaatatttggaaacattggttttttagcttttactagtaatgtttacagaaacatattaatgtgctaataacctttttgtaacttccaagtcctcttactcgtgtattatttgaggcattagaccttttctacttgagaaaataaattatgatcttactgattttaaaattttagagtagaactttaagttcatatttattttctttgattttgtatttcacctctttaaagtagaatgtacctttgccttgcaccttgagcagttcaggattcctgtaataaccacacaatttccattaattatttaagttcattagttgcattaataatacattatcataaaaaagacctatcaacagggttagccagctctaaatataatttttattttgagcccttaagagtaattgtagttgttgtgatgattggagtcccaatatattgatcttcaatggacaccatctttttctattttatttaaaggctgttttgatagttcttagcaaactgtcctgatttgcagtgacaaccagattctaaagcttcttagtctccctcaactaaagtcaattcctagaatggtatctgcaggagaattacagcaactatactgaaacattgatg

SEQ ID NO: 11412 - DNA, 1943 bp, Homo sapiens
gacagggtctcagtatgttgtccaggcaggtctttaactcctggcctcaagtgatcctcctgcctcagtctcccaaagtgctgggattacaggcatgagccaccacacccagctgggagagggatgttttacatggaggaaatcacattaacaaaaataaggagaaagaaaattgcatgggctttatataggaccaatgtgagaaaagattggaaaagggtaaatatgaatatagtattgatgtaagactgaatgtcacacaaaagacttgttttgggaggtatttagggaaattaatcagagtttttaattagttgaatgtcagaatcatagaatccttgaacattaaaaatagcctttagaggtaatctcgctttctgcattttatggatgaagataaatgatttgccaaagggatgctctttagaatgtgctaatattgtcataaaagcaggaacttattatattttgttttggtgatttcttttttatttatattttgataaagagagacataaagtctaagcctataaactttggaactattgtgaaaaaaatcattaatgttcaaatatcttttttaaggacatagagtaactttctttttttgtgtgtgttagaagcatgacaaatttataaattttggactgacttttcaataccataaaaattagaccagatactactatgtatattcttatacttcaatttttatgcttattgtatcttgctagagagttttcttattaaaatcagacatgaaggaatattcctgaaaacattaggtttgactataccttttggcctaattttgtgtaaaagatttaaattttttaaaacaattgaggtgtaacttacaataaagtgcagtgcatatatcttaagtgtacagcttgttgaatttttatgtatacgtaaatacattggtgtaactactaacaaaatcaagatatagaacattgccagcacaccagaggacttgattttgtcttttccagtcactacctcatattttatgaaaggaatcatatgtgggccagacgcggtggctacctgtaatctcagcactttgggaggctgaggcaggcagatcccttgagcccaggagttcaagaccaccttgggcaatgtggcaaaacctcatctctattaaaaatataaagaaattcaccaggcatggtggtgcatgccagtagtcccagctgcttgggaggctgaggcaggatgatcacttgagcctgggaggttgaggctgcagtgagttctgattgtgccactgcactccagcctcagtgacagagtgagaccctgtctcaaaagaaaaaaaaaagcaaggaatcatatgtgtctggtttcttttagtcatcattacatttgctttgttgcatggaatagtagttcatactgtattaattctgtgtagtgtttccttatatgaatgggccaccatttatccattcttttgttgatgagcagtgaattgtcttgttttagctgttacaaggtagctactgtgaatatttttgtacaagtctttttttaagatacatgtttttatttattttgagtaaatacttaggagtggaattgcaggattgtagcataggcatacagttttactttatgaaaaattgccaaaacattttctaaagtgaaatccagctggctgtgagatccagttgctccacatttttgctaatacttggcattatctgtcttatttttgccactttgatggttatgtagtgctgtctcatggtggttttaatttgcatttgtccatgttgaatgatgttaagtatatttttatatgcctcttgtgaagtgactgttcaagtctgttgcccatttttatgttgggttattcgtgtttttaaaatttatttataatttcttatgtattgcaggtagattcattttggggatatgcatgttgcaaatat

SEQ ID NO: 11413 - DNA, 1065 bp, Homo sapiens
catttgggatcagtagaatagaacactgttgacaatatgatgaggaaattttgtttgttcgtgtaatagcagccaaaataaagtacacctgaacacagctgaatgcagcaaaccccgtcagcatccatctctttttattcacttcctcttggcttggctgtgtggtctgttagaagtacttattttgtgattatttcccatctttgggcattttgctcttgcctctgtaacttgatagccgcaatccttctatcctcttccattaagtgaccatcacttcttcacagtaagggtattattcaataattatctattagatttttactatgtctttttaactatgttagtatttttattaggatttaattgtttttgttgtgctctggttacaaagttgcataggtttttgagtgctttgccctaatcctttttccctaagttctgttatttttaatacacagtgttaaagaatatacgtttttttcaggagtgcataaatatttatggcataatagtagaactgtctggatacagctgactataatacagtgtgagcaaagtgatgttgaaatcacagaaagggagcagttcttctgtgggggcagatttagaaaggtacactgaagagattttattttatactgatgtgtgtgggaacagcttgagcagagacatgatcatacattctaggaatgtttgcagagagaaggcaccgtggtaagagaccaggcctgagggacagttgtgaaggtcttaacacacaggtaatggagagccatcagagtttttaagcacaggagtaatgggtgctgtctatttattacccatttattcaacaagcatttgggtgtcagttcaccactggcttcagatgatttgaggacagtgggctcagggcctttccttcagcagacccagggatctgagtgctggagcaactctgaaatcgctgtgcatttctgccctgctgccagctttcggggtggctggagcttgtttttcactatctaacctgttcctggctttctgtgcctcaggagaagtgtgtctgtcccactttcagcc

SEQ ID NO: 11414 - DNA, 1057 bp, Homo sapiens
tgtattatatacttaaaaatttgttaatagggtagatcacatgttaactgttttaccacaataaaatttaaaaagaaaagtaatcataaattaatattattgaatttgcaatataaaacaggaaattgtcatcaataacataaaaagggatgcagagatataaagaagtaagagtttttatatatgattgaagttatcaggttaaaatacatttttataactttaagatgttttatgtaaccagtgtaataataattaacaaaatagcaattgtaagtcttcttctgttaataattactttaaatgtaaatggatcaaatgtatcagttaaaagaaatagtttgcaactacttgggaggctgaggcaggaggatcacttgagcccaagagttcaaggctacagtgtgccatggtcttgcctatgaataaccactacactccagcctgggtgacatagtgagactcccctctctcaagaaaaagcaccccaaaacaacccccaaaacaatagtttggttgaatgcatgaacaagatctttatactgtctacaaggggctccttttagatctaaggacatgcagaccaaaagtaaaagagtgaaaagatattccatgcaaatggaaatctaaaggagagcagggacagccatacttatatcagacaaaacagactttgagacaaaaactgtaacgagataaaaaaggatattatataataataaaaggttaaagtcacccaaatgatataacaattatacatgcacctaacagaacaaccagatatatgaagcaaacattgatagaactgaaggggaaattaacaacaacaacaacaacaacaacaacaacaacaaaaacaagaccaaggaactttaatacttcactttcagttatgaatagaacaattagacaaaagatcaataaaggagcaggacttgaacaacactatagaccaattggacgtgacagatatatatacagaacgctccacctaacaacagaagaatacatacttttttctagtgcacatgaaacactctccaagatagatcacata

SEQ ID NO: 11415 - DNA, 1033 bp, Homo sapiens
aaagacttatgaattgtttgaagaggcacgagaccgtggcaaccctaactgtccccgacatctggcagccatatgctatccttgaacttgaacttcagagtgaaagtataaatttgtaaggggaaggctcagccgcaagtcacataccagtggtcagttaaaaaaaaaaaactcaggacggcaacctaaatcatttagaacgcgtcaagagcctcggaaaaactattttcacacacttctctagcactaacatgggaagcgcgtttccttcacatattccacaccttttattcttcccaccaacatcaagaatacaaagcgcccagagaggacaataagcctaagcagcggctccaagagaccggactttcgtacttcccgggggcaggcggaaggttacggagcgctggaaggatcttactgctccttgaagggctgtctgagaaaatacacagcctaacgactcctcgttagtatagtggttagtatccccgcctgtcacgcgggagaccggggttcaattccccgacggggaggtgtgtagctgcacttttttggcgacagttattattttctgtatcattcaatgacaggacactgctgttaaacataatatgctaaaccagctcccttaagtgcacaaccctgtcttcaaaatggtgacttttaaccttaatgcccaccatgaagtgaaagcctcccctgagagaaaatgccttacattgtttgcaggaagggaggaaagggaaaaagaaaacgctctgaaggcctctgcccttgcctccagccgccatcttgcgaaggcctgcgccggcttagtggcgccccgccagattacaactcgaggtcgcgaactcagcgcgcggaacctgttgggggaggggagagagggcggagtctcgcgactaacggggcgggggcagggcgggtaagaacggaaatcatttggtaaagaaaaggaagggccaatttcctttgatcctggagacccgactaaacgggaagccccgttctcccgcttccgctggttacg

SEQ ID NO: 11416 - DNA, 1050 bp, Homo sapiens
taccaatatttttaggtgttgaaactacctagattgtggacacaaaaataaacatttacagagttggcagtctgcctttttgttttaagaggcagagcctgaaggtgtagctatttggatctagtggagcataatattcttgaatgatctgttctggtgaattatgagtgtgtgtttgagaaggagtcttgcgctgtcatccaggctggagtgcagtggcgcgatctcggctcactgcaacctccacctcccgggttcaagtgattctcctgcctcagcctcctgaggagctgggattacaagcgtgcaccaccatgcccagctaatttttttatttttagtagagacagtttcaccatgttggtcaggccggtctcaaactccttcctgactttgtgatctgccccccttagcctcctaaagtactgggattacaggcgtgagccaccacgcctgtctgtgtgtttgtttgtttttttaagagatagggtctcgctctgtccctcagactgtagtgcagtggtatgatcatagctcactgcagcctcaaactcctgggctcaagcctctggaatagctgggactacaggtgtgtgccaccatgcctagctgatttttaaaatttttatagagatagtctcactatgttgaccaggctggtcttgaattcctggcctcaagggatcctcctgcttaggcctcccaaagcgttgggattgtaggtgtgagctgctgctcctggccaaattatgaattctcaataggaaatatttgaagacctggaaaagaacataaaagcatgctaccaataggaaatgttaattaaatcacaaatttaccaccactgtataataaggtgttaagtttacagacttgtgaataatagagttatagattcaaattccaggtctgccacttattcatatgacactgaacagtgtcttaatctaagatcctctattttcacctgaaatagaggaataacctaatagctacttaatcagattgaggagtacatgccattgcatatgtgaagtgtctagtgcttag

SEQ ID NO: 11417 - DNA, 1307 bp, Homo sapiens
catcagccaccacgtcctttttttttttttttttttttttaagacagcatcttacttcctctcccagctggacagtggtgcgatctcagctcactgcaacctctgccttccaatttcaagtgattctcctgtctcagcctcccaagtagctgggatcacaggcgtgtgccaccatgcccggctaatttttgtatttttagtagagatagtttccctgtgttggccaggctggtctcgaactcctgacctcaagtaatgtacccgcctcagcctcccaaagtggtgggtttacagtcgtgagccactatgtctggccgcattatatggtatttttttttttaagaacttgagtttagaaaaataaagggtgaaaatagcttaaaatgttgctgaagatagtgtctgagctgcatcctaaatgaaacaatacaggtactaaagcaagttctgccttaatccaggaacaaccaggaagctatatgagaaaaagcttttgaaactgagggaacaaggaacagaatcaagatcttctactcctctgccaacaatttcttcttcagcagaaaatacaaggcagaatggaagtaatgattctgacagatacagtgacaatgaagaaggtaaaattttaaatgatgttaatcaaatgtatggaattttttcacactcaaaattcagtgaccatgaagaaagtaaaatttaaaacaatattggcaagatacacaaattttattcgtgtcattagagtaattctgtaatttgatttaaatactttttattgaaaattctaagaagcaacatagtacaaattcataattttccatcacctgaaattgcaagttaactttgtcttttttgctacaaatctcatttttctgagagaataaagtattacaagtaaaggcaaagtttctcgtacttacctgtacctatcacctccacagaagtaactactattattaattcaatgcctgtctttcaagttttatatttcacatacacatctgtctaatacatggtattattttatactttaagaataaaaaatttatataaacagtatgctaaatcttatcacttgctttttcttactccattatttttgaaatctaatcctgttaattacatatctgtttattcttcataattaatacatagtggtagcatttaaatatggcatattttctctgttctctattgataggcatttaaattgttcgcagtttttgttaatctgacctcagggcaactttaaagcaaatattttgactatatttttagtagactgtatagtatcttaaaatttg

SEQ ID NO: 11418 - DNA, 1051 bp, Homo sapiens
ctaaagcaatgtattgatttacactctgatgcaagtaatttatctcttcattgactggtagcaaccaattcatggaccagtaccatggaccacactttgagaaacacttctttggataataatagatatcctgggatagtgcatgttcaccatctattttgtcagataatggggccttttaaaaaataatactttgctttcatgatatattgtattttgtggaaagttaagtttagcaatatagactctaaaagcaaattaaatttttttaagccataagaaattatactatatcccagtatctgtatgtctgtataaagcagtgtattatcatgttttcatttctgtgattgtaagttaagagtcttaactgcagaggtattgtggaaagtagtagccttaagcataataaaatatggtctcttgggtactccctctggccattaccacattcttagattatatgtgtccatctttgcagctttctgagagtaattttatttgttgtcttctgaaatgtacatgtatacatgtacctactgagtgctatgtgatttttaaaaatgtattactgtagaatgcttctgcaaattcaataaagttgttaaatttgaacagtgttgtgtggtctccagaaacatgttgttctgtgtgctttattcttggagttgcaacaagttaaatatttgtatatgaacaccccttttccatttcatcattgaaactcactttgacatttcagtggtataattgaaaatattctgattatggtatggtttttcttctgtttgaggaccatgtttttattgactgttggaatctaaatttataagaggaattaatctgtaaccagataccttattcgtttaaccgatttctattccactactaatggttttttttactttgtgctttctagttcttagattctgagttaacaaagcataaaatagattttatattgctgggggttgtaccaaacatagatacattgacagatccattgatagaagtgttgggagatggacttgaaatcttagtcctaaataaa

SEQ ID NO: 11419 - DNA, 1204 bp, Homo sapiens
tcatttattgagtgtttcagagagtaatggtttctccaatgttatttccagactctaaaatagagctcaagcttgagaagagagaaccactaaagggcagagcaaagactccagtaacactcaagcaaagaagagttgagcacaatcaggtatctttagttttattaccaccgtgtacaggtataaataacctcctgacaacactaatccatgttttagcctttaatggttgacacccagattccagcacgctcaataaacttaattctgttgttaaatgatactaaaaatctaaactttgtgggttttgtcagtagtgtagcctgtgattacagcaaaagcaaatttttaatgtctcatttgtgtttgagtctgtgctagatgtagttcaaagccagttatatggtgttttgaaagaaatattttaaaaggtggaaatatctagacacttttgatacaatttctttaaaaggcaatggaagggttttatatttgtgtctttgtctctagatttctgactttgattttatgtttgcctgtcttgtcttctgcgattctttcctaaactcagaagctagtctggtcctaagactacagttttctttccttatttcagatgaaaatttaccttttctattgtgggagaggcgtttcagtttttcaaaagggaaatgtaggaaactaaggagaaaataagcataggtataaatgaacagagaacaaattattgactaacctagtattgtttacagagaacaaattattgactaacctagtattgtttacagagaacaaattattgactaatgcagcattgatttggctgatgctttataagacagctattcctagagtcattttccttacccctgctatgtctagctggatgatttgtctagttggttatcttttccatctcctatttgtcactttgtgtgtttgtttgtgacggagttttgctcttgtcacccgggctggagtgcagtggcgtgatcccatctcattgcaacctccaccctgctgggctcaagcgattctcctgcctcagcctcccaagtagctgggattacaggcacatgccaccacgctcagctaatttttgtatttttagtagagacggggtttcaccgtgttggccaggctggtctcaaactcctgacctcaggtgatccacctgcattggcctccgaaagtgctgggatta

SEQ ID NO: 11420 - DNA, 1011 bp, Homo sapiens
gcctcccagattgctgggattacaggcatgagctaccgcacctggcaataaattgcttttgattttttttattttgctttttcctggagtatattaaagcagtctttgacatagtgtttcacacattaaaaagtcagcattttagcatatatctctgaaagataagtgctattccagtgacaatgccaatatcacacctaataaaattaataatttatttgtatctaattcatgtttaaatttctctagtttcagaaatgtttcgtttatgattatgttgttcaaatcaggatccagacaggatccacatatccggtttgatttttggttgttttactctctcaagtctgtagctgttaccactgtaactttttctcttccctccatttatttggtgaagaaaccaggtcattacagaatttcccaacattctggatttgttaggttgcttctttatgtcatttaattagcttctctatacgctgcattttctgtagagtgggttagatctgtagtgaggctatgcagtagacctttctgtgatagaaatttttcatacctgtgctatccgttacagtagccactagctattgaatacttcgatggtgactagtgaggctgagaaactctgttttgctttgttgttgttgttgtttttgtttttgtttgtttgttttttgagatggagtttcattctttttgccaaggttggtgtgatctcagctccccacaacctctgcctcccaagttcaagcgattctcctgcctcagcctcctgagtagctgggattacaggcatgtgccaccacgcccggctaattttgtatttttagtagagacggggtttctccgtgttggtcaggcaggtctcgaactcccgacctcaggtgatccacccgcctcagcctcccaaaatgctgggattacaggcgtgagccactgcgcctggcggaaactatgttttaattttaatttaaattaaatttcaatgaccatatgtggctagtggcc

SEQ ID NO: 11421 - DNA, 1042 bp, Homo sapiens
ttttagttcaaataagctatatgtgggattataatttaaactgattctactaaaatgattataaccatatgaaaataataatgtttatgctaacaattacaaaagtttgtatttttgttttaaaaggaaactgacttataatagatgacttttttctaagtcatgatcagtctgctttttgtttagacagagatgtagctccaatactagagccaaatagcacacagtgagtcaaaaagggaactggtgatagttgatgtgctttttttcccataatgtttataatttgtgagctactataggtggattctttagtgtattttagcactttttaagtgtttcctgatgcctaaatatcagttcaattaatacatttaggaatattttgaggacatagccttgtttgtaaatgctggcatttggagacttctatttcatggcttctcagtgtgccagtatggccgttattaaagtatttgatgttagaatatgactttttaatgtgttgatgcttgaatagagctattctcaagctggaataactgagactgaatggacaagtggatcttcaaaaggcggacctctgcaggcattaactagggaatctacaagagggtcaagaagaactccaaggaaaagggtgatgcaaggcttattccttgggttttcagatttgtagggttttagtattattttatatttattgtttttgttttgttttcaaactaacaggtggaaacttcagaacattttcgtatagatggtccagtaatttcagagagtactcccatagctgaaactataatggcttcaagcaacgaatccttagtaaatatgtttcataaactatacaagtggtattctttgtaaattaccctttaattggaaatggggaggtggtgaattttggcaaatctcaaatttacatgttttttttttttaacaattttaaactgattttccccatatagttctgaattttagaattttcctataatatccaatttatgtaaagaaatctaattcattgtacaagaaagta

SEQ ID NO: 11422 - DNA, 1383 bp, Homo sapiens
gcatcgaactttttttttttttttgagacggagttttgctctgttgcccaggctggagtacagtggcgtgatctcggctcactacaacctccacctcctgggttcaagcgattctcctgcctcagcctcctgagtagctgggattacaggcacccaccatcatgcccggctaatttttgtatttttgtagagacagagtttcaccatgttggccaggctagtcttgaactcctgacctcaggtgatctgcccgccttggcctcccaaagtgctgggattgcaggcgcgagccaccatgcccagcccatctaacttttaaaatagaaaatatgtagaagttttaaataggttgactgacctcactgctttatatgtatcaattttctactgttacctcagggaatgtgcttggaattaggagtggcaatgacattttatgttatttctctaaatcatgcctttatctaaaattatttttcttttcctcctttcactcccaacagtgctagttgccgcagaccaatcaaaggggctgcaggccggccattagaactcagtgatttcaggatggaggagtctttttcatctaaatatgttcctaagtatgttcccttggcagatgtcaagtcagaaaagacaaaaaagggacgctccattcccgtatggataaaaattttgctgtttgttgttgtggcagtttttttgtttttggtctatcaagctatggaaaccaaccaagtaaatcccttctctaattttcttcatgttgaccctagaaaatccaactgaatggtatctctttggcacgttcaacttggtctcctattttcaataactgttgaaaaacatttgtgtacacttgttgactccaagaactaaaaataatgtgatttcgcctcaataaatgtagtatttcattgaaaagcaaacaaaatatatataaatggacttcattaaaatgtttttgaactttggactagtaggagatcactttgtgccatatgaataatcttttttagctctggaactttttgtaggctttatttttttaatgtgggcatcttatttcatttttgaaaaaatgtatatgttttttgtgtatttgggaaacgaagggtgaaacatggtagtataatgtgaagctacacatttaaatacttagaattcttacagaaaagattttaagaattattctctgctgaataaaaactgcaaatatgtgaaacataatgaaattcagtaagaggaaaagtaacttggttgtactttttgtaactgcaacaaagtttgatggtgtttatgaggaaaagtacagcaataatctcttctgtaacctttattaatagtaatgttgttgtagccctatcatactcactttttaag

SEQ ID NO: 11423 - DNA, 1919 bp, Homo sapiens
gcctgtaatcccagcactttgggaggccagggcgggtggatcacgaggtcaagagatcaagaccatcctggccaacatggtgaaaccccgtctctactaaaaatacaaaaaaattagctgggcgtgatgatgtgcgcctgtagtcctgtctactagggagactgaggcaggagaatcgtttgaacccaggaggcagaggttgcagtgagcagagattacgtcactgcactgtagcctggcgacagagcaagactccatctcaaaaaaaataaaaaagtacaaaaagtacttgcttttatattacatcataagcagtagttaataaagttgtatactcttaagaggtgggcattatgattattttttatttttttattttttatgagatggagtctcactcttgtcacccagactgtagtgcagtggcacgatctgggctcgatgcaacctctgcctcccaggttcaagcaattttcctgcctcggcagagacggggtttcaccatgttggccaggctggtctcgaacccctgacctcaagtgatcagcccacctcagcttcccaaagtgctgggattacaggtgtgatccactgcacccggccggcattatgattttgtgtactcttgaaatggttatctttgtggatgatttttttttttaagctgaaacttacctcatgaataacttgattaaagtagtaggtgattaaaatttcaatagaatcaaatgagacaaaaattttaaactgactcatttgagtttcaactttacagtcattgaccataaagcacactaaaaatgtaagttatttttaaatacatctgaaataaaaatacttactaaaaaggaagaagccgaagatgtatatttagaccagcacacaattttgatttcaattagccttattctaatatttagcttttagatctttcatacacattttcacgtactttgcaattgagaccagaaagacttgtaggtctttctgcagaatgagtgggtccttgcaaagtgagtgggaaacttactcctagatcagaaatgtttgcctctctgagtaaaatgtttctttcagatgagccatagagggggcaccttttactcaacttttctttgttttgaaactttgtttcccatactgttttcagccttttgtttataattagaaattgtgagaagcttcatttagtgtttaaaaatgtggggagataaatcagacttaacatgtatgtaagatcaattcacttaaaagtatggtccaaatagcaaaaataggaccaggtgaaacatgtagtcattttttaaaaacatgtacttggtcttttgtgtgtgtctgttttattccattagaataaatgtgtccttgatgtaaatgcaaagcatttcttcctgattaaattgtagatgtagactttacaatataattcaataataaaaagtaattaacctctagttttgtcgttgcaataaatggttttcagatagcacaaactgtgatttctggataacatttcttatgtgatatttatggattattgtgttttatttcagtctgttcatatgttttacttcttattgtaatcgggttctcgtttattcaaaggtaagcaatgtgtagctactgtactcacagaatgacattaagcgctccaaggcacctctcccacacctagttcctttttcccaccacttttactgtctttagtatttacctatgacccttatgattgttagtcttgctttgagactaagcccgtgtcactgtgatacgtcatggagctgtgctcacaagatgaaagtgccattatgtcttcctcattcatgtgtccccagaggtgatttgacttaaattagtgtttctcaaggtagtatagacaccataattaattataaggcaaatcgcatcaaaggcttaaa

SEQ ID NO: 11424 - DNA, 1046 bp, Homo sapiens
ttgaactcctgacctcaagtgatcctcccaaagtgctgggattacaggcgtgagccaccacccctggcctaatttgtttttgtttgttttttttttatcttccaggcagctttttgaagtatcttttgctatctcactctacctctttgtcattgtgttaaacccttttttattcccttatcagtattcaagtctcagtagaaataggctgtaagcatgtggtcagcctgtcaccttgaattgatggtcactgagagcttttcgggattcacatatcctttccaccaaagatttggggagaaagtagaggagcagacatagggtttgagtgcaaggggtctccatgtgttttgttaagttctcctaattatggaatcattagttgaatcgacaacatttatactatatttacagtgtttttaaatggattgaaatttattagttaccaaattttgccacttaatgcaacagacatttgatactttctctgtggtgaataacaatgtgtagttgacggtgcttgggtgcagttttagaattttctgtgaacttgaggcactctttggggaagttgttttttttaaaagcatctgacgctgggtgtggtagctcatgcctgtaatcccagcactttgggaagccgagatgggtgggtcacctgaggtcaggagtttcaagaccagcctggccaacatggcgaaaccttgtctactaaaagtacaaaattagctgggggtagtggtgcacccctgcagccccagctactcaggagactgaggcgggagaatcgcttgaacctgggaagtggaggttgcagtgagccgagatcgtgccattgcactctagtctgggtgacgagcaaaactctgtcccaaaaataataacgggctgggcacgttggctcacgcctgtaattccagcacttggggaggccgagacgcggagcacctgaggtcaggagtttgagaccagcctgaccaatatgatgaaaccccacctctactaaaaatacaaaaattaggcgggcatggtggcatgtgcctgta

SEQ ID NO: 11425 - DNA, 1024 bp, Homo sapiens
tggcagaaatagataagcttttcctccccccccattagttaatgtaatggatatgaaatgtacctttgctaaaacgtgttatgcatgtctcttgaagtgaatttagtttatgtgctttttttttttaacttgtgtttagtttgtttagtgttcacaaaactttatgctataagctacttaaagaactagcatatgttaggaatacagttatatctattatctagacagtagcttttaaaaagtaggaggtgggccaagcatggtcgcccacacctggaatgccagcattttgggtagccgaagcaggtgggtcacttgaggtcaggagttcgagatcagaactcaatctagccaacatggtgaaacctcatctctgctaaaaatacaaaaattagctgggcatggtggcgtgcctgtagtcgcagctactcgggaggctgaggcaggagaatcgcttgaacctgggaggtggaggttgcagtgagctgagatcacaccatggcactccatcctgggctacagagcaagactcaaaaaacaaacaaacaaaaaacacaaaaaaagtagtaggagttgggtggtaagaaatctgttaagaatcagttttgttacgtatttttgttgaaattttaccctcttaactatcactccaagacttaagtttgacacagaaagcttttgttgaaattttaccctcttaactatcactccaagacttaggtttgacacagaaagctagaccttaatgtacaacagtttctatttataaaagtaatcaaatgaacaataataaacagtgataagcataaactaataaaagttatatgaatgtagttcctcactcaaaatatcttaatattttcagatgtcagttgaccttggataactgaagccacagaaaatgaactcttggataagggagagctactgtatttctttttttttttttgagatggagtcttgctctgctgcccaggctggagtgtagtggtgccatcgtggctcactgcaacctccacctccc

SEQ ID NO: 11426 - DNA, 1119 bp, Homo sapiens
tggtctcgaactcctgacctcaggtgatccacccgcctcggcctcccaaagtgctgggattacaggcgtgagacaccgcgtctggctgtgaacttcattttttagtattaagcctaccagactttttaaaaagactattataacatttaatgtctatttacctgtatgtagaacataaacttgagaggtaaagataagttaatacatggtttgagccctggactgagttttttttttttccctagagtaaggaccatttgtcggtctacaaatgacttgatgtttggcctaaacatttactattaacttttagggagggcttgttagtatccttgtgatctattcacagttaagaatttccatgaccacaacatgcttccttagatccacctttgtggatgaatcttgaactgagttccacttgtaaacttcttgtttcttgtggttccagtagtcaaagaaacatccagcaacttttttggttgtatagtcaaaggtgcttgagtcattggcatgtaagagaaatatacctgcatgttagtctaacgttctgatagaaatgacatgcatttatgctgccatttgttactatcaggactcgactcgtgtgcggacatttctgttaataatgacagtctctgatagatgagtgtatgcaactgtgtaaaacaagtctcttgatttcctagattctacaagggggttgctcctctctggatgagacagataccatacaccatgatgaagttcgcctgctttgaacgtactgttgaagcactgtacaagtttgtggttcctaagccccgcagtgaatgttcaaagccagagcagctggttgtaacatttgtagcaggttacataggtacgaattacttagaacacacttgtctgaaattatgaacaaataatcatttccattattggcgttttttgagagggaaaaatactccaaaggttataaagcagtgtttttgtttttttggtttccctgaggcatagtctcgctctgttgcccaggctggagtgcagtggcatgataatagctcactgcaacctcctcctcctgggttcaagtgattcttctgccgcagcctcccaagtagctgggacgggcatgca

SEQ ID NO: 11427 - DNA, 1070 bp, Homo sapiens
ttgataactgtacccgtgtcaccctgagtctgatttttattttagaactagaaaaatattattttaaaatcataaaaatgattattggctctgtgaagttttgtttttaactggcactgtatgggatcctttatcttttttcagctggagtcttttgtgcaattgtttctcaccctgctgattctgtggtatctgtgttgaataaagaaaaaggtagcagtgcttctctggtcctcaagagacttggatttaaaggtaggatgatgtttttttcttgaaagaaagaacaacagttttggatatgttgcatttttttcatttgcttttcctgtttgaaccaggtgtatggaagggactgtttgcccgtatcatcatgattggtaccctgactgcactacagtggtttatctatgactccgtgaaggtctacttcagacttcctcgccctcctccacccgagatgccagagtctctgaagaagaagcttgggttaactcagtagttagatcaaagcaaatgtggactgaatctgcttgttgatcagtgttgaagaaagtgcaaaaggaacttttatatatttgacagtgtaggaaattgtctattcctgatataattactgtagtactcttgcttaaggcaagagtttcagatttactgttgaaataaacccaactcttcatgatttgcctgtgacttatttttaaaacttttttaaaaaagatttagctttaaaatagttggaaagaatgaagtatataagttaaggaaaaaatacaaaactgaccatgaccattgttggttgaatattccagttgctattcagaaattgtcatatgtctcaagttttatcacacaaagttcctgtatttctagggaagcagactttaaatttctaaaaacttgatttaattatagttaaatatgtgtagtcatttgtggttattttggcaagtaaatgtcagtgtatacttacatttttgcagcatgtactacaccttttttatgttggtgagtttgctaatccttatttgtaagacaaggtaaaccaaattaggctgattcttagaatg

SEQ ID NO: 11428 - DNA, 1027 bp, Homo sapiens
aggacatagggaaaaaggaacatttactattttgtagcggtaaacaaggttcctttcctttttgggttgctctactcatatgaaatgtatgcttatttctgtaccttaaacaattttctgttgggttgggtagagcttgccacattttaatggcaaaaaaaacacaaattacttttgcaccaacctaatagtaatttatgtttcaggcatttcagttttcctgtaaaatcatctgggttcatttatacctttattttcagccctattacttatgcctgggaaggtggaaaattgatatcagagaatgatgattttgaagatatggtggtaacaagagaagattacgaagaaaatggacatagcgtctgtgaagagaaatttgatatttaagcaacatttttgaatgaaagttgtgaccataaggtttaatttcaaagttccttttaaaagaggttaaggaactgtgttaccttttgtcctaagaaaaaggcttgaatttatgtaaatactttgatcgattgctaattttcaaaggcttcttaggtaggttactacagtaaactgtaactcagtccacattttcatttaggagctagactaccataacaatgcttatgctgtttccaagggtaggttatttttcattaaaagaagaatgaatgcattttaagtttaattcttcatagctgaaagcacaaatttaacggcttcactggacagttttccttagaaggtagttttgtgtgactgtgactaaactattttattttaaaatgtcattcttatttatacattctaaagttggaaagactgatcttatatgtgtataatgtttattttgtacctagagtacatttaaaagggtggagactaagctaataaagtttttttggccactactgtgtgggcagaatatcttatttcactcataaaagtactattttttttaggatgaatgaaaagagatttgaagttaactcagggttgttcaagaactttttttttttttttttttgagacggagcct

SEQ ID NO: 11429 - DNA, 1122 bp, Homo sapiens
aggggttttgttaagagaaaaaaccccacggttactcctgcagtcttgtttttctaaacgggagaatacggatggaggagggtttagaccgataaagcttgcaaaaacttattggactttgagcacatacctgtgatccgtaattaaggaggccatattatcaaatccaccctctaaggcactcgaggaggctccagacaagctgcttaaaagcgctatgcctgtagtgacttcattggaaggtgtcaactattttttagtacgtcaaactcaggaattatttgtgatgacactttctaaaaacattggatactatgagtgagttttctaagtagcctatctccgttctgaaaaataaatagtttagcaaaaatgctccaaatcagcctgccactgtaaaaccccattatgttctggtgatggcttgaaagtcaggtgcttgaagattccttttggactttgcaggtttgttgttgtttggtttgctgtcttattctttagcacaaatatttttaaaatatttaaaaatgaaatcagctgagtatataaattacttcttgaggcaacattaaactgtaatcataaagaatgcttttgggggattgtgtaaaggaagggaacctaatggaaggtaagggccttcattctctttagatttacattactcacatgcagaaacctattttgtctctaagattcataaatacccagtaaaataaatacaggcacattgtacttctatactgtggaatactttctagacagatcaaccctgttactgggaataactactcatattcacatgtttgaaattcatgatatacctcccttcccccaccccaagaagaaaaatagctcctcttactgtgtttaactccgtgggtagcatcactatccattcctttgtatagaagttgaagtttgacaattcctctgtcgtgcttcatactcagcctctcatgaagtcctgttgattttgcctcttgaatatctcttgactcttgtctgctcttcgtctgtaacagtagtcctgttccaagccaccaccatctctcatcctgactacttccgtagcctcctgattatggtctgcttgcatctactgtggtctcctgtagtttt

SEQ ID NO: 11430 - DNA, 1035 bp, Homo sapiens
ctccctcgccaagctggagtgcagtggcgtgatctcggcttactgcaaccttcacctcccgggttcaagcaattcttctgcctcagcctcctgagtagctgggactacaggcgcgtaccaccatgcccagttaatttttgtatttttagtagagatggggtttctccatgtttgccaggatggtctccatcttttgaccttgtgatctgcctacctcagcctcccaaagtgctgggattacaggcgtgagccaccgcgcctggccagtctgaggaaattcttatctttgttcttatatgtaatttacttgttttctgtggctgcttttaagatttttcttttaatcactgattttcagctatttggtatatctatgtatgggtttctttgtgtttatcctgtgtgtggtttatttaatttcttggagctttgtatagcagcagtccccaacctttttggcaccagggaccggattcgtggaagacagtttttccacagatgggggatgggaggcttggtttcagggtgaaactcttctacctcagatcatcaggcattagttagattctcataaggagcacacaacctaggtcccttgcatgtgcagttcacagtagggttcaggctcctttgagaatctattgctgccacctatctgagaggaggcggagcttaggcagtaatgcttgctcgcctaccgctcacctcctgctctgcagcccggttcctaataggccgtggactggtactgatctggcggcctaggggttggggtctactgttgtataagtcacatcgtcttgcttcttggcatgtctgatagttgttgattgcctgctgaatattgtgaatgttacattgtttagtatctgaatttttttgtgcatgttatgtgtctttcatgactattgggttttgttctggtaggctgtttagtaatttatgattactttggtcatttgataattgattttagagtggatttagattagcttttactctaagggtggcttaccccactattaaggcatggtt

SEQ ID NO: 11431 - DNA, 1035 bp, Homo sapiens
aatgactgatttctttcttgaagacatgcatcgtgttttgctttggtgttccgtattttccctgtgttatttctggggcgacagaatgatgtcttggctaaaaatatagtcctgtggactaactgtttgaaacttgactttttttatcttagaaaacatttatcttctccacaacatcctcatttgtaaagttaatataatatttgtctcgtagggtttctgtgaggaatagaataattcctgaaaagtacttagcacaatgcttggcacatataaatacgcaaatgctatcttgttatttctattatataaatagttgacttgggaacctctttatttgtaagattttctagtagactaatgcctgaaactttagctgtagagtgtattatattttcattttttatctcattccttttatgactgtggtctgaaaataacagtgaccaaggtttgagttcagggtcgacataataaatggaggagtgaaatttcattttaggtttgtgtgactctggaaactgggctcttgatcactgttatattcttatgctgcatgtttttttctgtgtgacatgggaatggtattgggtttatatcacatcattttgtttagcttagtatattaatgttccttatcaagttgacaggttgttgaatctctgtctttcaaagttgattcttgaccatgggtcttgaatgtgtgtcattgatcatatgtatgtgtcattgatcagatgtgtgtcagcagaaaactcatcagtaatagaaaaataacaaaatacaagtcttgatgttagtggtgtaacgacgttagctaacattaattgaatatgtcaggtattacaataagttctttttatattactgtgtcacttattcttcagtggtcctttgaggtattcatactattatttattctttttttttctgttgagaaaacttgcccaaaggcagctggtcagttgaagggaaattgactcaaaggctcctctgatctaatgccagtgtcttgagtgctgtatagatacatcc

SEQ ID NO: 11432 - DNA, 1027 bp, Homo sapiens
ttttatatttagtgatattaaagaagagggaggggaagattaagtgacatgaaatccatttttctttatagttaatttgaccaataagtgtcagcaagtattttattgaagtagtatataattcagattgacttttgtaactttgctaagatttggaaaccagcatttcttcctttgtttttccaggctggagtgcagtggcgcaatcttggctcactgcaacctccgcctcctgggttcaagcagttctcgtgtctcagcctcccaggtacctgggattgcatgcatgggcgaccatgcctggctaattttttttgtatttttagtagagacggggtttcaccatgttggccaggttggggaaaccagcatttctggtatcattcagtgtaagtctttagtcatgaaattagcactgcttagttgataaagcatatctaaacaattaggagaatcctagagaaagcaagaaataagaaatcttttcctccaggttcttgcaaatagtaggctagaaagtaacatctgaaattcatttttaaattgaaatttttaaagctaagtttgattagaaatatttaagaggctacagatggttctgaaaacatttggacgggtagaagatggtttgcaaaaggtaggattcttaaaaagaggcattataaacgtgtatcagacacaatttttgaaaattaatttaccttttaaatggatatcgaaattatcttcatcaccgccacccaccacccattataaagtgtaaaataaacagaagtttctgagagtttgctaattagactcctttgaggtttgattttgtgttttgcaatctcctgttattaaaatagttcctcatcccggctgttattaagttcctcatcccgggctgggtgcggtggctcatgcctgtaatcccagtgctttaggaggccaaggcaggcggatcacctgaggtcaggagttcaagaccagcctggccaacatggcgaaaccccgtctctactaaaaaaatacaaaaattagctgg

SEQ ID NO: 11433 - DNA, 1024 bp, Homo sapiens
atggacttacatacaaatgttatttttggggcaagcagacattaacagtagaaaataatggaaaagatgactcttcttaaagagtttaattggggtctaataaattccatgtgaataaataatttttggcatgagtatttaaaaatatgcatttctttttattgttttatcataattcaactctcctacagatctttggatataggaaatcaaatgaatgtttctgaggagatgaaagttacaaatattgggaatcaggtaagaagcagcttaatttttgcagaaagtatgcttcatctggagggcttttaatctttaagcagcaaaatcacatttttattgaacttatttaaattattgacatttttctatttcagcaaattgacaaagtttttaacaacattggagcagaccttctgactggcagtgagtccgaaaataaagaggacgggttacagaataaacataaaagagtgagtttccttactgttctttcagccctcttattttatgctgtaggacttcctgtaaaccacagatttttgttgggaaatactgttcagcagcttaacaagaaacatttgtaattatctttctgaaattcctttatcagttaaacatgaccctaacccattttgagaataaacatacttaagatttttagcttccattattacttgacttgccacaaggtaatatttatagactccttgactcctttgtcctttctcttgtactttgccagtcacaccccttggtgaatcccactgtctctctttgcttctgctcctgtgttgatggattctactatagatttgtgctgtccagctatcctaggctgtctctgattgttgctcttcagtattttaatttctctcccactcactacattcccaacagtttgagttccaaactccttccattctttttgagcctagcaacctcatcttctgtcatttcatggtgtcaacttttatagtccatcagattttcactttgacactttcacagagtactggtcagt

SEQ ID NO: 11434 - DNA, 1027 bp, Homo sapiens
acctgtgcctcctgggttcaagcaattctcctgcctcagcctcccaagtagctgggattacaggtgcccaccaccacacctggctaatttttgtatttttagtagagacggggtttcaccatgttggccaggctggtcttgaactcctgacctcatgatccacccaccttggcctcccaaagtgctgagattacaggcgtgagccaccacacccagccaacacagcactcttgacccatgtatgctgtgtatccagcttcaggttgttcatcaccctcatctcagtaaatgctgcctctgtctctgctcaaattccctaagcctgaaacagtagttcttgacactctgctcttacattcctctcctttaccccatcatctctgacagttgccaaatccgtttgttcttaactccaaatatatgtcagatccatctcctttccagtggagactgttagattctagctcagtcaccattgtttgtcactgaactactgcagtggactcttccctcttccacactactctcccatctcatttcttatacagtgtttctttggctctcaccttttctacccctacttgtttctccttctctcagtgtttccctagttctttttcctacatattcatccacttttcccccttttctctgttaaacgcatcactgtttcactccaccctttctctctcttcctcggatttcctttaaaactgtgaattagatcatgtcgctactctcttagttaaaattcattaggggcttccattgcatttaggataatatctggtgagggacttcaataaaccactgacaacactagacaggtcatcaagacagaaaatcaaccaagaaacaatggatttaaactataccttgggacaaatggacttaacagatatatacagaacatttcatccaacaacagcagacagaatacacattctgttcaacagcgcatggaactttctccaagatagaccatgtaatagggcataaaacgagcctcagtaaatttaggaaaatt

SEQ ID NO: 11435 - DNA, 1050 bp, Homo sapiens
tccattcattaattcggggttttcttacattgaccacagtattgaatattgaaaatgtcttggctgggcacagtggctcatgcctataatcccagcactttgggagtctgatgtggaaggatcgcttgagtccaggagttcaagaccagcctgggcaacatagggtgaccacatctctgcaatacataaaattaaaaacttagctgggtgtggtggcatgtgcctgtgctctcagctactcgggaggctgaggtgggaggattgcttgagcctgggagtcaaggctgcagtgaaccataatcgcatcactgcactctagcctgggcaacagaataggactaatactttgcttctaatttatatatttgctgtgagccacagcagctttttatatgtgtctattatgtatgatttatgcttcatcatttaaatattgatgtggattatgatgacttttagcaaaggttttattcattcagttgattgattttttttttctttaggtatggtttggagaagatctgcctctaagtcctcggagtcctctgactcccagacacggaccaggattggctaatgtttgtcagtacgatgagtggatagctgtgaggcatgaagccactttgttgcccatgcaagaagatctgtcaatctggttatctggtttattaggtgaggcttgaaacaatacccaaaattgtattatcttattcaatatgcatttattgagagccttactctttgtcaaggagtgattgttacagatgctggggatactccagtgaatgaaatattcagtgcccttggtctcacccaggttacatttcagctggggaaatagtctgattcaccctgaaccttgggtcttgaatagtaggaaatttgcgatttaaccgaagaggtcagtaagctttgaataatgaacattttcactgttaatattaaaatcatctttaaaaattgtattggtctaatttttttttttactgatttcctcctgcctcgacccaccttagtcttgtataagccatgaactttgagtgaaacata

SEQ ID NO: 11436 - DNA, 1053 bp, Homo sapiens
ctattatcagtttgatggataatatttagagtttattatgtaataataatgtttttaaagaagacattctagaagtaaaaagttagtattccctgggtatttgttatggtattgtctttaattttaaaattgcaaccaagtccatcttatttatagagactgtttttcttgtgcaaggaatattaatatgcagtgaatttatttcattttaaatgaaataaaatcgatgtcagtttttctgtacttctacattacagatatttttgtttcagtatcattaagttaactggccattatttgctattttaactgtaccttctaagagtaagtatttagagtctgatctgatatttttctagtgttttgctgtaatctgattctatttaattaattttaaccatattgtttttatgtttctagaagattcttaactttgaaatatgtttttaggtattaaagttaaggcagaaaaattattggaagaacttgataatggagtactattatgtcaactgattgatgttcttcaaaacatggtgaaaacatgcaactctgaagaatcaggggtaagtaaatgttcgacagtattgattttatgtcttggtacatattaatttatgtacacttcttatctctagaaggttgtaaacttccatgccaactggctatgagatgttgaataatttacttaacccttttcaagatctggaaaaatgttctctttcataaaatgagattagatgttgaataatttacttaacccttttcaagatctggaaaaatgttctctttcataaaatgagattaacagttccttaggatttatttgtgagagttcaatcaaattaaatgggtgaatgtatagatagtgtctaacatagtgcttgatgcatagtagatccagctcttcttgagaacattaacataacttccttgtagaattgttgtgagggttaaatgggaaaagagcttgtgatggttcctggcacacaagtagcagctgctattattattattttcttctttatatattctccatatattgcattagtg

SEQ ID NO: 11437 - DNA, 1042 bp, Homo sapiens
aattcctaaatgagttggctacaggaaggttctggactaatgctttagtaattgatattttcattaagaattactccaccaagcctaaaaagtagtaacttccctttaaccggataattacggaaatgacaggaggcctaataatgtattatcacggtgtttagctttaccttacaaacaacagctgccaacttgattatctaatggattaatatttttgacaattcattttgaggagtcatgctctgttgaagaattattgacgtattttctcatttccttgaagtcaacagaagcatctgtgcagtgactaaagcggtagctatttaagttttatactatatttgaaagcatttatatatgtgtacatacacacacacacccaccaccccacccccacacattgaattcataatgtgataagtgcagcagtgtaccaagggcagggctgtgggagttgtctgccctggtagaagttttatcactgacatagtttaggattgctggtttgtggtgatagtaaaaagcaaactgactttttgttggttgtattattttaaaattctctactgacagtacacacccttattgccctcacacagggtaagcggcctcctgtttgctctgcatctgggcacccctatccagtgtagagcaagcatgggatgctattttatccctctgtttgcaccttgctttagatccagatgggctgatcattattgacagtgtagttgatgtaatggcacatctactttctaaagatcaaaacaaagtggaaatgctttgaattctctagtttctagtttattatttctgaaaggacataagattgttgtatatttctcattttcagtagaaggcatcttctcactctcctgaaggtcagtataggactaagtaaagcactgccaataccagtaattcattttgaggcattgaaccgataagctaatgtttttactctccagaggtctcaaagatgagcctcttaattttttacactttgctagcaactcaaagctattttatgaaacaaata

SEQ ID NO: 11438 - DNA, 1040 bp, Homo sapiens
gcaatattgttaagatgcccacactacccaaagcaatctacagattcaatgcaatccctataaaaataccaattatgtgcttcacagaaatagaaaaaataatcctaaaatttatgtggaatcacaaaagactcagaatagccaaagttatactgagcaaaaacaacaaaactggaggaatcacattacctgacctcaaattatactgtagatctatagtaaccaaaaaggccaagtactagcataaaaaaacagacatatagaccaatgggatagaatagagagccccaaaacaaatccacacacttacagtgaactcatttttgacaaagttgccaagaatatacattggggaaaagtcttttcaataaatggtgctaggaaagctggatatccatatgcagaataaagaaactagacccttatctttccgcatatacaaaaattcaaatcaaaatggattaaagacttgaatataaaacctcgaactatgaaactactaaaaaaaagcattggggaactctccaagacatgagactgggcagagatttcttgattaataccctacaagaacagtcaatcaaagcaaaaatggacaaatgggatcacgtcaagttaaaaatcttctacacagcaaaggaaacaacatgaagagacaacccacagaacccacagaaatgggagaaaatatttgtaaactatccgtctgataagggattaataaccagaatatataagcagctcaaactactttgtaggaaaaagacctaataatactgtttaaaaatagccaaaaatttgaatagacatttctcaaaagaagacctacaagtggccaacaggcatatgaaaaggtgctaatatcattgctcatcataggaatacaactcaaaactacaatgagatatcatctctccacagttaaaatggtttttatccaaaagtctggcaacaacaaattctggcagggatgtggagaagagggaacatttctacactgttggtggggatataaattagtacaaccactatgaagaaaa

SEQ ID NO: 11439 - DNA, 1031 bp, Homo sapiens
aggggtgcttagagtctatgtggatggatgaaacagaaagtagaaaagaatgaggcaaatgatgtggagggaagacagcctagagtacatagcactagatgaggagtgttgggtgttcagtaacaatgcttacccaatgtaggccttggacagtgagatgttacttacagagccattgatgtcttctttattttggatgctagggggtaagataaattgattaatgggcaagggcaggtggggagggaacagttgtaatgataaaattcccatcctagtttagaagttccttttgggacacgttattaaccatcaaagttgccatatccttgactattccagacctgatttttaaggtagctaatgtaatcagagtggtgactcccagagcaatacttgaaaataagagtttatatattaatgttaatgacttgtattcccacaggcagtgaagctaattttgcgaaagctaggaccagtcactgaaacagaaactcaactaccatggatgttaattggagaaacactcaaaaacatggtcaaatccactgtatcctacatctccaaggaacattttggtacattttttgaatgtttgcaagtgagttctaatctttaaggatgggtttttgataaggagtctaagaatttactgtttctgctctcagttttgcaaatcactcctagaagttatattttataattgttttatttatacttctgtacacatattaaaattttccttccctctgcccccctgtgctattttttatttgatatgttatcttgagatgcagtagaaggctctggagccagactgcctgtttgaatcttgacccttccacttactgctagtgtaacctgggaaaattatttgaaatctcgattccccagtctcttcagataataaatgggggtagtaatattctctccctcagggttgctgtgaggatgatgagtgaatacttgtaaaaaacttagaatgggccgggcacagtggctcacacctgtaatcccagcactttgggagg

SEQ ID NO: 11440 - DNA, 1034 bp, Homo sapiens
gctttttttgctttgttttgagggttatataaaataacacttatcagttttttgaactgcaagggctgtacatatgccagctggcatttatggtgttagtagcatataaacttcataccatgttaattttccaagtttttccctaaagaattagtttaccccacggcttaaggataagatcttagtctaatggtacaagatgctgtggggtagaggtagaaacaggagcctgtaacagggagtgggtctctgagtttagaaagatttagagactaaagatacacaattctaaggaacgtttaatactggttggcatggattacctataaataatacatttatagatgatccgaactaatggaaaacccaaatgtcacctttaattctgactttgaagtatattacaggctttttattttttggctagcaatttatatttctaaatatgtttcaattaatttggtattagaactaatttgtgaatcccttgtaaacattctctgagacgaaccaaaccaggaacaagaacgaatgactaacaatggcaacagcatcccaataaaaggtgacatttagtgagtactcactgtgtgctggacactcttatggatgctttgtgtgaattgttttatttaataaatgaatgagtgaacatgctgttcacggagataaaggttacagtatgtaatgtgtggttaattgaatgttgtaagtataataggtatgatattaagtggatgatggtgcagtttgtaacttatagaaactttacttgtttcattcatccattttttgatttattaagtgctagattctgccagatgaaaataccaagtaccacagtgtcccagccctcagattgtagtttagtgttatcgatctggaggttaacttgggctaagctagagtttcttttaggagggttggtagggtgctgtcctcaaacatgttattttatcagtgtgtttttgagtgaggacttgaaaggccatccaatcagtttcctagcatctttagcccagtgccctgcattc

SEQ ID NO: 11441 - DNA, 1169 bp, Homo sapiens
aggagttcaagaccagcctggttaacatagtgagaccttttccctacaaaaactaataataaaaatagccaagtttggtggcacacgtttgtggtcccagctactcaggaggctgaggtgggaggattgcttgagcctggaaggtcaaggctgcagtgagctgtgatcatgccacagaactccagcctgggctgcagagtgaaaccctgtctcaaaaaataaaataagagcgccaagtggaatatacagcactccaagtagttacgtggtatctagcccctcgctgctccaagcatggcacctggacagacagtatcagcagcatctgaggggttgtgagaaatgtaggatttaaaggtcctacacctgaccctacagaaactgcattttcatatgatccctgggtgatttaaagtttgaggaacgctgcagcttcttttcaagtaagcagccatattacttgttggggtgggggtgaagaatgatgctcaaagaaaacaattttggtacagtcgacgtgattaagactcctggtagttagctttactttgtacatcctagtttgttgatgggtaaggttcctagtctacagactgtaagtctaacacactaagaaatgtcacattcattttgactatctttctttgtatagatttttagtagttgctctatcgattaccatatatttcaatagtctactgagaatcagtattttaccaattcaagtggaatgtagaaaccatatcaccctgtatggccctttgcccttcaccctttgtattatagctctttatgtattaacgtctccgtatactgaaaacttcattaggcaatgttataatttttgcttataattgtcaaacaagttttaagcactcaagaggagagtagtctgttctacctagatatttactatttctgctgttcttccttcatttctgaatttccacacttctttctaatatcattttgccgtagtctagagggtgtcctttagcaatgtggtggagcaggcatggtgggaacagattctgttagttttctttcttctatgaatgtcttccttttaccttcattcctgaaacatattgttgctggatatataatttcactttaacagttctttctttttagctgtttagttctttcctttaaaaatattgttctat

SEQ ID NO: 11442 - DNA, 1032 bp, Homo sapiens
cttgaactcctggcctcaagtgatctgcccgcctcagccttccaaagtggtgagctaccacacccagcctgattttcatcatctacgtatttagctcctacagaagatttttaaaaatagaatacgtggctgggtgcggtgactcatgcctgtaatcccaggactttgggaggcctaggtgggtggatctcaaggtcaggagtttgagaccagcctgaccaacatggtgaaaccccatctctactaaaaatacaaaaactagccaggtgtggtggtgcacatctgtaatcccagctactcaggaggctgaggcaggagaatcacttgaacctgggaggcggaggttgcagtgagcgaagattacaccactgcactccagcctgggcgacagagtgagactctgtctcaagaaaaaaaaaaaagaaagaaaaatagaatacgtgtctcatgcccatgagaggatcacattctaatatgaaagatagggccacatacaaatgacatcacatcgatctagagctgaaacatacctcagaaactatctagtctaccattttcatttagagaagacctaagaacatgttccagaaaaatcagtattttgaggctgtaagtgaaatttgtccagtgagttcagtggatctcagcatgcagctttcacctgatgccagtgccatgctcttgggcttcccaggctccagaaccatgagccaaataagtcttttctttataaattacccagtgtctagtattctgttatagcaacagaaaatggaattacacaactcttatttgaaaaaatgggaggctataattatgaaacaattaatgacttatgtggaattacttcccttggttaaattagatctttactttcattaactaaagatgataatttcaaagctttgctttttaaatttgttctgctacctgtgaaatcatttaaaatcaaggaaactagacaacagaaacagtgcattgttataaagtcatgaacatcattgtcatgtagttccttatatttgtatacct

SEQ ID NO: 11443 - DNA, 1443 bp, Homo sapiens
aatcagtaacttaaattaattcgtcggagtactcataaatgctacaccttaagtcttttaggtactctgcatgttataaatagttacattatttgataataattttatttttcttctcctcttctccaacttaatcattagcccaagtttacaatagagaggattaaaagaaaattaagggacctgaataatatagaaaagggatatgcagtacttaaataagcatttgattcatataataaaataatgcagtgtggagtctaaggtccttttttggtcgaatcttcatgtgcacagaaaggggacccgccttgacaacagtcaccagcatcaggtaattgtgagactctcaactgtggtaggcaattggtgagataatgtaaaagcaccttgtaaatgctagtgctaaacattagatagtattatctgcctctgttgcctctttcttagagaccaggaaatagtgcacaaagcaggaatactattctctgttcctctttttcatatagttccctctcggtctgatccttttaagaactttgtcatttgctcattttggctttggcttcccatgcctactgattctttttagccccactttattgctgaaaaggagaaacagtagctctgaaaaaactctctaatgataaatgataggagaagcttaaaactatggatcatttagcagagggcaggcttcaggcagttgattctcaattatggaataattgtatttaccacctatcgagcacttacatgtttcaggcattgtactaagagcttcacaggcattatcttatttattccttacatttatcccgtaaggtgggtattacctccatctaaagacattggggcatccaggcagagatgtaaagtatgtagacagatataaaaatctacagctcaggaaaaaatgtagattggagataaggatttagaagtcattagcatatagatggtagttttaagtatagataaaattgttcatagactataagaattccagatggaattctgaaagcatcatttaagatatgaatgaagaggcagtctaggaaggagcgtgagaagagctccagcaaggtaggaaaatcaggagagaacatggaatagataaaaacacagcagagcttttcaagaaagagggtatgatcagcatcttaaatattgtaaagaagttatgcaagataattaatgaaatgtatcccttagatttgtatcctttaattggaattgaaaattgaaggtcaatttaccttaaacaattttagtagaataatggggccaaaagccagactagagtgtgttaagcaacaaacgtgaagagaggagaaaattacaaatgttgactaattttcagtgagcctattcgtggagcataggagagagagtgacagcttcaggggaatgcagactagagggactgatgctgattggtta

SEQ ID NO: 11444 - DNA, 1049 bp, Homo sapiens
ataatatggtattactgtaattttatagtaagttctaacttaaaacatgtaaacttaataaacaagagtaaagctgttcttgtgaacccatttaaattggttatagatttaataacctcaataccaaatttatttcaatattttatttaggataagcagtgccgagaggatactaattcacatagataaaaatgtaatggtctggattttacaattttacataaaagaacatttgcagtctgaatgcaaaaagaaaggaggtggggatgttggtgtagaaagaaactaggataagctgggtgtggtggctctcgcctgtaatcccagcactttgagaagctgaggctgggaggatcgcttgagcccgggagtttgagactggcctgggcaacatggggaaaccctgtctctactaaaaacacaaaaaattaaaaaaaaaaaaaaaaaaagaaaataggaaaaaagaaggaaacctgaatagaactaaactattcttactcttcttcatcagtgatattttgtagaattggcagaataagctctatttcagtatctccacaaaattatgttaatttggcaatccacatgtggactgccttcgatgtagtaaaagttgatatagaataaactgcattaatttttagccagtttaaaacgtgtgtgaatatcaaactggaatcagacatctgtggcactgtattatgtctctgtcaccctcaggttctatgaaaccttggaaagcacaactcaggtttgtatactcctgtaggccatacactacatcacactgttctttaggcctcttgcacaaaatagatggtcagaaaatgtctacattgtaataaatgcagtgttaaaatgtgatactgattttctgctttatcccttagggcaccagtgtcttgtcacctggactccacataggactaattattatactggcaataatgatctataaaaagtcagcaactgatgtgtttgaaaagcatccttgtctttatatcctaatgtttggatgtgtctttgctaaagtctcacaaaaattagtg

SEQ ID NO: 11445 - DNA, 1047 bp, Homo sapiens
attattgaatcaagttatgttctaagaaattttttatactaatcatttttcaagaggcatattagtatgttataaaatacttgcttttagtatactagaatttaaaagggctacaggaattttttaaataaaatttgtatttaataaaaggaatttgttgtaccagttcagaaaaacatacgaatctttatactgaaggtaacttgttccttgatattttgagttaaaatttcactgtcactgaaaagtggatgttaaatattccctttcatgaaaaatgaaaacagtagctaagagtcagttgacatgtaagaaaattagtaacttagaaaaacttacttggtaaaaaaaatcttccttttagaatacaaaagtttactttaagtacacactgactcatttgaggtgataagggataaaataagtaaaagttattcaaccactaagtacattaggtactgatacttatctttccactctaattgaaatgtatttagattactcattatgaatactactagaactatcacaaagatctctggggatccaaatcttcagattcccatctgaccctatttatttttaattttatataatagttcaacagaccatatgtcatatgatgaagtaatcaaaaaaaaaaaaaaggagtaatttgtgtactacatctgttttaggcaagaaaaaggtatattgaagaaaacagtgaaagatgatattccttaaaagcaaaaaaacatacttatgggaattaagtacacagaaaacactggagtacttattttgcctctaactaactattggtaaaacttcccaaataaggactttcttacaaggatgaatagtacttatgatttatattctaataatatatactttggcttaaaaggaaaatcctttacaaagttcaaaaatttaggaaataatgtcaaatattcgttaatggtggaagactaatttcttcctgtacaagtaggttgtcacaattagaaaaagtttatctgtaggcacctgtttttttaaaacttggaaaaccttattataact

SEQ ID NO: 11446 - DNA, 1704 bp, Homo sapiens
aactgggtggcgaggctccgcccccatggggcgattgcgcgcccaaatagctggcccagggtgctttggccgccggagcgggttgcgagtacacttgaggcctggtgccttccagtttttaagttttaaatgtttataatcgaaaattgcagctaggcgcagtggctcacacctgtaatcccagcactttgggaggccgaggcagacggatcacttgaggtcaggagttccagaccagcctgtccaacatggcgaaacccatctctactaaaaatacaaaaattagccggacgtggtggcgggcgcctgtaatcccagctacttgggaagctgaggcaggagaatcgcttgaacccgggaggcagaggttgcagtgagcaagaccatgccattgtactccagcctgggcaacagagtgagactccatgtcaagaaaaaaaaaaagaaaattgcggaataatatgtaaattatgaaacatgatgaacataccacctaatttatgaagtagggctttaccaacattcactgaatctcctcaggcaggcctttccatccgatcctcaccaggaccccacccttccccattcagggatataagaaaattatcctaaatttatgtaaatcattcacccttccttattttctaagttttattaccacatgaaaatgtgtcgttaaacaacacggcttagtttcgttcgcgtttggcattacaaaaaattgtcccatagtctatgtagtgttctgacagtccactagaatggcaaaactacaaaatatgactacacggagtgatgatgaatctatgtaacaaagggaacccattcagtgggtgggagtataattgtaaaacaattatttggtgtaactggaaatcacctatcaattgcaaaacaatttttgaagatacaatttatgaaggaaatgaaactcacctataatcccactacccagaaataatatacagtttaaaattgggggtattattgcctttcatccttttttctgtgcttatatgtattttcccccaaataattttaaaatatatttcaacctttgtacctgccttagtttgctcacagctctgcaatcctttttctatttgaaatcatacattttactttttttttttttttttttttgagacagggttttgctctcttgccaaggctgaagtgcagtggcatggcatgatcacggctcactgcagccttgatttcctgggcccaaatgatccccctgtctctgcctcctgcgtagctgggactcatgcacgtgccaccatgcctggctaattaagaaaaaaaaaaaaaaaaagtttgccgagatggggtctcactatgttgcccaggctgttctcaaactcctaggctcaaatgatcctctcacctcggccttccaaagtgctgggattacaggcatgagccaacttgcctggcctatattttacttctttaatatttggcaaaggcttcaggatcttattgacgccaatcacttttcaactgcctagttcaagtaagagattcaaaggaaccctcctgtttactgttttgctttgaatcctcttccttatgatgctcagcattccactggctcgtttaaatacaccagtgtattgggtaaggaatgacggatgacgactcccagacttgttcctgtaattccattcactacatcaaacctgttgatacaggatacag

SEQ ID NO: 11447 - DNA, 1176 bp, Homo sapiens
ctaatactagttatcatctcaaatcatgaagtctgatcatgacaaacatctaaaaaaaaaatctctcctgggggtccattctcaaaagaaaaaagtctaattcaaatacagcctttcacaatcttttttctcgacacaggactctcttacacctctgtgcctttgcacatgccatttcttctaccaggaatgctctttcttacatggaagtgtcattttcataattcaaaatcaagtccaaatgtcaccttcctgtaacagaatcagctggtccttcctacgtacaccagctgcactgaactcttattgccgccctcaatatactgtatcacaatttgcctggtatctgtctccctggatagactgtgagcatctcaaggcctggtaccacatgcctttcatcttagtattcctagcacctggcacagagaggcaagcaaagggtcaaaaatcttcctaaactgaaagataaaattatctttataattaaatgttggcaatggcagtagaatgaaagatgaagaaaacttataaagcagctttggaatatagtggaatgtgcagaggactgggagtcaggctggatcagccacttgccagctacttcagctggagcaagttactcaactcacattactatgttctcatctgcaacatggcaataacaatacttttaattgtagagagtaaatatcttgcccagtacagtgtttggcgtacaacaggttctcaagaaaaagggtagctactctgacggcagtgatgatgatgaagcacacttagtaggtgttgtaggccagaatctggggaatgggctgtccaggttcatacgcgggctcccccattcaggagctgagatgccttatgcaagttacttcctgttgctgtgctgaggataaaatggacctactacagagttgttagaatagttaaatgagaatgtgcatgaaaagctcttagtcaagtaccatgttacagttaagttaaaaaaaaaaaaaaggccttagtaaggtattgttacttaaacacgcaatattgctagtgattattcccacagtagatactcaataaattagctgatttaacaaatataagaatgaaaattagggccggatacggtggctcaggcctgtaatcccagtactttgggagcctgaggcgggaggatcgcttgag

SEQ ID NO: 11448 - DNA, 1053 bp, Homo sapiens
tatatttgggttaacttgtttttttaaagcaaaatttcattgctgcccatttgaataaacttaagcttaagaatattaatttctttacattatgtgcccttctgtgataatacaccattttcacaaatgcctctgtgtatctgtgtcagaatgttatgatagaatttgaaatgaattatttcaaaattaagctcttatgtatggttatacacgggacatgcatatttgatgtttaataggaagatttaggataaacatgtaactattattattgtggtcaaattatttttatttaataagacttttttcattccctaaacttttaaaaactactggctcttgtaccccaatcctggaaattcttccaatctgcaccgggatactggaaactgcctttaaaaaatttccacaaagtgattcttacttaggtagcttgagccaaactagcgtttggatttaagccgtagattaagggttagaggtgttcagatgagagaaggatgaatgtaggatagagtggtaaggaaaggctttgtgatattagatagattttagataaaggaagagaaggctgtagaggaggtatgatgaggaaagtcagttcagaagaagggttcaggggaatcaaagtcatggtatgaacttggcaaagatactggcttgactagagaagaggatttttgaagggtagaattagcttcaatgggtctgttgggctagatattgaaatgacattctgatgagttattttaattttatatgtcagtagtttccagatttttagattccatagacagtaaaatttctaaaaaattattagacactgacagattttaaccatttctcatttttgcaaataaggccattgagaaaaaatagttactatatactatgatcatcattttgaaaaaggaagaatattttaacacttaaaaattaaaaagtataaaatcttaaaacagggatagtgttttctacctgtgaatagttggcagttttgcatattttaaacaatgcatgttaagataaattttgaatctcgaaaacaatgac

SEQ ID NO: 11449 - DNA, 1048 bp, Homo sapiens
tgcctccctagtagctgggactgcaggcacccgccaccacacccggctaattttttgtatttttagtaaagacggggtttcaccgtgttagccaggatggtctcgatttcctgacctcgtgatctgcccacctcggcctcccaaagtgctgggattacaggcatgagccaccgtgcccggcctgtaagttcaactttttaacacaccacttgtaagtgagattatgtggtgtttgtctttctatgcctgtcttactttccttaatataatgttttccaggtacatccatgttgttacaaatgacaggatttctctcttttatggggctgaatagcattccattgtgtatatataccacattttctatccattcatccattgatggatacttaggttgattccatatcttggctattgtgaacaatgcagcaatggccataggagtcctgatctctcttcactactgatttcatttcctttggatatatacccagtattgggattgcaggatcatatggtagttttattttttgagaaactttcatactgtaatgcttatactaattacatttccaccaacagtatacaaaggattcccttttcttcacatttttttttaacacttttatcttttcaataatggccattctaacaggtcataatttattttggtttccatttgcatttttctgatgattagtaatgttgagcattttttatatacctcttggcaatttgtgtgtcttctttttggaaatgtctattcagatcctttgtccaattcttaaaaaacgattatttttaaaattcattttattatttagagacagagtctcaatatgttgcccaggctgtacttggactcctaggctcaagaattctcctgcctcaacctctgaagtaattgagactgtgggcatacgccactgcatcctgctcttttgcccattttttttttaatggggttgttttcttattgagtttcttatatattttggatattaaccttttatctgatacatgatttggatatattttctcccattcc

SEQ ID NO: 11450 - DNA, 1053 bp, Homo sapiens
caggtggtatcatgctacctgacttcaaactgtattaaagggctacagtaaccaaaacagcatggtattggtagaaaaacagacacatagaccaatggaacagaatacagagcccagaaataagaccacacaccaacaaccatctgatcttcaacaaagctgatgaaaacaagcaatggggaaaggattccctattcaataaatagtgctgggataactggctaaccatgtgcagaagattgaaaccggacctcttccttaaactacatacaaaaatcaactcaagatgagggacttacatataaaacccaaaactggaaaaaccctggaagacaacctaggcaataccattctggacacaggcatgggcaacgatttcatgatgaagatgccaaaagcaattgcaacaaaagcaaaaattgacaaatgggatctaattaaactagagagcttctacacagcaaacaaaactatcaacagagtaaacagacaacctacagcataggagaaaatttttgcaaactatacatctgacaaaggtctgatatctagtatctataaagaacttagacagatttacaagaaaaaatcccattaagaagtaggcaaaaagctgggcatggtggcttactcatgtaatctgagtactttgggaggctgaggcaggcggatcacttgaggtcaggagttgaagaccagcctgggcaacatggtgaaaccccatctctactagaaatacaaaacattagccgggcatgggggcagacgcctgtaatcccagctactcgggagactgaggcaggagaatcacttgaacctgggaggcagaggttgcagtgagctgagatcacaccactgcaccacagcccaggcaacaagagtgaaacaccatctcagaaaaaaaaaaacctaaaaaaaagaagtgggtaaaggacatgaacagacacttttcaaaagaagacatacatgtggccaacaagcatatgaaaaaaagctcaacatcactgatcattaaaaattgcaagtcaaaaccacaataagatatcatctcac

SEQ ID NO: 11451 - DNA, 1004 bp, Homo sapiens
tttaattggagcatttagcccatttacatttgagtttaatattgttatgtgtgaatttgatcctgtcattatgatgttagcgggttattttgctcgttagttgatgcagtttcttcctagccttgatggtctttaaaatttggcatgtttttgcagtggctggtaccagtttttcctttccatgtttagtacttccttcaggagctcttgtaaggcaggtctggtggtgacaaaatctctcagcatttgcttgtctgtaaaggattttatttctccttcacttatgaagcttagtttggctggctatgaaattctgggttgaaaattcttttctttaagaatgttgaatattggcccccactgtcttctggcttgtagcgtttctgccgagagatctgctgttagtctgatgggcttccctttgtgagtaacctgacctttctctctggctgcccttaacattttttccttcagttcaactttggtgaatctgataattatgtgtcttggagttggtcttctcgaggagtatctttgtggagttctctgtatttcctgaatttgaatgttggcctgccctgctaggttggggaagttctcctggataatatcctgcagagtgttttccaacttggttccattctccccgtcactttcaggtacaccaatcagatgtaaatttggtcttttcatatagtcccatatttcttggaggctttgtttgtttctttttactcttttttctctaaacttgtcttctcgcttcatttcattaatttgatcttcaatcactgataccctttcttccacttgatgaatcagccactgaagcttgtgcatgcatctcatagttctcgtgccatggttttcagctccatcaggtcatttaaggtattctctaccctgtttattctagttagctaatcgtctaatcttttttcaagtttttaccttctttgcaatgggtttaaacatcctcctttagctcagataagtttgttatt

SEQ ID NO: 11452 - DNA, 1469 bp, Homo sapiens
atatctggagtgcatttttatttggatttaaaatgtttttacaatcccagtataaacactgttaatctagtcaaaactttttctcacaagatcaagagcttgcatagttttactttaactagttatagtcaaaagggtaagaataagttgtgcatttacattacacaaaatcttattttaaacatgaaggatgtcagactaaaaatagtgttaggaatttttgagataaaacagtttagttttaaaactctaaataactggatttatttaatttacatagcatttggaaattttctgatgtgtaacctttgtggggttggggagtaagtgtacagtttttggtacaatgctggaaaattacaaatatgtcctacatttggagaatagatccaatgtttgagagttactgatttttttgtttttggttattcattgaactagtttcatgaaatagaattaatttccattttcatgacacaacaggcccctgcactaaggacaatgaggataatttttttagttgtgtttgtatagatgagtaaagagctgcttattttaaggcagtttggacacttagtcttaaatgtggatagtaagtactaccagtggctaattattataggaagtataaaaatgtagatttaaaagggtcaaatatatagaaaataatatttaggagtacttgatttctttctgtttttgttgtgtaaagtttatattgtagtttagttctagtgaactatagttgtacttgaatacccacccatcttcaaatgcaatgagttgacagatcttggtgttagtggaaactactaaaatattaaaggaacttaactatagaagacagcaatgtattacatttcataaatcatatctggatacttaaaaatatttagtactcatggtgtattaaaaaggagtagttagaatttaatttttgctgaattagggctggcagcttttggaaggcatcattattaatttctagaatattaatggagcagaatggaatcaataaaaaaaaccttcaacttgttcactgagagaatttattatgcagatgttgaagaagactttaaagaaagcattatagttagataaaatattagcatgcaaacatgttggtaacattagtggatctctaagcaactatatgtcactgtagccaggttataatctgttttatttctcgtgggatagatagaaattctgtcaaaaaagagaaagaaaaagaataattttgcctgattactaacatctgacaacttatagaaagaaacctgtgtctttttagcacttgtttgttacagtttcatgtgtccatgagctgagaagaatcaaaattaatctctggctcaaggttttacacttgatcttagccaaaaggccgagaagcaatggctcaaggttttagcactgatgttttgctttcctagtaatagtaatgaaacataattttattgcttcaa

SEQ ID NO: 11453 - DNA, 1033 bp, Homo sapiens
tgtgttttgcatatggatgaccaattgctccaacaccaattattgaaaagactgtcttttcttcattgttccttttgcacatttgtgaaaaatcagattgctatatttgtgttggtctatttctgcacgctattctgttccattgagctgagtgttcttttgtaaatactactctatcttaattattgtaatcgtatagtaatttagattgtttctcagcatttttaatatactgttccaatatcatctggcctacatacttctggatgatttgttaaccttattattgttcctctgtaggtaatgtgtcattttgttctggctgcactcaagattttctcttacttttggctgtcagagtttatattcattttgtttggttttcctacttaaatagcttattggatctataagttaatgttttctactaaatttgggatgctttgggacaaaatgtattcatgtattttttctactcttttcacttctcttcagggattccaattacgtgtatgtttgacctcttaaattgtctcattaatccctttgattctttcatcttttttgttgttgttgttctcctttgtttttcagatttgataatatctattggtttgtctataagttcaacaatactttcttctactctctccaagttgctgttgaacccatcaagcaaattttgttttacttattgtacttttcatttccagaatttattttgtccacttttctgttgacattccctctgttaatttgttggtaacagatattcttttaattcattgaacatatttcctgttaatatcttgaacataattcataataactgccttgatgtttttctcctaaactcagcatctaggtctacttggtgacaatttctgttgactactttttaccttgagtagggggggcacaccttcttttttctttgtttattgatttttggatgaaaactggatattataggtaatattttataacaactctggattcctctatgttcttctgagaaatattgtgttttcgt

SEQ ID NO: 11454 - DNA, 1028 bp, Homo sapiens
ctcgagagaaacaaatgtctatctttttggtatggttgtgtgacatgttcaaaattaagactccttgcacagtggatccatgtatcctaatatgcttgtaactaggatgaaacaacttttaagtggttaatttatgttctacctctgtatttgaaaatccatggtattttaattttttaccatatcgttcaagtttggtaaaggagaatttctctaaagcagtgtttccttacatatgttctgtatagtgctagccctgataaattctctgtgaataaatgtttccagtgtcaaaacgtttctgttaaatgttctttgaataaatgtttccaagggcaaaatgtttagaagtagtatatacccttattggttatacataatccatgattgtatataagagctctgagaagtcctgccataaagaaatctgcttgtagcaaattaagcttgttatttaatctgttgtttcctaatttatttgaccatagaactttcccctaaattatcgacatttcacaggatttgtctttcttagaatgtaccttggaacatttcatgtttgattggaacacttacgtacagctatcacatatgtatttttatcattgtaaggacaagccttttgaactatacatgatcccaggatgggaaagctggatgtaacttagtgattatctagtctgtatttttattttacaaatagagaggctgaggtttggaagtgttaaattgcccaaccaattcacctgtttaacacaacagatcagctgacgctaaaaattcccttgttccatgtaacaatttcaatagctagtagtcaactatattataatatattcataaatgagttctttagagtcaataatacattctaattaatatactttagctcttaatttgtcccctaactcagctcctcagcctcaatctgcagctgggtgtcattgccaccacacttgctagcatgaattctgcatggcatttgtttctttggttatttacttctgactcaaagtgtgtcatgagcc

SEQ ID NO: 11455 - DNA, 1027 bp, Homo sapiens
tataatgtccagcaaccctctgggttaggcattatcattgcctctattttgtcatggagtttaagaagagagttcaagcaccttctccagagttatacaggatatacaactaagcagttggtatcaaatccagccagaaatgccttcagagtttgtgcttacatgtatctatacataatattttattattatatattttattttattctatctagtcatgaagtttttttcagctttccctttttaatctgctttatctctattactactatcttagttcagaactctccatttctaaactgttctattatagtctttaatttgtgacctgtctccagatttgataacattcgtatctcacaatatattttacacattgccatcattggttctttaaaatctaaacaggatcattttacttccttgcttactgaagcaagagatttttcctctgtaacagactggcttataacttcttggcatgatatacaaagtttcccaggctcatctcataccacttcctcccttttaccttattcttcagccatgccatgctacctggtccctgaaagcaccatgctctcttcttcctctgggtgcctcctcctctgtggaatcatctttgatgccagggtacattggtcacttcttttgtactcccactgcactgtgcgtacacttattagaaatagcacttagcattctgtaatgcaattgtcagttacttatttatcttatcaaggaaactatgggttctttgaaggcaatggttgttacctttggaaccttagctttaaatatagtgcttgggacatagtatatgcttatcaatgattattgaatgaatgaatgtcaactagcttttcatttttgcatttgatcgttacagtcatccatggggcctgtattcagatagccagaacctcatcattctttggcataagagagaaaaaataaatagagatgttgagccatggggctgatgtcacatagctagatagtggctaaagttttctgactcaaagcc

SEQ ID NO: 11456 - DNA, 1061 bp, Homo sapiens
tgattttggtttatcttgcttttctagtcccataagatgcatatttatgttgcttatttgaagtttttcttgtttttggatgtaggtgctcattgctataaaatttcctcttagtactgtttttgctgtatctcataggttttggtatgttgtgtttcgattttcatttgtttcaagaaattttttaatttcctttttaatttattaagcactttaagtaagttattataagtacccttatacctttttattaaatgatttttcaaggagatacctccttaaatccctgtgaattaattggctttattctttccaacttggtttagtggtagtttgcacatcaggcacaattgaaaagtcatatatacaggtcttttccttattctgagtctaatgtttatagcatattatattgaatgtctgagtaatcatcatttagccagtcaataacttaagtgtgctaatcaggaaaatactggacctttaacatggagctgttgggacagtgaaagtcaggacttggtataaaaaactggactggctagaactctttattttcataaacacccaggtagtagtccaatgcctatggtattaacaaattcttttatttaaccccatggtattagaaacttcaaatttaacctttatgatatttgaaaactcttgagtacatctaaattaaaatagtggattgagtttaactaatagaattttcttcccctgcctgatacttgaaatgagtacaaagtaataaaaactaataaaaataatcagcatcaactaagaaagaataatgtaatcagatgcaataagcttaaaagatgatggtcagggaaagaaactgaagatttcagagtgaagaggcatagaatgatttggcaactttagttagtcctagtccccagatacagaactagtgaattagcaaaattctgaggattaccactaatacttccaaaactgagaactaaggtgtgcattccttttttttcttttttcttgttcattagagaaatagtagaagtggcaatggaagaggaatatagacaaaatgtgga

SEQ ID NO: 11457 - DNA, 1284 bp, Homo sapiens
acatctgagtgaattaatgcatcgatctttgaacatataatatataactactgaatatataaagtcatgctgttttagatttcatgactgtatcaacaaatactctgtaagtaataatcagggtaatgtagttatactcgaagtgttacatttttgaattactgaagtcatctttattgaattatgtatttgaaactttgtctatgtcagaaaatgatttcaggtgacttctaattatttggagacatctctccattaaacctgaatggtattacacatcatttgtaattgttgaaattggcattatttgtataggctactttgttctaaaattaatttctatccccaatagctcactggtttatgtttgtggaacaaatttccaaaactactttttttggcatccttttcagtgatcaagaattgagttcatctttgtaattttctcctatttatgtagaaagttaggccctcctatttgatgtttgaagataaatgcaagagtatactttggatttctgaccattaagtcacttggtcaaatctttctagactgatacattgaatcatctttcttgttttcctaaatactcgagaaataatgtctttcctatatcattttgttttatcttgcagtttctttgctagtttcctgtttttgattgacctcacttagttctttttttcatcttagcatttcttccctccctaatttcttgaattccatatgctattttttttccaagagtgtgttcttcttaggatgaagaacttgtatttttctatgattatgtatatcacctgtattgttattttacttacaataagacgctccaaagcagtgctgacacaggaacatgtaacaaagccctgcgaagagtctaaaattgattgttttgtaactgttaccaaaaaaaaaatcaaaaatatacataaagctattattttggaaaagaacaaaaatgctagccataacaatgaatgagtttgcaaactatgaaatataaaaggttagagagaggttctcaatgagtaatagaatttctaagggaaatttttataccttgattactatagagtgtgtgtctatctagatgaagaaataaaataatgaataaatttgcatattttcttctttctttctgttactagatgaagcaaactttaattagatcccaatttgcttgtacttataaagatgactacatgataagcaaggataattggaataatgttaatttagcatcaaagcctttgtgtgttctttacatggaaaatgacctt

SEQ ID NO: 11458 - DNA, 1050 bp, Homo sapiens
ctgaagttttgcatgtgttacaccatattactatagtaatagataattgatacaaatgtcctacatggcctggaccatgcattccttgctaaatttatttcttgctactctgtccctctttcgtcactctctagtgatattggccttctgtttttatgatatgccaagatcatttctgacgcaagactttttccctgctattctctttgtcaggagcatctttctcctgttatttatctgagcatttatcactcattattgtgatgctcagctcaaatatcatggtttctgagagtgcttccttgaccctatgagctaaaggagcccccttcccactcattctttccctattcctttcactcctttattttcttcactgtgcttctgtctaaaattatcttacttgtttacatgcttattgtccatttcctctaatgccagtgagggagatggtatcaagaacagagtatcaagaacagagtctggcacatagtagcctttcaataaacatgtaataaatgtatgaattattttttcattaagagaacagatggtagaaactatgataggttctagaatatgatagagtatttacttattacctaggtctgctgtgacaaattaccacaaacttgatggcttaaggcaacaaaagcccaaaatcaatgcgtggacaggactgtgtttcctccagagactctaggggagagcccttccttgcctcttccagcttctggtgactgttggcattcactgccttgtggtagcatcctctgctctgtcttcaatgaccttctcctctttgtgtctgttcctaatattcctctgcctctctcttataaggattcatgtgatggcatttagggcccaccaggattatctcctcatctcaagattcttagtcacatctgccaagactcttttaggggtaacattcaaaatgaataaagaaaactacaggacaatatgcctgatgaacacagatgcaaacctcctcaacgtaatactagcaaaccaaatacagcagcacataaaaaattgcttcaccat

SEQ ID NO: 11459 - DNA, 1001 bp, Homo sapiens
aacatgacaaaaagaagcaatgggtaaaggaatccctatttagtaaatggtgttgggaaaactggctagccctatgcagaaaactgaaactggaccccttccttacaccttatataaaaattaattcaagatggattaaatacttaaacataaaacctaaaaccgtaaaaccctagaagaaaacctaagcaataccattcaggacatagacataggcaaagacttcatgactaaaacaccaaaagcagtggcaataaaagctaaaactgacaaatggatctaattaaactaaagagcttcttctgcacatcaaaagaaactatcagagtgaacgggcaacctacagaatgggagaaaatttttcaatctatccatctgacaaagggtaatatccaaaatctacaaggaacttaaacaaatttataagaaaaaaaatcaaccccatcaaaaattgggcaaaggatatgaacagacacttctcaaaagaagacatttaggcaacccacaaacttgtgaaaaaaagctcatcatcactggtcattagagaaatgcaaatcaaaaccacaatgctgtaccatctcacgccagttagaatggcaatcattaaaaagtcaggaaacaacagatgctggagaggatatggagaagtaggaatgcttttacactggtggtgggagggttaattagttcaaccattacggaagacagtgtggcaattcctcaaggatctagaaccagaaataccatttgacccagcaatcctattactgggtatatacccaaaggattataaatcattctactataaagacacatgcacacgtatgtttattgcagcactgttcacaatagcaaagacttggaaccaacccaaatgcccatcaatgatagactggataaagaaaatgtggcacatatacacgatggaatactatgcagccataaaaaagatgagttcatgttctttgcatggacatggatgaaggtggaaaccatcattc

SEQ ID NO: 11460 - DNA, 1107 bp, Homo sapiens
ctagcccaatagcaggcactcatgggttattttttgagttgagttgagatgaggcctgcaggtctgcagcaaattactattgatgccatcttgagcaagtcgttttctttctccaaactcactcttctctcttacaaaataacagacaagaacaagacaacttctgacattccttcccactcagagattggcatcccttttttaaaaaatcccagaaatttggacttaggagaccctttgaaggtcaattagcccaacccacagcttgttcaaggcagagccagattattcaaagaagtagagatttggcaacttcatggcttgtataatagtggaaatcagccaaaaagaataattgaggttaaaaagttatttgagggccagaattactctctttggtcaatatccatcacattaatgaggaatagtgaaatctctattttgctttggttttctcctttgctctctactgatatataacatatatacatcagtaaaatgcacaagtcttaagtgtacagtgtgaggaatttttacatatgtatccacccatgtaactatctcacaaatcaagatacagaacattttgacaactggagaaagcttcctcatgccttcactaccctctctcaagggatagatctaatttctatcactgtaggtttgttttgtctagttttgaactttatatgaatggaaccacagcgtatataacccattgtgtctgacttttcactcaaccttgtgtctaagattcatccatattgttgcatatgtcaggagtctttttgttgttgttgcaatgtgtgaattgtaagactaccacaacttaagaattcatcagtgcagattattagctacagacgaggagaaaaagttagaagatttgtctcctaatcttattattaagtagctacatgaacctctctctgggcccattttcctcaactgtgagtgaagaggtcaggctaaagaatcactagcaatttttctaattctaaaggccaaagaatgtatgtgaatcacagaccaaacaagcatctggaagatatgaaaaaaatcacatatctgacaaagaactcatcctagaatatgtaagtgactcct

SEQ ID NO: 11461 - DNA, 1105 bp, Homo sapiens
cgagaaagctggccgcgaaagtcgtgctggaatcacttccaacgaaaccccaggcatagatgggaaagggtgaagaacacgttgccatggctaccgtttccccggtcacggaataaacgctctctaggatccggaagtagttccgccgcgacctctctaaaaggatggatgtgttctctgcttacattcattggacgttttcccttagaggccaaggccgcccaggcaaaggggcggtcccacgtgtgaggggcccgcggagccatttgattggagaaaagctgcaaaccctgaccaatcggaaggagccacgcttcgggcatcggtcaccgcacctggacagctccgattggtggacttccgccccccctcacgaatcctcattgggtgccgtgggtgcgtggtgcggcgcgattggtgggttcatgtttcccgtcccccgcccgcgggaagtgggggtgaaaagcggcccgacctgcttgcggtgtagtgggcggaccgcgcggctggaggtgtgaggatccgaacccaggggtggggggtggaggcggctcctgcgatcgaaggggacttgagactcaccggccgcacgccatgagggccctgtgggtgctgggcctctgctgcgtcctgctgaccttcggtgagtgattctggaggagcagacgtcccccctccacacacgcggccgcttctcgaaggtcctgggggcgttgaacgtgggaggggggatcccggggcctgcggtgggccaagggacgtcaccattcctcgaaagagggcaagggaattacgtttattctcttcttcctctggaaataaaaaaagagagcaacatcatctaactgccctacagatctaatagtatctcgcccggaggtctcagcgacctcggggtggggcctctctgaggctctggctcccccgggagctgtgcgagtccctcccccctccccgcccggaggactttttcggccaccgcaaccttcggccatcccagctttcccgtcccctaattccccagactccgactcctcgcaagcccgtgtcccttcttagatgctggcctcgggagcgtgaggcctggggccagcggaatggcagt

SEQ ID NO: 11462 - DNA, 1859 bp, Homo sapiens
gttttgctggagttcggttcttaacatttctcccccttctcatgcctctgggctcaatttcagttcccctcgccagaggttgcataaatcctatttgcattctgacctgtgctaacgaaggccgaagttttggcttgatcagttgggaggccttggctcggcctgcgcgcaacacgtgtgggtgtagaagaggcctggtatcagtctgcttaacgttatttataaatgatcggagacacactgtttagaagtggtgactgcctccgtatttcaggatctactggagacttcagcatctgaacttaaatagatgttctgtcttggctttacctttggtatttaaaccagggaatgcactctttcatccccacctcccttagttaccaactgaattttgcaacccctacccttccctatttgatcatcctccttggagaagtgtgatgttgaagagtttgcccgtgttaaatcttcagggtcggtcagagctgacgatgaagttgatgtggatggtacagtagaagaggatctgggtaaaagtagagaaggatcaaggacggatgatgaagtagtacagaggtttgtgttcatttgaacttacgtatacagataagccgtgtgaaccttgtgagttacggtcacttcttatgtatctcttctccaaaggtccagataaagtctaacaccctgtatttaaatacccggtgagttgtgtgcatacatacctcctaacttgtccctaggagtgatgaaaactgagtgaattcctttgaaaactatattgcagaatactagcaccataaactttgtaagactttatagaagatactttcagttggatttgtattcattaactgtgtacaccgagtaagtttaaaaatgggatttctgtcagttgaacaatattttaaaatttggcctcttgggacttattgacagttttgaagtcctcactgtggagcataaatgagtatgactttgctttttagtagaggaaagttgggatttttttttttctggcaattttaagaaccgagtatttccagtgtaatgttaaaggtagcctactgctgtgctaacataatgagacggtatatcagttatattttataaaggtttccattttaacccccaagacaatattcagaggcccctgtgctttcatcataattcctctagttttgaagggaactatgccatgcaatatttgcttacctaactgatttccttagagaggaagaagctattcagttggatggattaaatgcatcacaaataagagaacttagagagaagtcggaaaagtttgccttccaagccgaagttaacagaatgatgaaacttatcatcaattcattgtataaaaataaagaggtaagcaacatgtggttagaatattttatctctgtatggtggcatacttgtttacttaaatttgcttaatttactgcaaaagtaatgtagtatccaagtaagtaggtaacaacctttaaatacctaatatgtccaagaattgctaccagatatctgggaagaaagggagtgtcagacattttccttttcctttacctctaaataggttcacggcctgataatagttgtgagtctaagggcagtcacataaactaaacttcttgcattgcatacctgaagatcactgttaggtgaataagagtgcttttataaggtacagagaagaaataaatgggtttggcataaaatcgaatatcttaatgcatcttgaggatagtctaagtgtattccctctggcttccatttagattttcctgagagaactgatttcaaatgcttctgatgctttagataagataaggctaatatcactgactgatgaaaat

SEQ ID NO: 11463 - DNA, 1175 bp, Homo sapiens
catttaggccagtctgcccatttgatattaatactttctcaaatacataaattactttaagatgtacactttcagaaaaggccataaaaaactatgtggaggaaaatatctcagtttagttttctgtattggaattgatgggacccaaagctggttagttcctcaatatttgtttggcataatgtaaatattaaatacaactatctggttcttgtcttgcatttagtgtgataaggagaagaacctgctgcatgtcacagacaccggtgtaggaatgaccagagaagagttggttaaaaaccttggtaccatagccaaatctgggacaagcgagtttttaaacaaaatgactgaagcacaggaagatggccagtcaacttctgaattgattggccagtttggtgtcggtttctattccgccttccttgtagcagataaggttattgtcacttcaaaacacaacaacgatacccagcacatctgggagtctgactccaatgaattttctgtaattgctgacccaagaggaaacactctaggacggggaacgacaattacgtgagtatgaccaattccttataagaattaatagtcatggtgaggatcttgactctccagttctattctctgagcaaatgacttattctgggccttaattttcctgccttataaaatgaggaaacagaactgttgtcacttgaagaaatgtttgaggacctgcaaagggccaggcacaaaggtttgtgattgctgttgtacatggagggtataaagtaggaaatagcagcagcttccccaagggagaaggcttcttgggtacccacagaggaggcactgcttggtcagtttcccaggttagaagagtaatttgtctgtggagcatcctgaataaaggcatggaggcatagcatgctcactagatgaacagagttcttttcggtggcagttatggatagaatgtgatgaacttttatttatttatttattttgagacggagtctcactcttgttgcccaggctggagtgcaatggcacaatcttggctcaccacaacctccgcttcctgggttcaagcaattctcctgcctcagcctcccaagtagctgggattacaggcatgtgccaccacgcccagctaattttgtatttttagtagagatggggtgtctccatgt

SEQ ID NO: 11464 - DNA, 1036 bp, Homo sapiens
attctcaaggtggtgtggaggatgtgaggagtggacaaggggagactctttgggggaaatattcctcttgaaaatattcaagatgagtggtagcaaccagggctggggctggcttgtagagataaagggcttaaagaaagttcatgaaagttgtgaaagctgtggaataaaatacgtcatttaaggatagttacaagtttttaaatttgaattaagatccctcttaagccagtaactgttgtttgtatgggtgagacagagccagtgccctacagtagctctcgttgcttatagcactgtgacgtagacagggcagctttttgcctttttaaaattttaccatcttggagatgaggaaattctatttcagaggtcagttggcttgccaactcctgctaagtgagtaacagaatgtgcccacagcttcaatttttttttcttaattcagttttaagttttcttaacattaagggaaagaagcacatacttatcattgtgaccaactttcttcatcctagaaagtaacatttcctgtttttactgcagcagatgttcttttaatgaagactaattagatgactgcattttagtacttttttaacttgtgttcccaatttaccttcccctgccttcgtcactaacattgatgtctccaggtttcatttggaggcatcactaagagttatgccccagtgccctctctttttaagcactgggctagatgttggagaaggatagggcaatcattcccaaggaaagatagaaagtgatgtcccaagagatgttaatgtcaggttgctaagaagcaggtgaaattatctggatataagctccatgaaggcaaacattttgttggaagctccattcccaaagcttaacacttaattggcagccatttgtatgaataagtgaggttaaacaggacagttccatgcagggaacgatggctgctaacacctatccaggacctagtttccatgaccatgcatatctttttaaaaatttcctttgcccacttcttaaatgttaacataca

SEQ ID NO: 11465 - DNA, 1860 bp, Homo sapiens
atagtagaaatgttctatatctgcacttttccattttggcgatcaccagccacatgtgactgttgagtacttggaatgtggcagcataactggaactgaactgtacattttatttaaataagtcacatgtgcccagtggctgccattttggatagtgcagatataaatataaaccagattaattttctagcttttttaaggaaaatgttttcattaattaggaatagttatctacaataatcattaggtttctggaataacagtaagagctatgagagtgcatgattccatttctctccagaatatttcagtgctttctcaccttgaaaaatgaaaacaatctattcagacggttgggaatattttaattttctacttaaaactaaggttattctccacttgaggtaatgtagaggagattcttctctttactgtatctacatgtgttacattttagctcacaaacccttgttggtgatggagagttaacatgaataattaggacatcttggattatactgaactgctggctattaccatggtatttaaatgaatttataatcagatcttctaaatgttaggtgtctctaaacatcgaatttttcttgcagccttgtcttaaaagaagaagcatctgattaccttgaattggatacaattaaaaatctcgtcaaaaaatattcacagttcataaactttcctatttatgtatggagcagcaaggtaaatctatattgattaaaaacttatatgtattaccttggcacgtatttaaatattcaacactaaaagaatgaaggcaggccggcgcggtggctcatgcttgtaatccccgcactttgggaggccgagacaggtggatcacctgaggtcaggagttcgagaccagcctggccaacatggcgaaaccctgtctctactaaaaatacaaaaatgttagctgggtgtgtggtagcacacgcctgtaatcccagctactcgggaggctgaagcaggagaattgcttgaacccgggagacggaggttgcagtgagccaagatcgccccactgcactccagcctaggtgacaaagcaagactctgtctcaaaaaaaaaaaaaaagaatgaaggcaaaatgtggtctattagttaaggatactctcagggttttcttacaaaaacctattttttgacctgtaatgttatatcatattctgtagacaaaatcagaattgttaaacaaatgagtttaaccataattctcttatttcaacagactgaaactgttgaggagcccatggaggaagaagaagcagccaaagaagagaaagaagaatctgatgatgaagctgcagtagaggaagaagaagaagaaaagaaaccaaagactaaaaaagtaagtctggtttatctccctgcataagatattgtttaacatgtataggcaaaaccaggaaaacctaagtatgcactggctgatttgaagtcagcttcagttcaggtgctaagtccatggagccagcttttaaaataaggcctttgtttgtatgttgaatacattgtcctgtagaaagttttaagtatcaaacccaggtcatttttatgaagagttttctaacttttatatattgcctaggactggtggcttatatgtttggaattttaaaatcttaaaaagccttctgagtcctcttttgtctttttatcatgcagagattaaccataaaaatggttctctggcttgcttaggtagcagactaagaagtattgatcatggtggttgagaaatatttttgtaaaatgttggatttctttaagtcatgaaatgggaatatataatatgtatttccttctaacctcaaaacaaatattttcaagaa

SEQ ID NO: 11466 - DNA, 1062 bp, Homo sapiens
atactttgcttttgatacagttggcagaaaccttactagataacaggtatcctttggtgccctttttttttttttctttaatttggagacagagtctctgccacccaggctggagtgtggtagcacgatcatagctcccttcatccttgaactcctaggcttaagcagtcctttcacctcagcctcccaagtagctaggaccacagacacacgccaccatgactggctaagttttaaaaattttttgtatagttggaggtcttgctatgttgcctggactggtcttgaactcctaggctcaaacagttctcctaccctaacctcccaaagtgctaggattacaggcgtgagccaccacaccagtcctctgggtctttacatagtcttttgaaatctactgaagccatggttactgctaggataaccttggtgagtgctgagagagactaatcaaatactataataacttcaggttgaaaaaactgtctgggactgggaacttatgaatgatatcaaaccaatatggcagagaccatcaaaagaagtagaagaagatgaatacaaagctttctacaaatcattttcaaaggtaaatatttataattccctagtttctggttattaatgaatagacaaaatatcaccctcttagtttaattgtatatggtatgtgaccatgaatatgagatggtccattcccattttttcccagtgagaaaattcaaaaaaagacctttaggccaactataatatgtctacttctggtttattgacctagtcacaattaaaatcacatttatgaacctttgagattgacacctcagtagagatggtctttgagagtaattggtttccagaacacaccatttttacttaagttgaattattatactcatcactacttcaaaattgcagcagttattaaaattagtcctagctcttagtgaatagtgaaactacaaaatcaagaatgtttgaaacagttttatggctgtttaaacacaattggtttcctttttattcctgtgtattttgtaatatgtgatttttttaaaaaaatta

SEQ ID NO: 11467 - DNA, 1866 bp, Homo sapiens
cctaagaatctgattctttttctcccaacatttaataatgaagtttcaaacatctagaaaaaaattaaagaattgtacaggtccaggattaacattttgtcatctagacacatagccacctttttatcaagcctttcattaaacctttcccctccaatacttccataattagaagactctttagtttttgaatttaaaagtatttgaaagtagcatatttgttcacttcatttagatgctagagagagagtatcactgagtcctaaggttagaatataaacattaaggcaatcttgtggctatttgcacggacagctgaatttcagcccaatctgaatgaattggagtgcttcaccatttcctgcccctcaataaatggcaataacgatatcgtctttgtgtttttcacactcctgcctgggtaccttacattctcaaaagttggagattaacttctctaatcagttattctttcattgtgtttaggtgattaggaagaagcttgttcgtaaaacgctggacatgatcaagaagattgctgatgataaatacaatgatactttttggaaagaatttggtaccaacatcaagcttggtgtgattgaagaccactcgaatcgaacacgtcttgctaaacttcttaggttccagtcttctcatcatccaactgacattactagcctagaccagtatgtggaaagaatgaaggaaaaacaagacaaaatctacttcatggctgggtccagcagaaaagaggtgagatgaactcataagtgttgtcagccattctggaaggtagctagggatttatagccaactcttgagggggagaaaaggaaaacttaattgtgtaactggagtagttataaggcctggtcagtcactgacaggaaggtcatttatattctctgaacctcttaattcttcacctgtaaaatggagtttttaataatgtataaacatagcagctgctaggataaacaaatacaccagggccagacttggaaaactttgtgacttcttaattttgtaggctgaatcttctccatttgttgagcgacttctgaaaaagggctatgaagttatttacctcacagaacctgtggatgaatactgtattcaggcccttcccgaatttgatgggaagaggttccagaatgttgccaaggaaggagtgaagttcgatgaaagtgagaaaactaaggagagtcgtgaagcagttgagaaagaatttgagcctctgctgaattggatgaaagataaagcccttaaggacaaggtactgtggaaattacaaattgtggaaatattagtatcagcatttaagagaaagttattttgtgaacaaattaagctgcagctggttactttgtaaccattagaatggtaaaaatttaattaatgtaattaaattattgggagaaagcttaaaactttcgacaatactgctttgttaataacttgttacaaattaaattttatgtttttaaaaggtggtatttaaacttctgactagaaaattcagattatcaagtaagtgcccctacaaattctcctaaaccttaagaaaagctatttttatgacctgcttctgtgtttatgatcttaagtgataaagtcttagacagttgaaagacaattgctcaatgaccttacctgttgatattaatttatatgacttgatttctttccctaagattgaaaaggctgtggtgtctcagcgcctgacagaatctccgtgtgctttggtggccagccagtacggatggtctggcaacatggagagaatcatgaaagcacaagcgtaccaaacgggcaaggacatctctacaaagtaagcatcctcgggaaagtccctgccagggc

SEQ ID NO: 11468 - DNA, 1558 bp, Homo sapiens
cacatcccaagaatacggtattttctatctgagtttggttgctgaacctgcacatacggagggcggactgtatttattggaaaaaaaatagcatataagttcaaacctgtggtgttcaagtgtcaatagtacattttgattttttttttttaccaagagttgttctgtgtaattatgaaagaataagggaaacgtatgaaccctaaaattggatatgttttgttaatgttcatttttatctcttaacagttactatgcgagtcagaagaaaacatttgaaattaatcccagacacccgctgatcagagacatgcttcgacgaattaaggtagtattaaagcagtcctcttgcttgtcttttaatttgagtactttgtatcttttaatattaatctagtgcatcttcttgcatttcaggaagatgaagatgataaaacagttttggatcttgctgtggttttgtttgaaacagcaacgcttcggtcagggtatcttttaccagacactaaagcatatggagatagaatagaaagaatgcttcgcctcagtttgaacattgaccctgatgcaaaggtttgtatccccaaccttcccgcaaaggctggctggctttctttgtttctgttctttcagaataggcctctcatgattgagggatgtagctttgcgacatttgcctaatttctaccttttgaaagaattttattgaatgtttgaatccctgtagtgtcaggcactgcactagaaactaagtcctccttttacgtcctctttcctttttgcctgcctccttttgttagcttggctgttcattctagttaagaggatttagtctgtggttctgaataaacagaagtgacattaattatgattttatacatataaatgagcaaagtggaaataaatccaaggcattaatgggcccataaatgttgtgtttaggtggaagaagagcccgaagaagaacctgaagagacagcagaagacacaacagaagacacagagcaagacgaagatgaagaaatggatgtgggaacagatgaagaagaagaaacagcaaaggtatggcaaatcaagaatgtgacttgcattttcagttctggcaaagttaggacagagttttagttctggcaaagttaagactgtgtaacttacagaagtcagactgagcatttaaattgtttatttcatgcacaaacctgtgagctaggttttttttctgctaacttttaataccttctgggttttttttatttatttacaggaatctacagctgaaaaagatgaattgtaaattatactctcaccatttggatcctgtgtggagagggaatgtgaaatttacatcatttctttttgggagagacttgttttggatgccccctaatccccttctcccctgcactgtaaaatgtgggattatgggtcacaggaaaaagtgggttttttagttgaattttttttaacattcctcatgaatgtaaatttgtactatttaactgactattcttgatgtaaaatcttgtcatgtgtataaaaataaaaaagatcccaaata

SEQ ID NO: 11469 - DNA, 1074 bp, Homo sapiens
tcgttgatgggaaactcagtgtgaatcaacagtataatgtgggtgccagtatagctagtgtcatgggttctgcagtttgtctccaaaatgagcaagttggtagccctgctcattttcgggctgatgaggctttatctggagttttgtttgattccgagcaccaaaaaatgaagaaatttgaaatcatactacatgaggaattatactatttgaggaatactgtatgaggactggcttattctaaatctttatatttacagtttctagtagactgtacatatggtgaatacacagacctccatctagcaataccaaatggaataatagttatggtgctatcgcatcataatttacataaccagacccctttagttgagcatttggattatttagccttgttcattattttgtaagtattcagtatggtatatgctttttttaagtgaagataataaaatgtatttagaaaatagcaacttaggctgggtgcagtggctcacacctgtaatcccagcactttgggaggccaaggtgggaggatcacttgagaccagaagttcaagactagcctgggcaacatagtgaagccccatctctacaaaaaatttaaaatttagccaggcatagatgcatgtacctgtagtcccagctgctcaggagactgaggtgagaggattgtctgagcccaggtgtgtgtggttactgtgagctatgatagcaccactgcactccagcctgggtggcagccagaccctgtctcttaaaaaagaaaaaagcaacttaaatccctaaaatagtgtaaaataattgaagataaaagaagttggagtcattaattttagagaaaaccttaaaaatttagttttttgaaatacagcaaatctagctaggcatggtggtgtgtgcctgtagtcctagctactcaggaggctgaggcaggaggatcacttgagcccaggagttggaggctgcagccaactatgatcatgccactgcactccagcatgggtgacagagtgagaccccatctcttaaaaaaaaaataattaaaaaaataaaaaaatagcaaatctg

SEQ ID NO: 11470 - DNA, 1031 bp, Homo sapiens
cagtttgcattttcatgaagtgctcaaaatgggacatgtgaaattctgagagtagtagtaagaaacatgggagagtggtaggtagattgccttcctgaccatgtgacagagtaaaaacacgtttcatacatttttttttttttttgagacggagtttcgctcttgttgtccaggctggagtgcaatggcatcatctcggctcaccacaacctccacctcctgggttcaagcgattctcctacctcagcatcctgaactagctgggattacaggcatgcgccaccacacccagctaattttgtgtttttagtagagacagggtttctgcatgttggtcgggctggtcttgaactcctgacctcaggtgatccgcccgccttgacctcccaaagcgccgagattacaggcgtgagccactgcacccagccacatctcatgcattcttttgctcgctcatttattgtcaccatatgcctttgtttctatatattcaagctaaatcaaggtgctattagaatctcgggaagctgccgctgaccacagtcagaacttgcagtttctttagttagaattgccataggaccactgctcaagacttccagatctaacctagccatatccaactcatcattagaatatttaaatcatgaatgttgaacaaccaatattttaacaatttattgcatagagctactaataatattaaataaaactatggaaaaaaaggacattttactttgtgccaggtatgcttctaagcatagttctacatcttaacttctagtccctgtctacatattttcccttatgtgtagccttagttatactattttgtattcttttctgttttaaaatatatataaactctttcctgttcttttacataagataaataaacttaattttttagctgcatagtattttctcatgttaatgtattgtagtttactaagtcataactttatttttatttaatttgtgaacaataaaagaaataaaactcttatgatacaggttaatctctttctcac

SEQ ID NO: 11471 - DNA, 1087 bp, Homo sapiens
tgatcatgccactgcattccagcctgggcgatagagtaagacccagtctctactttaaaaaaagcaaatatttctaaatggcataaactaactttgtttttcttttctggcagttgagagcgtggagttaagaggagaatcagctttcagtggcattcctaatgggcagtggatgacccagtcatttacagaccaaattccttcctttagtaatcactgtggaacacaagaacaggaagaagaaagccatgcttaagaatggtgcttctcagctctgcttaaatgctgcagttttaatgcagttgtcaacaagtagaacctcagtttgctaactgaagtgttttattagtattttactctagtggtgtaattgtaatgtagaacagttgtgtggtagtgtgaaccgtatgaacctaagtagtttggaagaaaaagtagggtttttgtatactagcttttgtatttgaattaattatcattccagctttttatatactatatttcatttatgaagaaattgattttcttttgggagtcacttttaatctgtaattttaaaatacaagtctgaatatttatagttgattcttaactgcataaacctagatataccattatcccttttatacctaagaagggcatgctaataattaccactgtcaaagaggcaaaggtgttgatttttgtatatgaagttaagcctcagtggagtctcatttgttagtttttagtggtaactaagggtaaactcagggttccctgagctatatgcacactcagacctctttgctttaccagtggtgtttgtgagttgctcagtagtaaaaactggcccttacctgacagagccctggctttgacctgctcagccctgtgtgttaatcctctagtagccaattaactactctggggtggcaggttccagagaatgcagtagaccttttgccactcatctgtgttttacttgagacatgtaaatatgatagggaaggaactgaatttctccattcatatttataaccattctagttttatcttccttggctttaagagtgtgccatggaaagtgataagaaatgaacttcta

SEQ ID NO: 11472 - DNA, 1044 bp, Homo sapiens
agtctgaattttaatttctaatatggtaaatattgatagatataacccacatgaacaacagctctttgaggccgtcaatagtttttaaggatagaaagaggttctgagaccaaaactgagaactgctgctctaaggagtgggttttacttggtaattgttttctaaaacatttgtaccaacttatactcccactggcagtggttgagagttcccatggcttcacatcttggctaacacttggtcttgactatctttgtatgtgccaactggatggctattatgtggtttcttagtgtgggtttaatttgcatttccctgattactaatgaaattgagtgtctcttcatatatgggtccatcatgattcctcttctgtgaaatattcctgtcttttgcccatttttctattaggttgtctgtctttttttcattgattcatatgatggataccaatccttggtcagttaaatatattgcatatatcttctctcagtttgtgtattgtctttgtaattgtaaataatctgttgatccacttggagaaaactgacatcttttcagtaatgagtctttccagccaaaaccattgtgtagctttccatttattaggtcttctttcatgtctcaatgaactttaaaaatgttctccataaaggcctttacatcttgtattagatttcatcctagtggttttatagtttttaatgctgtaaactgaatttttatctttttaaaatttgtttttatcttaaaatttttctcattatttttattgactttgttaatttcattcaaaatgcataacaatatttctatataatcagcaataaccagaatggaaagtataattttaaaaattcagtttaattaaattcagtttacctgttatggatggtaactgaattttactgaattactgaatttttaaaattatactttccattctgattgttgctgatttttaaaattcagtttaattaaatttagtttacctgtttctatctggtaacagataaaattatacctgttaaaattatactttc

SEQ ID NO: 11473 - DNA, 1026 bp, Homo sapiens
ccaccgcgcccgactaatttttgtatttttagtagagacagggtttcaccatcttggccaggctggtcttgaactcctgacctcatgatccacccgcctcggcctcccaaataagcagctatacttttgaatgttggcgtgatttatgtctaatgaataggcctcatgtcagtgtaactgtggaatctgtatgttccactgagttcacccctttgtgaaattttaccattagtgcctagtttcatctgtagcgttgtgtattgcttcaggattctttttaagaatgcaccaggtaggcagagtgttcttaattttgctccacggtttcaaatgtcaaggaaacgttggaagttggattttggcattcagtatagatgcagagttgaaagcaagatcaaactgggaggtgttttgtgaaagttgagataaacgtgtattaagcttcttttttgaagcttttctgaattcgggatttaccgggaaagtaggacgtttaattttagcggagtagtgcaatgatttaaccctgactagaactctgacgtttacagctagccttgaggccatgttttcagccagtgtgcggatttgccggggtcagactccaagcttgattgtgagttctagcctttgtcagaaatgcagcaagtcatgctaacttgcaagggagtcaacagagggcacgcggtgcctgcggggccgggacggaagccccgcccccggcgcagttcccgcctgttagcgggggagaagcaccttacacgctccgctctgcttttgtgccacacagaggacggtcgggccctggaaggaacgctctcggaattggccgcggaaaccgatctgcccgttgtgtttgtgaaacagagaaagataggcggccatggtccaaccttgaaggtaggagagagtaacgtatctttttaaacgggggatgagctcgttgagctcagcgtggtcacagcctgccttttaaagccagcgtggatgtgaccctccaaacgggacgcagcgctgggaaatgac

SEQ ID NO: 11474 - DNA, 1017 bp, Homo sapiens
ctcgggaaagagctaggaatctacccccgcccccccgccttttttttttgagatggagttctgctcttgttgcctgggctggagtgcagtggcatgaactcagctcactgcaacctccacctcctgggttcaagtggtgtggttctcctgcctcagcctctcaagtagctgggattataggcatgcaccaccatgcctggctaattttgtatttttttagtagagatgtggttttgccatgttggtcgggctggtctcgatctcctgaccacaggtgatccacccacctcggcctcccaaagtgctgggattacagtgtgagccaccacgcccggcttgccttattgtttttgttttgttttaaataagctccctccaataatttttaggataaatgtcaagtttgagacgctttaatattattgtacatagggtagtttgatcaagatcatttgatgagataattagaattgcggaaaacaaaggactagtctttaatacccaaaacatatttgttagaaaacagcaaataggaacccaatgggggaggaacactttttgttgaacactttaacaatgaatagaaaaatagggaaccaagctgtttgcagccagggcttttgtatgtccatgtataaagttggaactagggacctccaagatggttaagaactatgaatagagttcctactgctcaaagatgtggctttcataaacatcttggtttttaaagcaaagttccagtattcttatagggaacctcttttgtatgtaaatcagcatctccctcaggattccagggttttgaaatcacttgtagagaggcctattggtggtactgagaggagaagcagagtgagtgaaaaagtatttactggaataataccaagtgtcagacatagttaagactttagtagtttgaggtaatcctgggagataagactaaaactgacaactcagggcttaaataatttcttcagggcaatattaggagagatgacaggcaccaagcaatgc

SEQ ID NO: 11475 - DNA, 1064 bp, Homo sapiens
ctaaaatatttctccctacagttttcctcctcacttctattctttatttcaacacctgtcttctcttcctaccacaacccacttttccaactgcctacccgttcagaatacaagaccaaagttttccattcctttcctcctctgttcccacgacaatcccataagtctttatttttggaaaaggaggaatcctgccaatgataactttttggcttacatatcgaggtcagagagctagtcttattctttatgcctgtggtcccaggcatatgttagagcccagcagatacctaagcaaatatgcctgttaatgattataacatttatttgttgaatacctattatgtgttagactctaaatgttgttaatacttagtgattaaatccccacaacagtcctgtgaaggaggtgatattatccaggtttacagaagagaaaataaaagccttgagaatttaaggagcatgcccagattacaagctagttaagtggcagagtcaggactagaacccaggcctgtttgcctgcaaagctcactctcatgtactcatacttctggcacttggccttatgttattgctattgagatacatgcttgtgtccttgatgagatgctgtggtgtgctcatgattcgaggtcaggcccatgcaaatcttggtattcctagcatagtgctggcatatggtaggtgttcattcattacatgcttgctgaatggaacttcattcttctgtgcctacttgtactttctttaagagaacaatgaggctgggcttctaaaaaaaaatatacattttaatatcttccatatattgaaaaaaatttctttagaggcaaggtcttgctctaacccaggctggagtgcggtggcactatcatggctcgctgcagcctcaacccccctgggctcaagcaatcctcttgcctcagccgcctgagtatctgggaatacaggcatgtaccaccacacctggccaatttttaaattttttgtaagataaggtctttacaaaaggctttttgttggcttaggcttattttttaatacctagtgtgcattca

SEQ ID NO: 11476 - DNA, 1109 bp, Homo sapiens
aaaaaaaaaacctgtctgtaaggcagtgaatatgcaacattaagactaaaaaagtcattgcaaggaagacttaggatttatgagtgagtatccatattctaaacaatttctgttattgtactcagcaaaagtagtgtctctgctgtagtagttgaggtatcagctaagggtgaaaggtgagtagaaacacgaagaaggaaaaggcattctaggcaagagaatagcaaggtcaaatgcatggaattgttagaagttaggcacgagaggaccattagatttatggaaaaactattatatttgataagctgggcaacaattgaataacttcatctattaatatcctgagaagatgtttttgtcaaactattatacattgaacacaagatcttgctatccagttgtagtttttatctactgaatttcttctctggcccctagtgtccctttgtggtctttgctagtacatagaatgtccttcacaatctacgctttttcatcatgtaacaactttgaatatttgtcccactttaattttgcatttctatctttttttttccccctcgagacagagtatcactcttgcccaggctggggtgcagtggtgcaatctcggcccactgcaacctctgcctgcggggttcaggcgattcttgtgcctcagcctcccaagtagccgggattacaggtgtgtgccatcacacccagcaaatacttgtatttttagtaggaacagagtttcgccatggtagccaggctggtctcgaacacctggccccaagtgatccacccgcctcggcctccggaaatgctgggattacaagtgtgagccaaattttgcatttcttaatagggctttaaatgccaggaaactgaccttgctgaaactaaaacatgttagtttatctggatgttcttcacttagtgtaaagccataaaggcttttttctttccgttgcataaattacaaccttatttggagattattgccaaaagtttgggtcattaagaaagtaacttgagaaggtgcagtaagcatacccataagctttcttccccttgatccctataggagcttaatttttggtagtcgtggaattttgccattaaac

SEQ ID NO: 11477 - DNA, 1045 bp, Homo sapiens
aaaacttcttcagtattctgccttagaaaccaaattagattaaactttaaaatgatttttaaaatatcaccttataggatacaggttgcattaagggctgtagactatcagtaaacctgctttttcagctacttggcaacttgcttggaaatggccactttcttttttcaggttattgctgaatctgttattgtttgagtggaattatgtgagagaagtctaaggtttccagctgattctaacaattttactactctattctgcataattttaaaatctactctcagaactatctgaatatctgttaatttttatcctggagtttaactaatcatcatggtgtgtgaagtacccaggtattaattattcgttatgctttaagctctatagcttaaaaaaaaatcatggatttttaacagcccatttccaatctgtcatgttaacctttccaactcactttaataattttattttccaggaggcagcccaatatggcaagaaggtgatggtcctggactttgtcactcccacccctcttggaactagatggggtaagcttttaagatactctagaagtgatgttgccgaagtagttttcccctggcaataatctaactggttcctaaagcctaattaaaaaaatcaaaaactaagttaaagaaaaaacagccccaaaacatatatatcttttatttgagccaagttaaaatggatcaggttaaatgctaaaaatttaggttctttggcacagagtcaagaagtaagaaccctgtctacaagctatgatttaaaggtaaatatttgagtaatctagcatatataggggcttaataactgaaaatttaaacttttcatatgtggatttgttttaaatctacctcctacattcaacaagagttggaatcagataccctactgtatagcccttgctgcttctgagtcttgatgaattatatgttcataatatttactgaacatttattatgaaccaaggcaatgacgatatagcagtgaactcggcatattcaaagttcatgcccttgtg

SEQ ID NO: 11478 - DNA, 1030 bp, Homo sapiens
tgagccaccacgcccagccaatatacaccaaattttatatgcagtttaagacccactgcactctaatcatccccagcatagcaacccctttatcagttacctctgcatagattcaatggcaagtgcagatgctgcttgaattacaatgggggactacatcctgataaaatcctttgtaagttgaaaacaagtcaaaaatgcatttaatacacctaacctcccgaacatcatagcttagcctggtctaccttaaacatgctccgaaaacttacattaacctacagttgggcaaaatcatctaacacaaagcctattttataataaagtgttgaatatctcatataatttactgaatactgaactgaaagtgaaacacagtatgggtgtatgggtatcaacataaagagaaaaatcgtaagtcgggtcgtctgtatagggttgtgtacatagtaagatttcaatttctggcatctttatcagcagtcagttaattttgtatctttgaagtatacggaaattgtggaaatctgcccctctttttgttttgttttaggatgatgttaccgtgtttggtatgtaagggtctctgaacttatggatgttgtaagagttaggaataaactttattactgaccacattaagcaaatataatacaatatttcttagagttgtaataattgttgactttgttctttgaatgtttgtaaggcttggaaagcaggttataaactgatttctcaatgttgttgtaggtctcggaggaacatgtgtgaatgtgggttgcatacctaaaaaactgatgcatcaagcagctttgttaggacaagccctgcaagactctcgaaattatggatggaaagtcgaggagacaggtatgagagggaaaagctactcttctgtttgtgcttttgggggtttgagctgcaatttttgtgatgcgtcgtccattttcatgaagatagcaaatagcctagttgtttttattgtttacatttttgatggatataatcactggagttatcctttgtc

SEQ ID NO: 11479 - DNA, 1038 bp, Homo sapiens
gattttgctatcatatcatcctatggggccttgtgtggaggtatggtaaagtgtaagtatgctggaccagaccgcctggttttgaggcttggctccagcacttactaacattgtgactttgagtaagtctgttaactactcagtcttaatttatcctttttactatattattgtcctcattatgaggatgaaatgagacaatgtagtgaatggcctttgttaactatgaagtttacaattctgaggaatgattacttaataaggttttcatattggttcctttgtaggcaacaaataataaaggcaaagaaaaaatttattcagcagagagatttctcattgccactggtgaaagaccacgttacttgggcatccctggtgacaaagaatactgcatcagcaggtaaaggaaaaaagcagggtggaaaagaaaaacccattgtggatattgctttcgcatttttcttcaaacccactgcgtcaatttcttgggcttcagacagatttctttgccacattgtgccctctctgggggcaggggtttgggagaaagagaaaaaggaaaaatgattttaaaggagaacattttaaatattgaaaacttcaaacattggtcatcttgctacacagagtatcactaacatactagtatagatttacatttgtattcgaaatttatttatgcatgtatgagtatgaaagtatgtaataaaaccaaatggatattcacaaacattttgtaaaataggtatgatacatatatacatttagattttgtaaaatgaggatcatgtattaccctttaacacttgcagagtggctgctaaaagaattagaggctgtcaggccatttagatttatcagaatctagaccctactcaatgctgtttgaatggttgcagtgtcagtgtagaaggacctcctgaaacaagtcaagcaaggagatgttttgctgtgtggtttatttttgcccgtcaaatggtaacactgctgacattgttcaggagctttcaattatgaagtcattaagacagagtg

SEQ ID NO: 11480 - DNA, 1061 bp, Homo sapiens
ctatactatagtgattgactcgaactccattcagtgaaaaaaatggaagaattagctatttgtatccatatgggatacaaaaaagcagggtaacaaaagaatctacatcatcttgccatttgcaggtaaagcttcttaaaaaaacaagagaaatgcaggaagaaatgcctaggaatgataagaccaactcggtggagggaaaggaggaaaaggccaatggggtggcacacacagggctaactgggcactttatacccttctttatatccaaaatattttatggtgaatttcttttagagggttgacaagcacctgtgggtacctgatctgttttaatcatcctcatgctaacaaaattcttcagtagatataacctaaattttttttctctttcatcttggttttaaaatgtcttcccccttttattctctggagaaatagaagatatccttgatcatactacttctctgttttattcattttggtagtcgcctaagatggttttaatgcatatggcattatctgaactgttccctgttacctcatttgctcaggcatctgaagatgttgtgctttctcttcccctgcaggtattcacaacattgtctgtgaccaagcgctctggggcaagcatcctccaggctggctgctgaggttaagccccagtgtggatgctgttgccaagactgcaaaccactggctcgtttccgtgcccaaatccaaggcgaagttttctagagggttcttgggctcttggcacctgcgtgtcctgtgcttaccaccgcccaaggcccccttggatctcttggataggagttggtgaatagaaggcaggcagcatcacactggggtcactgacagacttgaagctgacatttggcagggcatcgaagggatgcatccatgaagtcaccagtctcaagcccatgtggtaggcggtgatggaacaactgtcaaatcagttttagcatgacctttccttgtggattttcttattctcgttgtcaagttttctagggttgaatttttttcttttttctccatggtgttaatgatattag

SEQ ID NO: 11481 - DNA, 1034 bp, Homo sapiens
gagaaggtgtgcctcctagtgtccatccctgtgaacagcaggcttccactttggtgttcagttttactggaacacactttgtttatgggcttgagtgaataaggtcacatagctaaaaaattttatagggcttgcaaatcaagggggatgggcaaacagtttagcagataattctgggaaaacttgtttgctatgtgtgtagctataaaactggatccctacctaacactggatgacaaagacagacttgaaacatattgaagacctaaatgtatgtggtacagccgtaaaatttatatggtacatataggaaaatacctctgtgacctagaggtgggtgagggtttcttaaaccatggtctcaagcacaaaccaaaaggcaaagcactgatgtgccagttgccccagaagttctgattcacgaagaccatcatggaaaaagtttaatagagagatgaccatgtgggaagggactgttctgtgtctgaaactgataaggaatttagacccaggtgacttcaaggaactctggcgaatcaacaagaagacaggaaccacaaaagaaaatgggcaaaggacattgaactgcttattcaccaaagataaaacccaaaagtcaaccaggataggagagctgtacaaacttgcgagtcattaagaaaggcaaattaaaataatgagagattgctttacagccatcagatttgcacacatcagaaagctggttaatgccaaatgatgagctaggcgaggggaccgtcaggccctgctggttggagaggagactgtttgctgctcagtgtttagacctcaagcactgtgtagcccatgacccagcaatacggctcttggctctcaaccccagagaaattctgtgtatccccaaggtaacgtgcacgaagacacccgttatggcaccgtgtgcagtgtggggaaattgaactccatcctgatgaccctcactggggaatagatgagtaggctgcggcagatgcaagatgatggagcggtacttggggagtactcatgacatg

SEQ ID NO: 11482 - DNA, 1055 bp, Homo sapiens
taaaaatacaaaaaaaattagccgggcgtggtggtgcacgcctgtaatcccagctacttgggaggctgaggcagcagaatcacttgaaccagggaggcggaggttgcagtgagctgagattgtgccattgcattccatcctgggcaacaagagttaaacaccatctcaaaaaaaaaaaaaaaaaagaaaaagaaaagaaaaaaagaaaatttaggaggtatagaagaaaaacaatcattattccaccaccaagaggcaactggtactttaaaaatatattatagaatatatttatatatatttatatattctgtatttttctcaactatgcaaaatgcatatacatagttgagataacatcatgcattttgtatcctgtttgataataagtattttagacaaatacatcattgtcacaactagttattaaagttaaagacaaagtttaaccataactgtttaaatgtatagacttgcatgtgtctccacctcccaccctacccctttgcaggatgtcagtctggtattattttttttgctgtggttgcacaaatttaatgttacgttacagaatctttttgcttatacatggaatagtttggagtcttaccaatttgtaggggctgttcttatgttatacacctgaaacttccattgaaaaggtgtcaagagggtctcaaatatgagactgttatgaattctgaaaacagcattgaatcactgaaggatctcatgtaccccataaatatatacaactactatgtacctataaaaattaacaagtaaaaaaataactgaaggagaagacatttttagcatggggtctctccttgatcatttaaatgtttgcacctcgatggagcattttcattgctgtgctcagatgagacagatgtaggtgatctcctttgattgttacagtcctcattttcattgccttccaaaataaaaaggggtgatcaggcaccacagaaagggtggtttgggggtttccgtggggtgaggggtgagggaatccatccttcagcagaggtatctgctgtcagtatttgtct

SEQ ID NO: 11483 - DNA, 1035 bp, Homo sapiens
ttaagcagaaagatatttactagagggaattttgtgcttatagaggcataagggggctggaggaatggggctccaggaatgtctcccagctaatggtagtagtttatataataattaataaacaaacgtatgttggcatggctgttcaaaaaaaacaaaaaacaaaaaacaaaactgactcactaggggtgctacaccctctgatactgtgtctggaactattgagttcaagaacaaattgatggcaaagccggagagtggaccctataatgctgttgcaaaaaaccctcgtgaccccatctccatgcttgccagcggccaaacagccccaaaggcaagaagatggcctctctgccccacatctgctttctaaatctcaagtgagtgcttctatttgggagagccaaattcacatctagaaccttagcttcaaagaagcctgggaaatacagcttttcaattaccagcctctgcaggctagaaagctttctagaaggagggtagaatgaacgatgagcaaataatcacaatactcaccacaccctattggtaaaacatatttgagcagccatccctcaatatattttgtttataaataatttctgcatattactaccattatctacatatctaggataggatcctttctgactagtgactgcaaacccctatgtcgttatctgttggataattccgttggctgactctttatcaattctgattctttcatccttttgaccttgtaatgttgtccacaaagatacaatggagagctagtactcaagagggaggaatgccattttcttgtgtgcctggattgtgacaattatcttcaagttgtggtttcttggctgggatctctttaggcctcagttctattttgtgaggaataggatagttaaaagtagataatataatctgtaaatttacttatgattcagttgtaaatggttattcattgaaatatgctgagaatggtggaattattgaggtggtcactccagttcattttgtggttgaggatacctgcctgag

SEQ ID NO: 11484 - DNA, 1040 bp, Homo sapiens
tcatccttaggattcaaattcaatgaaaagatacattttcactgctactcactaggtacccattacaggtgttaaatcatttagtcttctccacagcctggcgaggagaactggcctcatcctcatttttaggtgggactcagagaagttttgtaattaacttaaagtaacccagctagtagttggtggagctcggatgccctggctcatctgactcaaagtgctctaataagaacttctctctgcaaagcgtgggctggcatctgcgagaaaaatttctttttgtgatttaggaggaaaaacatatggagaaaccctattgtctgaatgctgcgtctctccctaattcatgtgttgaaacctaatccccaatatgaggctcttagaaggtggtggtctttgggacgtgattaggtcatgagggagccctcatgaatgggattagtgcccttataaaagagaccccagagagaccctcacctcttgtgccatgggaggacacagtgagaaccaggaagtgggacctttccagacaccaaatctgccagtgcctcgatcttggactttccagcctccagaactgtttgagcaataaatttctgtagtttacaagccacctagtgcaggatattttgatatagcagtccaaatggactaagacaaggaacgatccttgagctgaaaggaaaatgaacaattgctctgcagttggaaagacacaatgatagctctaggaggcattgtgcactcaattgtcctcaactgattggagaaaggaattcagttatgaggaagttcatttagtgagaaggtctaagagctcttcacatgtctcctatgactctaagaagggtgatggctggcagcaccctgagaatgaagcctctccagggagctgtgtgttgatggggctctcaagtttgggaagcaacccccctaacaggaagtgggggtgggagacagggagagaaaaaccaaagcaaacccataactcaaactgtatctttcttcttgcaaaagtgaaagacattgctgatcgt

SEQ ID NO: 11485 - DNA, 1062 bp, Homo sapiens
catccccccacttaagactttaatgtcttaaaaatgtccccacttcttctgtcttttagtggcttcacgtctgaagtctctgcttactttttggaacagatggtggttctcatagacttggcccggagtcagcatgggagaaagtcatcctgtctgaaacagtgctgattcgggtcaccacagattcaaggtttctaaccttggctctacttaagaacaacttggacatcctttcatgtagttcattgatacccacatgcctcctggtgcaatatctccaaaactggactcctgcatcttcacatgctcacccttcacaccccatccattctccacacccttcacatcccagttcctgaaggcaggtcccttggttacagtctctccccatgcatttggttgttttttgttgagatggagtcttgctctgtcgcccagactggagtgcagtgacgtgatctcagctcactgcaacctctgcttcctgggttcaagagattcttctgcctcagcctctcgagtagctgggattacaggtgccagccaccatgcccggctaatttttgtatttttagtagagacaggattttgccatgttggccaagctggtcttgaactcctgacctcaggtgatcggcctgcctcggcctctcaaagtgctgggattacaggcgtgagccaccgtgcccggcctccccatgcactttgactttttttcattgcactccatttgtccatgcagcaatccctcaggatgtgattcattcagcctgccaattttggataataagagaagagagttcagatacaaactccccaatgttacctgcatctctttggttcctgcttttggagagtaaggggtacctgagtttgttttatgtctcttcttcagtattctgctccacaagctccacgtgtacttattcctcagtacgcccccttagtgagtttgtttattgggtgagtgaaaggaacagatgagtagatgaatgacccaggtgaggcctggggtcggggaggactgtggctcttcttacctgctgttgaagctggcctggt

SEQ ID NO: 11486 - DNA, 1050 bp, Homo sapiens
aaaaacaaaaaggaaatgctcaatagatgtttgcttttgtaaagcagagtttacattttccctgttgctgttgaagcaagggtgtgcatcatatccaataactgggaaaaacaaagcaaaataaacctttttaaccttgagatgtgtcagaaataacagggtcactctgtctcattctggtcccctgaataaaggaaatcttgaccattttccataagcctggattatccaaccatcagctttatccttaacttggcaatgatgatatgattgcttcttgtggttatgatcatatatgagaaatgtggcagcagcagaggtaattatctcttgtgattatttatgtggtgtgacagtctttcttatagctggtccccctgaacctctttgcaagtaagattttttctttcttaaatgcttttctcttccttctatgtgttgctgctactgttactcctgctgtttctaccactaccacaacaaccaccactgccgcgccaccaccaccatcactaccaccactaccaccatcatcaccaccatcaccccagctcaaccagaatgactataatccttcacacccctgccaggttatcttccctatgatgactttcttaaccagcttcccccaaacaagtagtaacattttccccacccaaatccatcttgaattgtgggaaggatcctgtgggaggtcattgaaccatgggggcaggtctttcctgtgctgttcttgtgatagtgagtaagtcttatgagatctgatggttctataagggggagtttccctgcccaatctctctctttgcctgctgccatccatgtaagatgtcacttgctcctctttgccttccaccatgattgtgaggtttccccagccatgtggaactataagctcatgaaatctctttcttttgtaaattgcccagtcttgggtatgtctttatcagcagtgtgaaaagggactaagacagcattctattattttgtatcttgtacctgcttctgttttaacacagtgtatttgaagtacagtttttgagtctcctg

SEQ ID NO: 11487 - DNA, 1049 bp, Homo sapiens
ttgcagtgcaggatttctgattctgacagaaaccaaggggagaactcactttttctatttaaaaaattatcagtaataaagcactcaggtcttcgaccactcttgcaaatactgttgtttttctctagctgagtctaggaaggaatacgagtttatagtgcagtgccagtaaggttggaattttctgtgataggggagtaattgagacaggtacaaatcgtaagatcttcccgaggactggatacaggagaaagaaatgcagccccagaaagggaggtgtgcagttgcaggcagatgggccaaggagatggtctgattgccaagtggattggagcccaagtcttcaggttttcaagtgggtaattagaacaggaaggagccaaacacaggcctgctggcgccaggagccgcaagattttccgttcaggttgtgtcgtctcagagctaagatgggtgcatgcgagtacttccccggccagttaacaaatgcgagcatccagtaccgtgcccatgactgtgggtgcagggagcagagtgtaggcagatgagcaaatggggtttccatgcctgaggaacaagaagtcttaggctaagtggtgagtacctgcaaaaatgagagaatagcacaagacggcatagctgagtaatacattgcatggttttgcttccaagtgccagcatctccgagtagtgtatctgacaccagcacactctggtgtcagaatcttgggtttatattctggctactcaaactgtgtggtcctgggcaaattctttaatcttttttgggtttcaatttccatagctataaaatgagaatagttgtagtatctatctcgtgaatttattatgagaattaaattattttctctgtggattaaaaaaaaggacttttgcccctgattcttgtttttgaatacagtcttgatccccagaagtgtggcagctctcttgtacacatgatgaagagtgtgaaggggaaaagttgatatgcaaacaatggtggatgagggggtgaagctgttgggatccttgatgactgtggggtg

SEQ ID NO: 11488 - DNA, 1082 bp, Homo sapiens
gttcagtgtcctcagacatcccgctccatttctttgttcaacgctaccaccctctaccctggccagactgggttcctctctaactcaaagacacatgatgggacacacagtgctttacagggaaggacagtggaggccaggagagagaaggctgaaccaaagaaacttcctaaggctcaactgtttatacagttctctccgtctgttctccatgttctctccatcagcctctgaggagctcgaagctcctgtaaaagtccttggccctttaggtgcgctctggtaccgtctttctctatggcaccttttgtggccttcaggtaaagagccaagaaggaacaccccttttatttccccttgatttttgtgccgtttatttatttatcagtattgtctagccttttaagagcctggatgtgagtctcggctctgctactttgcagctgtgtgaccttgggcaagtgacttaacctctctgtgccttggtttctttatctgtaaaatgggataatagtatctagctcatggtattgttgtaagaatcaaaggagctaatcaaagtaaggcacttagagcatgaccaatatatattaataggaggctcacaaaaaaatctagctcttactgcaactcctactactcctattttttttttttaaaacaacttttatttttgcacccctgtactggaatagatgatcttgggcctggtttctgtaagcaacactgactgtcatcatctgtaaggataagcacttagtgactaaactgaaatctccaagtcttgcttttaaaaaagaaagacccttggctggctaggcacagtggctcacacctgtaatcccagcattttgggaggctgaggcaggtggattgcttgatcccaggagtttgagaccagcctggccaacatggtgaaacctcatgtctactaaaaatacaaaaaaatgagctgggtgtggtggcacgcacttgtagtcccagctacttaggaggctgaggtaggaggatcacctgagcctggaagttgaggctgcagtgagctgtgattgcaccaacagcattccagcctgggccatggg

SEQ ID NO: 11489 - DNA, 1076 bp, Homo sapiens
agaatgcattgacagtggctcatcagtcacaacatatgtaccacaccaatgcaagatattaatgatagggacaggaggcagggaaattctgggcagaagagggttggtccccagcgaggtccctaccctcaagctgaaaagcctaatactgtagcccaaagtgagaccttacatccctgttttcccgctcaaatgttgcctgccccgacccccatcctgtgcccataaataccccaggctcagccaacagagaggggagaagcagctggacattggagactacagttggatgtcagaagcagcttgacttcagagggacagcttgatggcatagctttagagatgagtccaatcggggaccactggactccaggggaaaattaccttcccactccttcccctttttagctccccttcctgctgaaagccactttcactggcaataaaatcccccacattggccatcttcaagtcatttgtgtgacctcattcctcctggatgccagacaagaactcaggtgccacaaatgtgaatgcaaaagggtgtctgtcacatggaccatccactgagctgttaacacttaatctgtccatggatggcaaagctaaaagggcactgtaacacttcttccggggcttcaggggtcatggacaccctcccctagatgctgccacagggtcagtacagagttcgctcttgctggcacccaaaagcgttcacccccacctcctgcacccattcacctgtgttccccctcctctgaggggtggaacagtgagtgagtggaatttgcccctgccagcacccatgtactccagttcctgcctgcaaaggggtcagggaagtatcctgcttcattaataatgggaaactgggggttaaggtatgagtgtatgtatatggaagctctatatactttccactcaatttttctgtcaacctaaaactgctcaaaaaagagaatctattaatttaattaaaaacaaaactgggtggaccctacccaccttcctaccagcaaacatgagaaggaggatggctgttccccagtgctgacgggggcactcaaccttct

SEQ ID NO: 11490 - DNA, 1028 bp, Homo sapiens
gacttaaatagcaatttattttctcacacttctggaggctgggagtctaagatcaaggtgtggtcagggttggtttcttctcaggccatgagagaaggggctgtcccaggcctgtctccttggctggtagatgcaccttcatgttcacacagcagtctccttgtgtctctgtgcaaatttccccctcttgtcatgataccagacacattagattgggaccccaccctaaggacctcattttcacttgatcacctctgtgcagacactatctccaaataagggtactgtctgaacgactgggggttagtacctcagcatgtgcattttggagagacacagttaattcatgacagcgtgtaccttacattccatggtgtttatctggagagggggaggtagccctggggaccgtaactctggcacttcctagcgccttgatgattggcttttctcctaccttctgcttccattctcctcctcccagactctctcatccaataacccccgcatctgtaccctgttcgctccataataatgataactactccttagtagttgcttcttaggtgccaagcaaagtgctaggcattttatttttattaactcatgtaatcctcatgatgacccttgaaataggctctattgccgttctcattgtataaacaagggaactgaggcacagagagatttagtaacttgcccaagggcacgctgctagtaagtggtgaagctgggatttgaacccaggcagtctggctgcagaggatactttataaaccacttctacttcacttaataggcgtaatattccacttgaagcccttcacatcttaccaagggctcccaaaacgttctctcacttgatctccatcaaaaaagagcaccattggaggggctcagaggaatgggttctaacatgtgatgtgtctggatccgtgctcaagaactgggatgatgccatggataagagcacagctctgtgttctgcatcacagactctgcattgactagctgtgtgactttgggca

SEQ ID NO: 11491 - DNA, 1050 bp, Homo sapiens
gtcagagggaacaaaagtcttagcatgcaggtcgaggggtccccatggcctccaaaaagcagaaaaacaacaaaacctggttctaactagctagaactggactcagttaggaacaaaagggttattcagctgaccagaggatgggcgaggaacagaaggggaaggtgagtggagattagcttgtcaaacagtattttcttgtgaatgctgcagatcaaggcagtcttttgtgacagcatttatattaaaagaggcccaagatatttatagcccctattggagcctagagcctaaatagcaactctgtttgatcagcctttcacaggtcatgtgatgtttctccttcagggtgtccatttgaaagtgggagaaaccactaggaatttggggggaatagagcagagagagagaggtagggaaatttggtccatttgcagattcacggaagttcaaatgtggcgcatagctgcgcacagcttcccctcctccttgggtaccatgttgccaagacgggcggttagagattcaatggcagagggctagatgattctgtttccaaggggccctgcttgccttccagccccacctcatatcaccctgtccctcagttgctgttccagcctcttggcccacattcctcaaacatgtcaaacaggttccaccaaaggacttgcatatttgctgttcccactcctggaacatacttccctgagatctttctgtggttggtgccttctcatcaagtctcagatgaaatatcacctcctttgagaggccttctccaaccttccaggcactgcttcttgcattgccttgttttattgtcttcatagcacttgtcaccatcagaagtgatcttgctcattaatttgtctggtgtctctctcatcacctctagaatttaaccttacatttaacttttattgctggatatctctattggcctatcttagggcccaatggagaaagaaaaatgttctaataacatattgtaaaggtttgcctagaaaggtatatccttccccaacatttccattcactgaaagaaaa

SEQ ID NO: 11492 - DNA, 1034 bp, Homo sapiens
aatttttagtggcgatggcatgttatagttcagcgtgttgctgggaagattaaacataatgtatttaaatcacctgtgaaggtgcctcctacagagtagctccttagtcatactgtctgctgttgtcatggtgaccatcaccatcctttgtcctggggaccatgagaggagatggacatggagcttaatgcagggtgcaatggcttctccctggtggctaccatgatgcccctcagttccccagcaaactcatcagtggccctactttaggcccatcccaatggccctgtgcaccttttagtaaaaattgtgcagattgaggttcaaagttggaggagcaggggcagatacttgggttgcactcaagtcctaggctctactgacttggctgtccaggtgactggaggatttcacggatacagctgcattctcaggactcaaagccacccacagtctggcctggaggaggcggtgactctggggctccgagtccctgtgaagtgagtggccacaggagttgagaaaaccaagaatgaactagacaggagggttgtgctatgaagcacactcagtgttgtgggtgttcagtggagggaatggttattccacttgtgtggcaggggagtgtgtggggccatgaagaattgtcaagtttggggccaggcacagtggctcacccctgcagtctcagcactttgggagactgaggctggccaatcacctgaggtcaggagtttgagaccagcctgaccaacgtagtgaaaccccgtctctactaaaaatacaaaaatcagcagggcatggtgatgcgtgcctgtaatcccagctactcggggggctgaggcaggagaattgcttgaactctggaggcggaggttgcagtgagctgagatcgcgccactgcattccagcctgggcaacagagtaagactctggaaaaaaaaagaaaagaaaagaattgtcaagtttataccagcagagattgagaggggagaatcccagatgggcccagcctaaggaacgcttgcggcaaa

SEQ ID NO: 11493 - DNA, 1052 bp, Homo sapiens
caagtgggccctaatgtctggttcccttctttgcatccatgtgtactcaacgtttagctcccactaataagtgagaacatgtggtatttttctgttcctgtgttggttgcttaggtcctgatcatctgtgttagctttctgccttgatgatctgcctaatactgtcagtggggtgttaaagtctcccactattatctagctctctttgtaggtctctgaatgcttgctttatgaatctgggtgcttctctgttgggtgcatgtatgtttaggatagttaggtcttattgaattaagccctttatcattatgtaatgcccttctttgtctttttttatttttgtaaaagtatgttttgtctgaaattaaaatagcaacccctgcctttttctttctgtttgcttggtagagttttctccatccctttactttgagcttctgagtgtcactgcatgtgaggtgggtctcttgaagatagcataccattggattttgcttctttatccaagttgccacactgtttcttttgattggggcatttagcccatttacattcaaggttagtattgatatgtgtgcatttgatcctgtcatcatattgttagctggttaccatgcagacttgtctgtgtggttgctttatagtgttactaatctacctacttaagtgtgtttttgtagcggctggtaacccagtctttcctttatatagttagcactcccttccaaaactcttgtaaggcagatctgatgttaacaaattcccttagcatttgcctgtctgaaaaggatcttatttctcctttgcttatgaagcttagtttagtcagatatgaattcttggttgaaaattattttctttaagaatgctgagggtgtggcacaccagcatggcacatgtatacatatgtaactaaccagcacattgtgcacatgtaccctaaaacttaaagtataataataaaaataaataaataaagaatgctgaatataggcccccgatctcttctggcttgtagagtttctgctgacagttctgctgttagcctgatg

SEQ ID NO: 11494 - DNA, 1122 bp, Homo sapiens
tatgtaggttaaaactttcccactgtgggccactggaattctaattttttttgtgtgtgtgtgagtttcatttttctagaaaagcaacatgccctgagtctgtagttcttatacacgaaattggctatagttccagatggaggagttctagactccatggatccagatgaactcatgattccctgtcttcttgtgacttatcataggccttctactggacccagtctctggaccctgtttggtaaaagaattgttcaagtaaatttggagagctcaaaacacaaatctgtgtagctttaatctgaaagggaaatcacacacaacctccagttgctgtgagagaggaatggttacaatagacccagcaaatacattcatttggtcactagggtgctcctgggcggttgttggaagtcgcctttggacgccacttctgacaccaaaaacttaattgttaaaacctctagacaaattaaatttaacagtttgtttgagcaaagaacaattttatgaattagcactcaaaactgaaaggttcagagtgttccactctgtggcacagagagtatgcttttataagtataaattgaacttggaagtaaactacagaaataactggattggttacagctaggcatttgccctatttgtgcatggtttgataacttgactgcctatgactggctgaagctcacctgtttctgtctggcttaaacctagctattcgttacaaaagtattctgctaagttaggttttggtttgtttattactgaggtagattgcagtttgttatataggaactacaagtaccaagggagtctcaggctaatggcctcctgcttatttaatttcacatatgtaatattggatgtattttgtttctcagagaaaccagagctagtttttaaagagttgggatatatagcatttggatgtcttcccagggtagaatgatctttattctcttctatggtagagtttagaaagcttaattttgtgcatggtgatgagtgaatttgttagcatcttttttcttcagcatggatttcagaaacatcaattttattttaaagtaaaaataaaggccaggtgcggtggctcacacctgtaatcccagcact

SEQ ID NO: 11495 - DNA, 1002 bp, Homo sapiens
attttaaaatgcattttattcctgtttacaaaaataatttaaaagtattcacttgtaaaattcaagtattccagaaataagtaacttagtgaatgaaaatacgtcgtatttctacatcatattactacatattggtagatggtgttcagatttgttcctgtacaacttctcttagtgctactaatactacttttttcttttccttttctttgccactgattttcattactgaagatgaagaaatttaaaatatatttctttctatgtctttgctattttcataatgtggtatctgatttcaaaattgaaagattagtttgtgtgtaacatcaagtgatagtaactatgataacccagccaattttttaaaaaacttatgtacttaaatagaatgaaactaaaagacatgaagattcaagtttctattgttgcatttttttatctgacagtccatgaaagggtgttttgtgtgtgtgttatttaatattcaggtgaataaaattgtcatgctcaacaccagatgtagaaatgccttaactctgccacagtgaaagatatttgtctcataatatattaataagtattttttgtggttattttttcttgaaatcagttgtcttccatgtgtattatagaacttttaaacagcttgttgtttagcctgcatttaatgaattttccccttttcccttttctgtttcaggtaccagccatcactctaactgctaatattatttggtttcctgataattttctgatccagaaaataccagcagctgccaaactgctagacagaaaaagtcttcaagccattaaaatacacagggatacttttctacaacagaaagctcaatcacttaccaagtaggttttataaacaagtataatgaaaatatttagatatcctttattttcaaagattatactaacacttaatgtatagtaccatttgaattataagattaaatgtacttgataagtaagggtcaggcaatctccagg

SEQ ID NO: 11496 - DNA, 1878 bp, Homo sapiens
tttgttgtaggtctctttcgtgtgatattaactataactgttttcttttaattaatgtctgcatggtattatcttttttgatcctttcacttgtggccttcctggctccttatagttaatgtgtgtcttccgtaagtaacgtatatttttctcctatctgataatctttgtttttttttcttcatagtactattttttctatatgtcattgttgatatatttggttttaaactaccacctgactagttgctttgtatttgtctcacttgttctgtgtcccttttcttttcctctctcgctcttttttggagtatttttaattttatttctcctcctctctattagtttaattctatattattttattgttcttttagcggtcactctagacattttaagatgtatcgtttgctcatttagctctaatgtatgttagtagttttaccactttcctgacggtataaggatcttaaacagctttagttctatttatctccctctcatcttctgtgctgttgttgtgtactttgagttcctctgtattttaaacctcacaaggcattattatcgctattgttgtttttatagtcagcgtttatttagatttactcatatttacctgttctgttgctttttattcttcctacatctcttaattttcatctttctacttggggaatacctgctagtatttcattaatacaagtctctgttgatgaattgtaatagtttttggtctgaatatgtcttcatttcaatcattttgctgtgttagaattctaggttggtggggtttttttttttcttctagcttttaaaggtgtcattttatggtcttctggcttcctttgtttttgttaagaagtcaactgtaggtttgttgcttctaaaatatgtatctttctttactttttggcttttagcagtgttcctacaatgcccctaggtgtggttttctttgtgtgtttgtgctactttggggtcagtagagcttcttgaattcatgcaatattctttaccattaactcttcgagcattatttcttttctgtttcctctgttctaattctctcttcatctgtctctaatcaattcatctactgagttttaaattttaataattttactttttagctggcttttttatagtttacagttctcttctgagatacttgattttgtgttttattttcttcaacacattcagcttattttgaagcacatgtctaataatttcattatttgggtatttgtcttatctgttgtttctcttgtttttgtacatctcttaccttttatatacccagttattttttatagagtgccacacattatatatgaaaagctgtagacgtaatttgaggatctggatattttcttcctccagaagggatttgtatttgtatttgtatttgcttttgtacacagctagtctaggacggttagcaacccaggttatatcaatctagtaggttgatcaagatgatttgaagcaggattttgatcctgtgatggttgtttaattcacccttacttttttggggggttatccttcaggatgccaactcagaacttaggtggtttatgaaaaccagctccgatgagccccaagctcctgtttttatttcccttccctgtgagatgttgttgaaaggtatgtttggcttttgtctttaaggcagatgatttaagagaaagcaaccctgaatgccaggatcacttctctgagtttctgtcttccagatcttggccttatatttccttatttatttgaatcctctttgatgccttatgaggcatttttaaaccgttttgcccatatattctagttgttctcagtgggaaggctgatctaaattatttattctatcattaacta

SEQ ID NO: 11497 - DNA, 1027 bp, Homo sapiens
aaatttcttgaagggaaatttgaattttggtttccagctgaattaaggttacagcacaatttccatttagtattcatatttataacttacttttttgttgttctggagaagctgacatttttcttgttattggcatttaattttccactcttggaagaaatattgagcctttttcattataagatagttaatgatcattctgttgccctttaaggtgtgaaatagtcacttggcaaagattgtagacatgttaagtgtgggtttttttttggggcggggggggtcacaattttttttttttaaaagatttttctttccaacttagagtcagggaaaatggagcatgtgatgcaagtatttaagtctagtcatagcaaataatattgaaaatgagtttgtttttatttaccaaaaccaaaaatggtcaataaatgtttattttaaactctgatatttgaatattatgcatatcatttttcaagtatggtttacaaaagcatatgtgcagaattctgacaatgtcaggcattggagtgtttgttacctttgtttcattttgatagtatttcttttgtgacttttctatactatgttgggttaagtgatgtagggaatgcgaactgtgtaagatggaactcttccttctgtagtagatgtcattcctttcatattgttttgggattcttcagttttggtgtgactgattactactttacattgtagagtccaaacacaatgtgactgttgttttttatactggcatcgagctgtcttcccaatttatttagatgatgtatatgaaaatgctgttgatgcagccagattacatgtaagtaaagaacaatataaagaataattctatcattttaaaagtcactgtgtaaaccgttttagtttaaaatagatcatttgatttaataaacttttaaaattgactgttttgtaaactgcatattcataaagtgtttatagtctgtagttaaattttatgttactgttaacgaagttaatttatttaatttcttcc

SEQ ID NO: 11498 - DNA, 1053 bp, Homo sapiens
tttccattccattttctggaggcagttgctaacaatgtagtgtgatggctttcagatatctttgtatataaacatgtatatttacacacatatattgcttttaaaagcagtatagtaaaaatggagtaatattatacatagcattttgcactgtgctcatcacgtcagtacatacagatctgcttcaagttgatagggatacatccatgtatatcataacttatttaaccttcttctgttgaccattatttaggtttttctaatttttcattcttacaaacagtgctgcagtaacatctttacacatctatctctggaaatctcagactttctgaaaacttccttaaggagaaatttctaggacaaggaaatgtgaacatttaaaattgtggtacatattgcctagcactccaaaaacacttcactattgatattcccactgataatttatacgaatgctgctgttagcagggtgcagtggctcatgcctgtaatccagcactttgagaggctaagataggtagatcacttgaggcaaagcatttgagaccagcgtgggcaacatggcgaaacctcatctctactaataataccaaaattagccgggcatggtggcacatgcctgaagtctcagatgctcaggaggctgagtgtattagtctattctcatgctgctatgaagaaatacctgtgactgggtaatttataaaggaaagaggtttaattgactcacagttctgcatggctggggaggcctcaggaaacttataatcatggcggaaggtacctcttcacagggtgacgggaaagaatgagtgcccagcgaagcgggaagcccttacaaccatcagatcttgtgagaactaactcactatcatgagaacagggtaggggaaactgcccccatgattcagttatctccacctggtccctctcaggacatgtggggattatgggaactataattcaagatgagatttgggtggggacaaagccaagctatatcactgaggcacaagaatcacttgaacctaggaggtggaggttgcagtg

SEQ ID NO: 11499 - DNA, 1024 bp, Homo sapiens
aagagaaacttagagaaagaagtaagtcatgtttctgggacttaaaccagggttatttagctataagtccaaatgggttttatattcttgaaagtttatattaacaccaaacagtaaaatcttattgactatattttgggaaaattctgccttgtgagattgatttattcatttatcaagcatttactaagcatctgttatgccacattttctgttaggtgctgggaataccaacccctttgctttcaggagactttaggtttactagtgggtaatacgttataagcatttcattctggagtaaagttttttcagttaattgatttgcatattagacatttctattatgttttagtacaagaacttggaggattttacctttgtaaatgttttattataaaccattcaatattaagtattgtcaaataagtacaaataagttttcttcaagtggacatttaatattaagcggcaaacttatggagcaatagttcttaaccttttttgagaatctgaggaaaactccaggatgattgttccagaactaatgcctatatgacatacgtacacaattttgtgtatgatatgctagagtccatgtgcttaaagcttgggtctatggacctcagattaagagctgtccttctagagcagtgttacttaagttttatttatacacatacccagaatttttgcatcctgttaatactgccttcactattgttacatgtttttattttttttgagagtataatttttccttagaaataacagttgttaaatcatagtccttaaaatgctagtcatttttgccctaaatacataatcactaagtgttctttggtgtgccatctaatgtcaccttgcttaccaccaggttgcagtccacaattggggaatattatccttttcattttaatccatcgttttactctttattctcttcttagaaaatataaattctttttttttttttttgagacagagtcttgctctgtcacccaggctggagtgcagtggcatg

SEQ ID NO: 11500 - DNA, 1031 bp, Homo sapiens
tgagcattttatgaaacacttggcctggacaaaaaatacacggagattgttctagattaggagaataaagagacctgataatcacatgtaatgggtgatacttaatcatatcctagataaggaaagaaacagctgtaaaggacatttgaggaataattgggggacatttgaacatggattgtatattagttaatactgtattatattcttgggtataacagtgttttgtggctttgtagaaaaatgttttcattcttaatagattcatgctaaagcattaatgggctaagtgataaaaggtccacaactttcaagtgtttcagaaaaatagagaaaacagttgtgtcaaaatgttaacaagtggtgaatctagttgaagggtatacgggtgttcattatactatattttaactttttgataggcttgaaatcttaaaaaataaaaaagtatatgggaaaatgcatgcatttctgtgagaataaggccccagcacagaagctttgctctggaatagtctgttagatagcttaagctctttgccagattacataagccatttacaaagttaagccatttgaagtcatgtgcctgaaaatggtttaaatagtttctgatgtgtgtctcaaaggaaaggatcagacctttaccttatgttaaatgatgccattcactccgaaagtgttgaccatttaaaaaatattttgaagcagtgtgaggaaatcagagagtaggatattgtcttctaagatctctagggtaaagctgactgctagttggaagatccagattggtgcaagggagtggttgattgaagtcaaggaaatgtagggtcatgataatgaatagattatctgcatagacaggggagaactggagcaggcatcctaatcctgcgtaattgtaggacggtggttaaaaggttagtagatgtctgctgttaggaagaagtagttgagtatttgggtagttagatatagttggattatgtgagtcacaaaggaagatttctttcttacagtggtggaggaat

SEQ ID NO: 11501 - DNA, 1034 bp, Homo sapiens
atttgtaaaattgtgggaaagatgagaaaatattggatacttcatgttattattttatgctgagtctgctaaatgtaaaaggtaggctttaattgattttaataattgtaacaggattttctttccagcttcacattgcagatgtttcagaagacggtattcgttttttaagggaagttttaataccacattttttttttaacaaaggctttcagatgttaggaatactttaataggctgtcaaagatgtgaagtttaaaaagggaatccagaataagtggaaatctgtagagactaagcaaaggcagtgaactcaagagatggtgatggcaaagttagagttcagtttataacacaggtcagcatatatataatgtataagaaaagttgggcaagtaagtattttcttttcagtagtttggctcctctttaccactcagttcacctgatacctccatttcccattagtggagatatactcaggaatgtacatcaaatttattcagtcgatgcagatctgataccataattcttggatcatctctaaggactataaatacattctgtaggtaagagtcaagcattctttaataatgccctcatttgatgggggaaggagttaacttttatacctagaagcacttgtctttatcagattagtattaaagtatttactcttttcagaatctgtacaaaaggtagcaaagtattaaggatattatgctttaggttgatactgctattgaataaatcgtcaaagcttaatgtattgagaaatatttggagattgcttagtatctggttctctcttgaggtcatctgtatatagcacagagtggttagaagcatagactctggagccagaacaatttgaatcccgatttcctgcttaggaacagattccttaatatctctgtgcttcatttccttgtgcaaaaggtgggatgataatgacagtatgtagctcataggttgtttgaggatttaatttgcgtaaagcactttatatattaggaaacagtaactaaatatta

SEQ ID NO: 11502 - DNA, 1049 bp, Homo sapiens
aacccttaggaggtagctctccttcctgtttgctcttcccccacaggcgcaagtgagttatgcttcggattctgcgcctctatgttcgtttggatttccatcatcgtcatctggttgatcgtttaacagtacatattttccgtcattggttagtggtatggacagcattaattgagccagtgcttctggatcctgaagttaggagagtttaaaagggaaaaaagaaaaggcttaagatgcatttaaacccctttggcctggctttcaatatgttctgtaatctagtcttgtttctcctgactcttgtgtatatgtgccttccgctgagtctccttgcttctcaaactcaggcatgtcacttctagaatctagactgttttcctctgagccaaaatattgtttacgtagtcaattcgtatcatcttcccaaagattccacagaggaacttccttcacagaacttttgtcttctctatctttaaactccttcttttctcacgtttaatctataccagaagttggcaaactatggtcatttggctaaccatttgatttttattggaaaacagctgcggccatttatttacatactgtccatgctgctgctgcttttttttggtgggggggggggtggtgcggcggttggagacagagtctcgctctatcgcccaggctggagagcagtggtatgatctcagctcactgcaaccttcgcctccccggttcaaacgattcttgtgcctcagtctcccgagtagctgggactacaggtgtgcaccaccacacccggctaatttttgtatttttagtagagatggggtttcaccatgttggccaggctggtcttgaactcctgacctcaggtgatcctcctgcctctgcctcccaaagtgctgggattacaggcataagccaccatgcctggcctgcttttgtcttatgatagcagagttgaatctgttgcaagggagatagccaaaaacataaagaccctttatagaaaaagtttgccaacttttgaccaataccattaaatactagcttacagt

SEQ ID NO: 11503 - DNA, 1040 bp, Homo sapiens
ctagaatagggggaaaagtcagttactgaataattaaatataggctgcaaattgtctttttaggaaacgtatcacaccttctaattccaaacccccctaaactatccatcaacacccttgagagatggcatatcagagctagaagggtcctaggaggttagctagttccctgtatgtcacaaggctgagaagacaaaggcccagagcatttactgacttactcagggacatctagctgtgtataacacaaggcagagatatcgttagaacccatgtctctcaactgcaggtctggtattccctccattgtgcacatcaaacatttttgtaactttacaaagagaagacatacatttacccaggagaaggctacgggattaaccctcgctgactggatctttagttccacttcctttcatatagtgtcttccttagagttccatttcataaagcatgctacttgtatcaactgttaaatccttaagttacggtgctgaaatgtttctcggacttgttgcctctttctcctcttttttaaaaacatttgtttacgttctcatgttctgcttcacagctactactacatcaacatcctactgggtcttgcactctccccttcttcccacaacctgtatcctaaaatttatcctactcaggtacagaatagtcttccctaaccctggttctgaccatcgcccattttctcaaaaccttccattttgctccattgcctgtaactcctaagcagggcacccaggtctttccagttagactcaaacctattttctggccttaccttctcccattccttctcagataccccgtgcccggcatgtgaacgctggctccacactgcacagattctgggaagttacttaaccactgagttttctaatgacttccttctggggtcattagatatttgtaaaaaatgtaatggggttctttctaccatgccactaaaagatgaacaccaaatatagtcgtaattttaatttaccctttaatgccaggctttcattagtatgaaaatacaatcc

SEQ ID NO: 11504 - DNA, 1098 bp, Homo sapiens
caggagttggagagcagcctgggcaacatggtgaaaccccatctcaagaaaaaatacaaaaattaaccaggcatggtggtatgcacctgtattccgagctactcaggaggctgaggtgtgaggatcacttgagcccaggaggcagaggttgcagtgagccgagattgcatcactgcactccagcttgggcaacgaagtgagactgtatctgaaacaaaaaaaaaaaaaaaaaaagatttgaattttatgatttttttgccctcctttctctgtttttgaaaatttttttaaacccattttctcttcaggaatattactgtattttaattaggtattagacaacatttttgtagcaatactatcacaccaatacaaacctatcttctttttttctctaggccctgcaggagcagccaaagatgtgtaagtattgaatattaatgattttataagctgtctttctgaggaagttgctgtttttcatgattatgacctttagatctctgtgggtatggctgaaaagacatggaaatactttgtgtataatgcacatgtcaagatgatcgttgtaactaaagtgctattcagagagggttctttgtgcttttcattagcttttcagttgcctgggcactttaactcaggatcttaagaaggggaaatgttgaattgtgttttccatcccaactggtatagagattttttttttcttttagttaaaagcaagtgattataggagaaataagcatgtagctcctatgactacgcagtgttttagagttagctggggaggaaaggctggggccaagcagttaccaagtgtacattgaattgttttaaagttgataactagatattcgaatgaatatatagggccattcaacatagtcaccattgagctatctttagagcacagggcatttaataatgggcatctccctgtggagagatctggagctcaggagcattcaggatttccatgccccttctctctgcatcctcctgcctctaatctagctatagcaaggacactacagcagttcactctttaagagtatttctggttacccagtgaagggtgggatcaactctcccacc

SEQ ID NO: 11505 - DNA, 1076 bp, Homo sapiens
gcttacacagatgtggggcaaaaggggagtgatggggctcaaaagccttcaatggtcaaataccaaaaatagggccaggtatggtggcgcatgcctgtaatcccagcactttgggaggctgaggcgggtggatcacttgaggtcaggagttcaagaccaacctggccaacatggtgaaaccctgtctctactaaaaatacaaaaaattagccaggcatggtggtgggcccctgtaatcccagctacttgggaggctgaggcaggaggattgcttgaactgggaaggtggaggttgcagtgagccgagatcacaccactgcactccagcctgggtgacagagccagactctgtctcaaaaaaaagaaaaaaaagagtcagactttcttatttcttattacaaagaatttagagaagatgagaatgggattgtaaagctttctgggaattaaatatttaaatatgcattttaaaattaggactttagatacaaaggaagcagtaattgatggcttctagctcctgtttgctgtgttggagtttattacgtaaacatttagcaacagtgaatactgcaccctgaccgtattcctattattgcaatattttggtttctccttcagtctctcccttcaatttctatatgtgttgccagattaattttcctcaagcactgccctgcacttgcataggacctctgctcaaaacctttcaattattcccatcgtcctctggactgaacccaggatttattaggaataggaagagcatttatgttttagcctcaaaccgactggctcgcatggcgtgggaggagatgctacagtggagagtgagcagagcccagggctgggagggctgtgcagagcttcttcaggccactgttctcaggggcttctgcgacctcatgcttcttgctcctgtccttgtgttttgctgtgcccactgcctggagtggccctttccctttccctttctgtttatagaaatgacatctgttctgtagggcatgtgtgttatcctttgtgagaagtatttcctggctctctgagctgcatagtgtgtctttctcctcaga

SEQ ID NO: 11506 - DNA, 1026 bp, Homo sapiens
atgtgtagtttcttctgcagatgaccctaggctgaaagttatgcccacttagatgtgcagactacttccagcacagaggggcttaagtgatggtgctcagatgacaatggatggcctggctgcatcagaatcccgtgggggagtgccatgtaatgtggaggcctaggctctcccaggaggtttggaccaagtggggaagggatggaattgtgaccgaacagtctctatttttaatttggatgatgttaatatacatgcagctaggtttgggcattgcttatcaagatgtattttaattgtaagtttgtaagtctcttttcctacccaactttgcctctttatataattatcatcaatgcttggctctacactggccacctaagtcttaaattaatattgggtgaatattaaataggtgttttacttaaaagaaagtaaataacttgtaggcttaaggctaatacattttttaacctaagttgtacctgtttgctcactcttttctcctcttctgttgtctccttagcttgctcatcagtttggaaggaatttggctccgtgggacgttgtaatgtgcacagacatttccaaggaaattctaaacagtcacccttcccttttgcattcccccaaatcttaagtgtatacataaaaccctgggtacatattgttgtggtaatagaagggaattggttaaacagtacacttgtttatggaactttctgtggccacctacgaaagacaagttaacaaactgtcatggaggctgttgttgcccagccagggccgctgcattttgacaacatttccaccctggccactcagcacatttcatggaggtcatgtcttttcactgatacttttttgatagtttttatataacaaaatccttattctatttataacttaagatgataaggcactataaattaatgacctaaaataatatatttgtctgttatcttttgctatttctacttcactttaatttttagctgtaaaattggtaaatggattcttacaact

SEQ ID NO: 11507 - DNA, 1032 bp, Homo sapiens
gtagtctagctaaagttcctcccatgggaagcatggggagtgggaaataagagttcctgtctaacggtgggctgtagatgcctattttttaacttgcactatatatatattttatatatatataacatatatttatataatttatgtttacatattatataagtatatatgttatataatatattatatatgttatatatataacatatatatgtttatataatacgtaaacaaattatataaatataaataaatacatataatagatataagtatatatacttatacatcagtattgaatcagtagtcaacacccaaaagttggaagattctatataaaatccagatttcaaggttctcctgtggaaaaatctggccatgctgggctcacattcccacagggcagcctggttgttgctgcaaagaggctgccttctgcagatggggcccaagctctccaggttgctgttctcctacccctttctacctcctgccaccccctaccgtctaccctggtctgcatcactcatgtctatgtcccctggtgtctttagatattttggtttggggcttacagagtagaggttaagagcacagactctggaatcagccaagccttctgttcaaatctgatctatgtcacttcctaaatgtgtggccttgggcaacttagctaaactccttgagactcagtttcctcatttggaaaatgagaatagtaattgaactaccttatggggctgttgcaagaattaaataatgtaatcatgtgagtctttttgtatatgtgcaagatacataattgatgggaattactgttactctttgaaaagcaaaactgggcaatgtgagaggaagcctggaagagaactagagcctctggcctgatgtacactttgtctggttttagcactgcccttggtctcatcggttttcagaaaaatattttcataagctcagttccaaggagtcccctttctgtagcaaggagtccaatagcagttttgggaattaggggttcaattagagcag

SEQ ID NO: 11508 - DNA, 1050 bp, Homo sapiens
cattttcctttttttttcttttttttttttttgagacagcatgtcactctgacacccaggctgcagtgcagtggctgcatgcacatggctcactgcagcctcaacctcctgggctcaagtgaccctcctgcctcagtctcccagggagctggagctacagatgtgtgccaccatacccagctaatttttaaacttggtagacacagcatcttgccctgttgcccaggctagtctcaaactcctgagctcaagcaatcctccaatctcggtctcccaaagtgctgggattgcaggtgtgagccactatgcccagccttattttcctttttggtgaagagaatccaagtagcttatcacctgtgtcttcacaactaaagtttaatttttatgtaggaagtcaatttatccttcaaccctggagtgaactgcaatatagtcctgaatcttgactttacagctacactttagaaataatgccctccttttggtactgttgtggcacaatgatattaccagagagaagataaatgtatatattgtggactcagtaaaagacatagcactatgttccttttgagataacacattgggcaaaaatgctttggcaaaaactaattcactgtaaaaccaaatgaaattcctggttgcctgaaccagttgaaaactggttctagctttgtgtagggacccttcctctctacatgtatacaggtgcctcctggtttttactgaagtgttttcctggatatggaggggccagatgagggtgaagacttctagctggagcaatgatggggctggggtaccccatgggtgaacagggaacaaaatccatctgacagtgtctgtgtaggaagcgaaagttgagagaagtgagtcagattctgggagtccttgaataccaagttcaggacctcccggtggaaacagtggaatctgtcccagaacgaaaaactcttttctccagttctgtggctgtgattcatccttggttttcattgcaagtgcagcaatccaggctgtagttagttgtgttcccactgggctcat

SEQ ID NO: 11509 - DNA, 1117 bp, Homo sapiens
agagaagagagcttgtgcagggaaactcccctttttaaaaccatcagatcttgtgagacttattcactatcacaagataagcatgggaaaaacctatccccatgattcaattatctcccaccaggtccctcccacaatagaaaggaattatgggagctacaattcaagatgagatttgggtgaggacacagccaaatcatatcactccatttaatgttccagtactgatttctcttctttctctccaacataattcatgtgatcttcctgctttgtgtgtatctaaatcttaaatcctctctaaataaggtggggaaaatgtttgataaaagaataaagtatggtcctttagtacgtgtggtgcattggaatgtgaacaacacctatacttaaactagaacaaatagtaattcagtggaaggacctttaagttcttctcttatgattttaagcatgagaagagagttgaaaaatttgcccatggcaaatattgctggtttcttcttctggattcccaagtctaggtttggggaagaggattaatcccagctcatgggcattgcaagctacactgtgctatgtctaggtggggttgggctggggcagggatcatggctcagtattttgaacccatgaaatcacaagctacatcttacaagggtgccattgtgcctggtacctcagtggtgatatcactgctgggctgtctccctccaagcgttctcatagcctgggcaaggcagctgtagaatggttctccagtgaaatcatctggcccaaatcatggctgccagcctcaccctgcacacccaggccccatcctaatctcccagcaggaggtgcttggggcaagctggctgccttagacacagtgatgctgggcctgctggcctgagggagcttagctcaggtagcctccccagagagacctggcccttcccaaggagctggatcttgaggccagctttccaaggccaagggttgccatcggctgccgttccctttccaagccatggatgctctggaacattgtaagtttccttcagtgcaatgtggattatagatgtgtgtataactgaaatgatatctcaagtgtctagcatagtgcttggcgtat

SEQ ID NO: 11510 - DNA, 1029 bp, Homo sapiens
ctttttctagaatttcctttaatatctctgaaggcttagatgtcctctcataggaagggagaggtgttttccatgacaagtgccagggtgagtgtagtatttccacttacaatgaatgtgtacaacagcttttctttgacagtgctttggaaaaaaacaaatgaaacacagaaatctgccaagcttgatgtttagaattgcgcaattttttttttttttttttttttttgagacagaatctcgctctgtcaccaggctggagtgcagtggcgcaatctcagctcactgcaacctccgcctcccgggttcaagcaattcttctgcctcagcctcccaagtagctgggactacaggcatgcgccgccacgcccagctaatttttgtatttttagtagagaccgggtttcaccatgttggccaggatggtctcgatctcttgacctcatgactcacccatctcggcctccctagaattgtgctattgaagagggctttcctccagttgttctgacttcatcatttttctgcagtgaaatgtttactgacttcacaaatccaccttgctacgaagtcttcagaagtgctgacaattctgcccttcagagatgtgacacagtccagtgaagattttggtttttgctaaatttatctccagtattacaccttcatgaatgctagaatcccatttagattttgcatttacatcatccaataggaattcctatctaagtcagaaattcttagtcttggtgaatggccagatggttctatgggtctcttatggatcagcttctgctggttcccctttcaggtgtcttcagaggcatgtcctctttattcctgtaattgaagggaaatgcacctgtcttctcatcctcccacctattattcagagagcatataaattacttgatgaaatcctagactattaagagccaaaaggagcccatgtagttacagaatccaacttctcattttgaactgaagcttacagatagaatagaatttgccttgggctgcaaacagaaa

SEQ ID NO: 11511 - DNA, 1049 bp, Homo sapiens
gcctttaattgccatccacttgttaatctcttcctagtttatatctccaggccactccattcccgaattcaagactcatttgttgcctccttgacatttccacctgaatgtctaatggagatctcaagcttaacacacccaaaccaaatttctagtagcccctccacacctaaacctgctattcctacaatgttcctcgcctccatcaattttaactctatccctctagttgctcaggcaatgtaggaagcaatcaccatatgtgtcatccttctgtagccctgagatgagctctgaccagacagtagttgagagagaatgggagggagaaagaactccctttgggtcttgagacccagctctcccaccagactctctgagccttattttccttttctcaaactggcaaacttcacttaggaagtgtcatgagaataaaataaaggattgaaaagtgcttaaaatcttgagtcatcaggaagagattaagttatattctgtttaggaaacctgtagtgtatgtatgtatgtgtatacatatttatatgcatatgcacacatgtgatttccataaaaatgtttaaaaattattctttttgttttgatttactttcctttgcttattttggaacattaaaataacttatgaaagtactgttgctggtacagagttctgatattcttcttgttttggctcacaggaaaaatggaggctgcttccagcatttttaaaggtaattgtttcacatttaataataattggttatttttcagatgaaaaagtcaagaaataagccattttttaaagattaaatttttgtcatcaacattttttgattttgtatagctgtgtttggaaatacaaggaattataaggtaaaatccctgcctgaaaggtgctggtttggagagtggtagtctaattttagagagaagtagtagtacatgcacagtagcatggcacatgattaaaaaccaaagtgctatcagcaaaagagcaatggtcagagagggccacccaaatgaagtgagacataaaccacatctta

SEQ ID NO: 11512 - DNA, 1038 bp, Homo sapiens
gtcagggccagtttcctgatcagatttgaaagccgtgttaaggatttggcttttcttctaaaagccgtaggaagctattgaggagtttctaagttggggagtgaccaagaatcaaataaaatggtcgtaaggtcaagaagtttctttttccccctaagagaccaggtcttgctacattgcccaggctggatttgaactcctgagtttgagtgattctcctgcctctgcctcccgagtagctgtgactgtaggaatgtgacaccttgcctggcctttttgttattttttaaaaggagctgcacataaatggagaagaaggtgctgggtgctgggcacagtggctcacgcttgtaatcccagcactttgggaggccaagacaggcggatcatttgaggttgggagtttgagaccgactagcctggccaacatggtgtaaccccgtttctactaaaaatacaaaaattagctgggcatggtggcgggcacctgtaatcccagctactcagaaggctgaggcacctgaactgcttgatgcagggaggcggacgttgcagtgagccgagatcgcaccactgtactccagcctgggcaatagagcgagactctgtctcaaaaaaaaaaaaaaattttttttttgttaaaaactaagatacaaatacacacattagcccgggccagaatcatcaatatcactgtcttccatctccatgccttgtcccactggagggtcttcatggacagtaacacacatggagctgtcatcttctatgataacaataccttcttctagaatacttgctgaaggacctgccggaggctcttcttgaggaggggtcattcttttcagaaatacactctatgaaatcaaatcaagttgtaagtcattaggcgataggaatttttcagctccattataatcttatgggactgctgtcagatatgtggtctgtagttgaatgaaatgttgttatgtggcacatgaccatatattcatgtactcatattttgatttccgagagtcagattgcttctcaagg

SEQ ID NO: 11513 - DNA, 1008 bp, Homo sapiens
cagagtctgcccttaatatatactcttaaaagatcatttaaaaatgggatggggggggacattctttggagaaaaagggattaaagttcaatgtggaccataattctactacagaaggagcactttgaagtggtcaggaccctgttgcagagaggagcagtaactgtcagattcctgattctctttcagtgccgtttgagagacatgacatactctgcccctattacagtggatattgaatatacccgaggcagccagaggatcatccgcaatgccttacctatcggcaggtgagaaatgaaatccgtattagagccacactgcctggattccagccccatgatgtgatcccatttcctcatctgaaaaatgcaggaaatgctgcctatttcataggtccaatgagtcagcatgtgtaaagcacttagaataatgtccagcacatagtcgtggttgttactatttattaattgtgaaaccttttctaagaagttgaggaaaatgtttccctttcctactataactctgagctgctagggaaccactagatacaatagcctttcagtgaactctcctggacaggtcttcttggtggataggtatattctgagattgagttttcctggaatttaactttttctcatctacaagtatttaagggagaagttacttatttgcctggtacaagtttggaaatgatagcatccacttgcgtttttgcaatctgcccttcctgattagggaaatatattgactctcctttagaaatggacaaaacccacaatattgtgtggtcaataatggtactagactttaaactcagtccacataatttctgttcaagtgtttttccccctctcaaaagtgctaagagcactttgaacaaacatccatttgttcaataaatatataccaactgcctatcacttcttatgtatgatgctgagtacttaggtgagtaaaagatatacaaaatacagttcctattggctaccttcattcacagct

SEQ ID NO: 11514 - DNA, 1058 bp, Homo sapiens
taatactaccacctaataactatttatgtcttcaatcaagaataagtacttttctgacccagtgtaatggctcacccctataatcccagtgctttgggagactgaggcaggagaatcgcctgaggccaagagtttgagaccagcctggacaacatagcaagaccctatgtctaaaaataaaaataaaaaattagctggacacagtggcacacacctgtagtcctagctacttgggaggctgaggtggaaggatcatttgagcccaggagttatgggttacactgagctatgattgtgccactgcactccagcctgggtaagaacctatctcttaaaacaggaaaaagaaaaacttttctgttttctgctaccaaatgaaatatattactttttagaagattataatttaccagcctgggtaacatggcaagaccccgtctctacaaaaaacttaaaaattagccaggtgtggtgatgtacgcctgtagtcccagtaactcagggggctgaggctagaggattgcatgagtccaggaggtggaggctctgtgagccatgttcatgccactgcactccagcctgggtgacaaagcaaaccctgttgccaatatatatattgcaaatatatatattttttgcactttgtaaatagtggtttttggtcagaatttttcttccttaaagatgtgaatctctcaaagtgctattttatacccctcatttcaaaattgactgagggccaggtgtggtgggtcacacctataatcccagcaatttgggaggctaaggcatgagggttgctggagctcaggagtttgagatcaacctgggcaacacagtgagacctcatctctactaaaaataaaaaaaagttagccaagtgttgtggtgtgcacctatgatcccagctacttgggaggctgaggtggaaggatcacttgagcacagtttgaggctgcagtgagctatacttggaacaccactgcattccagcttgggcgagagagtgagacccttactcaaaaaaaatatagatatagatatgtatcctgagtata

SEQ ID NO: 11515 - DNA, 1080 bp, Homo sapiens
atactttgttcttatgtccagattatgttatataatttgtttctaatttttagttgtagaagcaatctgtgttcatgaaacagcacaacatacaccacgcaattaggtttattcccttgtagtagtgctgtttgagtgtatctttagaaatctatgaaattattcctagctctctaataggtcaatatttggccagatgccacaccataggttattcaacaataacagtagtggccattgaacactactgtgtgcaaggtgccatgcttataaaaaataaggaaaatttgataggtagtaaagttgaataacttgaccaagtttacacttttagtaaacagtaagactggactcaaactcaaggttgtctgactcctgatcctgagctttttagagcttattcatggagtatgaaacctgtagtgagagtcctcataatagtctggtgtgtcactgagctgttagcttgcttgatctctaaattgaacaatggtttaactctttttttttaaatggggttttatcgtgttgccctggctggtctcaaactcctggtctcaagccatctgtccacctcagccccccaaagtgttaggattacaggtgtgagccaccatgcccggccaatttaactctttatatttgattttttgctcctgtttctctggaaattaaacatgtaaagaaggtgagatggctgactgttggctaacagttctagaaatacatgtacagctggaaatgcttgttctctctttccccatttcagccttagaaaggggagagaataaagataggggtactgaataagttaagtatgatctaagttggataaaagaacccaggtttatagaagccaacatctattggatccaaacactcttagaggtttgagcttctgaatagattggcgcattccagattcaatttgtagtgcctcacagaccattatattttctaattaagagcaacagaataattagaccttggtactattctgaattcccaccttaaaagattaattctacagaggaactgtttaaaagacacttataacttactgagtgtctttccaaaaga

SEQ ID NO: 11516 - DNA, 1028 bp, Homo sapiens
caaaaagtatttattggatgagtgaccatggaatataaattttgtagattaaaggtttaactctgactttcttttggatttgaacaatgtaaccaagactagaatacctttttagaacagggattctcaactagggatatgctctttggagagctttttcaaaatagccctgctcaggcccaacctcttatctaccgagtgagaatttgggaggtgagctccagacatgtgtattctatgtctctctctctctctctctctctctctctgtgtgtgtgtgtgtgtgtgtgtgtgtgtgtgtgtataaagtatataaattatttagaaacagaatcttgtttcgttgcccatgctggagtgcagtggcatgattatagtcccctgtaacactcctgggcttaagtgatcctcccgccctaggctccttagtagctaggaatacaggtatgtgccaccatgcccagccaatttttaaattttttgtagagacgggctctcactctgttgctcaggctggcctcaagggatcttcccactttgacctcctacagccctaggatcacaggtgtgagccaccacatttggcccaaggtgtattttttttttttttttttttttttttgagacggagtcttgctgtttcgcccaggctggagtgcagtggcgccatctcagctcactgcaagctccgcctcccaggttcatgccattctcctgcctcagcctcccaagtagctgggactacaggcgcccgcaaccacgcccagctaatttttagtatttttagtagagatggggtttcaccgtgttagccaggatggtctcaatctcctgagctcgtgatctgcccatctcggcctcccaaagtgttgggattacaggcgtgagccaccgcacctggccccaatgtgtatttttatagatggtcttcaggaaataaatactcatatatctgatgggagtgcaaaatggcacaatccctatggggaagaaactggcagtgtctaccaaaattacagatacgtttt

SEQ ID NO: 11517 - DNA, 1051 bp, Homo sapiens
cagcgtctattttataacatccctgtgagatatggatgttatttccttttttttttttttgatcctcccacctcagcctcctaaagtgctaggattataggcatgagtgaccatgcccagcctcccattttttaaaaatgggaaactgaggttaagaagtgtctaaatcatacagctggtaaaaaaaaaaaaaaagaaagaaaagaaagtcacacagtggcaaacccaggtattaaactccggtctttgatttaaaagccactacaatacgttttcttcgtaaaaaagatgtcccttccgccttcagagagcttttagtagttgaggcaaactcataaaaagaaaactgacaggacggatgtgctaagcaccaaatgattgctacagatttgtggtttaggtatcccttagaaaagaagaatgttgagggctgaagtggttagggaaaattttatgttgaaagtgggttttaagcttagccttcgagaattgctaaaacttaaatagaaaaggaaaaggactgatgtgtagagggaggctgtaaaaaagcaaagaagctcaatatgagataatttggaaagaaatatagctaaagaggaaaatttgataagaatagtatgaaagaagactcagagcaggttagcagatcttaagtgccaaactgaggactttgacattttaccttataataatgtataacagataacctgtactgaacatttatcacttgccaggcactgccctatgtgtttgtacatgcacgatctcatttaattcttgcagtaaatgaggtccagagacaagtaacttgccaaggccacaattgttcagaagaagagccaagatttgcatacaaacaatttaaattcagaacttctactcttaattaccacactgatttggttttagagtctatggtgggttgaacaaatttcaagcccaggatcactgaccttaaacaagtaatatgcctcacacctttggcagtttttaacattttagttaagaaacgtaatgtgacaatagaaactgacatctcattcctgtccct

SEQ ID NO: 11518 - DNA, 1034 bp, Homo sapiens
gtaaccacagctatatatgactgttgagcacttgaaatgtggttagtccaaattgggatgtcctatcagtgtaaaatactcactagatttcagagacttggcacaaaaaaagtaaaatatctcattatttgtttaatataggttacatatggaaatgataatatttttgatacactgggttaaaatattaaaattaattttacctattctttttcaatgtggctactagaacatttaagagtacatacacttggcttacattgtggcttacattatatttttattagacagtgctgttctacctcattaaaatatactgtaaggttgcttggaaattgaattaagaggacttggatccagctaaattaaacaccttaaggtgtcaggggaggattaacttgagaagcttgatattatctatccttaggttatataggacctttccagtagctagacacctttaagtaggacgtcatgctacctttgtattgcctatctgtagtcattgttctttagatctgtagtgggactaactactttgagctcttggttaaagtactctctgaaatggtttttgactagtagaggaacatcaaataagaatcatctccactggctgtttgttctcttagttctcctcattctttaacttttaatccttccttattgggaagagcgttaagaacttctgtttctactactttattctacagtgtcagttggcatgctgacctattaatatttattttgttaatttggacaacagataagaaaaattctgtaaataaattaccaagaaataatttttaaaaccacttaaagataaaactgcactttattcttctagtactatacctgatctctttttctctatattttcttaaccatgctgtttactgtgggtaaattaggtgggtagcagatttttagaagctttgcatgtgatctaacagaaatgtgaacagtgatttaaaaaaaactaatatttatatagtgctttaaggtataaaaaatgcttccatatacgttatctc

SEQ ID NO: 11519 - DNA, 1353 bp, Homo sapiens
ctaactgaacatgtttaccagtccaaaggttataatattattgctgtgagaaaaaaagaggtgaaaacatttataagaatatcacaagttattgggaaacccgttatacttcagtggattatgaactatccatgatactgaaatcttgatataagatgcacgcccagactttaaaagaactacagagcttccttctcagggctatcacaggctccatccattttaacaggcattttttgaaaagctctatgttaattaaaatgctttatttatatactaatttctcatcccatctttcaaatgtgaaaaggaattaaatatgaaatggctaatttaaactgtcaggattcttttttccaagtcaaccttacattaagagcaggaatcctgtgcttaagaaatggttcccaattatcctgtcttgggttttgttatacattgtacagaagtcaacaaaacaagtatgtaacagaacctgcctaaatagcagccgccctcattaaaaacagagaattaatcagggggtgattgaaggaagcaatgcctcatgttcccccccccttttcttcttttctaatcatagaacaaaatatgttacataaaaggatcggaactattatgcagtactcaattagagggaggtgaataggtctctaacatgctgttttatcaaaagagcagactggtgtttgcatgactgttgtttcattacagaccctgtcattaattccatgtgtcaatactgccctgtagtacacagagcagacaagaaagaagagcccttgaaaacaagggaatgatttttgagtcgttatcaagctaagtggcaagcgggaagctgaaactcgtataggtaaattcgaagggactcttgggagatctgcaagtgggaaacaagaatgcattttaccaactgcttaattatgtcctgtttttcaacaagtacacttgaattgaatgttttgtttgtattgcacaaaaacatgtgctgtgggcaagagtattctcttgctttcaggtcaagtaaagtgttttatacacatacacgtctgacctattctatattgtgcgattgggtatgttagtatctgaaccccaattttgcactgtcatttttgggggaaagagtcatataggaaccagaagccctaaaaagcagaaccttctctaaggtgctgagaagtcatataagcccaggcatcctagagtataccatacttacaggcaaacggtggctcaggaaaatgttaaaatatatctggaaaaaaaaaacagaccagaatattttaaatatggtgtaaattccgtatctcccatccctagctctttaagaaattatttttttggtttcca

SEQ ID NO: 11520 - DNA, 1122 bp, Homo sapiens
caactaatttgaaatgaatcaacatgtacttacatatcactagagactgaggcaaaatcaaaaccgacagatttattccattgaatgaagtgtatgcatatcaaatcagccatttaattgtatgctccaaccactggggcaggtgaaattttggcagcttcaacttgtctaaaacaaaaccaatccaccaaaaaaaaaaaaaaaggttaattattcaaaacagaagagacctgctccttgtcctgagcccatttagaccttgacttttcatacttttaattggcttagtaggtttggcctgtgtgaatgaagtcttttatctccctcttccctctttttctttccatgcccctttcatctttcctattacaaacacacagagaaagctcaagggaaaatactttggtttttaaagacttttctttttaaaaggttgtggatttgggtgggggggaggggtgtgtgtgtgatgctggtgaatacttttttttctctctcttttatctctttttctagagaggagttgcttaaaccaatgggactaaaacctgatgggacaataacgcctttggaggaagcactcaaccagtactctgtcatcgaagagaccagctctgacacagactaaaagcatcacctgctcaactctcaatattgctttatcagcatcttttctctgtagctccaggggaatcttttctctaaaacatttatgcccttgctttggctagaaacacattaactggtttactcattgagaatccagcatatttaagaggtgaccctgtgttttttgtgatattgaggcattcatacagagctgcagttagacggggttacgggggctaaaagcagaaaaaaaattccatttcatcgggatggaactgaaggattttattctataaagcggccctggttgaatctggcaattctttttgccaagatccctagcagaagatttagccatgtccttcccctcacttgtgtgagtggccccttctgaatctctccagcagccagaggcacgtgagaagcagaaagagctggtaaataaagccttgggcaagcgacttcttagatcagaactcaccaaatggaagcctagcagctgctccataaacc

SEQ ID NO: 11521 - DNA, 1042 bp, Homo sapiens
tactgttaaactgataaagggtgtttatttttacttttagaattggtcctatgaagaagtagaaagtgagtcatgcactagacagtgggcctagctcatcagtggctaaagttgaaaaggggttggtttcctgtatatatatgtatgtatatacacacgtacatacattcatatatatacatatatacataatgtgcttaaccactgccttttaaaactttaaattaaataaaacattggggttgattcaatttggccatctgtgtgtgtttctttatagatacatgggctaaacaatactatttcacagtttatgcttttttaaagtgcttttacatccatggtcccacttctaatagcctttttaaggacaggtagagtacatggagggttactgaaaaggtcatttatccagaagttacctctctggcaaagcaaaaaaatcaggaattacgtcttaaaggcctttcagctgccagaggagatgtcacaaagtttcttgcaacttacttatgggagagatcttcaagaatatcactcttagactctgaactgaaatttgcatacgcttccaacatgttttattagctggctttgaagctcacaaaagaatggcaaagaaagaggctgctagattgaaggcaggcatactgaaagaagaaaaaggccaactgaaaactagatagtgagatgagaagaataaaacttcaagacatagcaaatctgggactgtctacttaccaaaggatactctagttgacccagaaaatgtgtgtacaacagtatggcccgtagactacttcctataatggtgaccctgagtttttttaaaagaagaaattaaatccagaacgctttataaaagggtaggaagaagacaatagatgttagaatttcatccaaaatgtttgagggagaggtgagtgacccaggttttaaccaacagcaaaagaaatgggcaattcataattttagattaagtgaaaagtttagaaaaaatttaagtatttttgttattctacaaatgcatttttaaagtatt

SEQ ID NO: 11522 - DNA, 1075 bp, Homo sapiens
tcagtcaattgtttggctgtgcatttgttacaaagttcagacttcacagctgaaagtgagtcagttctttatctgggtatgtttatcttggaacaaggttcagaaatggaaacttgaaacaccacccctaaaattagtactaaccatcacccactttcccttacaggcagacctggatcttcagaaagttttctaaaaagctccatttatttcaaatgtatataaattagataattttgaattagaacactttatagagaggttttcataaatgtccccgaatttgttgttagtacttattccttttggcctgtcaggtaggggtgacttctcttatgccaattcataagtaatccttccagttcacaaggtttaaacagaagtcagagcccagttaataaacccagactctgccatttggcagctgagtggcctctcagcttcagtttcctcatgtgtaaaatgaggaaagtaatgaatgcacatggtgttttataagagttataataatggtcaattctaagcaaactgaccacacaagtaggctccaactcttctttttggatgagtaatacttgattctcaaagacagtaatttattccaaacacaagatgaaattttctccaaaaaaaaaaaaaaaaggtatagaagtttgctaatagttcacataacactaagctacagaattcagaccacagtagagtgatgtttcatggctagtagtgagaaagactggatttgcttcctaacatgaaatgtggtgtatgaatataaatgtatccataccttgaattaaggaagcacttgtccatttcttagaagtgattcacttataaagtatcacactgatatgccatttaatagtatatgagtttttgaaataatggttcaaggtaaaagttaccaaccttattaaaataaatatgatttatattttataatatggcacatgagtcagaatttatctatttagagataacttaaatacaacacagaagctaagcaggttcttaaaattactggtgtctacaaactgcctgaatttttgtctttgctagttagtttcaccctgca

SEQ ID NO: 11523 - DNA, 1039 bp, Homo sapiens
caggctggagataacaataatacttgtgggattttgaatagtctctttcatttcagggatccccaatcacttaataaacattaattaacacaagccctcacctgtcagcacgggcttggagggtaggttggttttcaggtctcttgcttttctattgtctctgcacaaaatgcttgctcagccgttttcctgtccctaaactggtcatgctgttctgttgagcagtgttgctgtgttggaccaaaaatgtcacagaaggaacccatcttcttaagaggaacaacaaatgctatctcaagagccagctgtagcagtatctgtgctcacagagcacctttttaattaactggcttgatgtaaattaaaacttggaatttgggtcagtagagggtgatttggttttctgtgcagacttgctagttcagtgctggggcatttgcaagttgggtgttttcctgaaacataaaataaaaataacaaaataaaaacaatgaaggactaacctgaagacctagggtcaagggtggagttgatgaactttgaatagaaggaaggcctctaattctgagtctgttagtatttgtgaccttgagccaggcaccaaactcattattaccagacttattatctactgagaggtaaatacaaaatagtaattgactctggagtcaggcacacctgtaagctgcagtttccctatctgtaaaatgggtattataataaacagctctacttgtatagcttattatatgccaggcactattttaagagctttatgtattataatcattatagttacatcagctatgattattattattattgagatggagttttgctcttgttgcccaagctggagtgcaatggtgcaatctcagctcactgcaacctccacctcccaggttcaagatattctcctgcctcagcctcctgagtaactgggattacaggcatgcgccaccatgcccagctaattttgtatttttagtagagaaggggtttcaccatgctggccaggctggtttcgaacttctgacct

SEQ ID NO: 11524 - DNA, 1021 bp, Homo sapiens
ggagttcgagacaagcctggataacatagcaagaccccatctctatacaaaatgtaaagagtcagctgagagtggtggcatgcacctgtcatcccatctactcgggagcctgaggtgggaggatcacttaagcccaggagtttgaggctgcagtgagctatgatcatgccactatattccagcctgggtgacagatcaagaccttgtctcaaaaaaaaaaaaaaaaaaaaaaaaaaaaaaaaaaaaaaaagcagcagcatcgatgtacttattgggaaccacactaaccataatgattctgaggatatttgtgatgttttcctaaggggatagagggaaaatgccctcagtatatcatctataaaccataaaccagggggattaggccaaatcaacgattttgatctgggttctcatggattaaggcagggaggcttctcacttccaccctgtacacacacatcagcagagtttttcttcttgtatctgttttatatatactgggattttgaataagatgtagagtttgaagagcactagcctgggtaatgagcaagtccttcctgctctggcatcccatgaggctctgactacccacggagctgggatcccacagtggatgtgtgctttggctttgaccaatgagacaagcttggaaagtgtcctgctgagtctcagagaagcagctgaatgaggctaggcgagtgaggtagggccaggaggggagggaaagagtgctgcgcttggaacctttgcagctccaggacccaacagggatggaagagagaagacagggcatgaggagaaccaatattggtaataaactgaactggcagaattcagggtccaacaactggatgcttcacagttgaagatgactctcccttcctcctcctgccccgacaattgtttgcaattctgctccctccccaccacccgcccaatgcaaagcttgttcgtgttcctccttcactgctgcatcctcacctcccaggtggcattgctgattggtgggagcaga

SEQ ID NO: 11525 - DNA, 1083 bp, Homo sapiens
gaacaaattggccagcaataagaccaagaagagaattagagtggggatgtataaaggtgatgggactccctcaggttgggcattccataagggccccctggaggaggtgacttactaggaatgagtttggatgctttcgaaggcctgcaaggataagtgtgtttgccatatagtgggcccaggggagggaggctttaggagagatgggccaggacctggcacacagggcttgtctgtcaagggaaggggtttgggtgcaaagccactagatgtttctacgtgtggtgggatttggctcctttttaaaagatcctctttgtagcaattgtgaatgggagtttactcttgattttgctctctgtttgtctattattggtgtataggaatgcttgtgatttttgcacattgattttgtatcctgagactttgctgaacttgcttatcagcttaaggagattttgggctgagactatagggttcagccataaaaaaggatgagttcatgtcctttgcagggacacggatgaagctggaaaccatcatcctcagcaaactaacaaacgaacagaaaaccaaacactgcatgtcctcactcataagtgggagttgaacaatgagaacacatggacacagggaggggaacatcacacactggggcctgttgtggggtggagggctaggggagggatagcattaggagaaatacctaatgtaggtgatgggttgaggggtgcaacaaaccaccatggcatgtgtatacctatgtaacaaacctgcatgttctgcacgtgtatcccagaacttaaagtataataataattaaaagaaaaaatcctcgtagctgctgcctggactcactgcagggtaggagggtccttgacatgaagaagaaaatgggcttgtcggtgcccctgctgtgtcccctcacctcctcaatggcaccttcgcccttcattgcttctagttcccttatattctccctgaccccatgtcaaggcccactctgaggatcattccagcttaagagccaaatgactgcagcagcttactttgcagctcttcgttttggggcaagattggcca

SEQ ID NO: 11526 - DNA, 1056 bp, Homo sapiens
ggtgtttgtcctaatactctccctccccttgcccccgacagcccgacaggccccagtgtctgatgttcccctccctgtgtccatgtgttctcattgttcaactctcacttatgagtaagaacatgtggtgattggttttctgttcctgtgttagtatgctgatgatgatggtttccagcttcatccatgtccctgcaaaggatacaaactcattcttttttatgactgcatagtattctatgatgtatatgtgccagattttctttatccaatctatcattgatgggcatttgggttggttccaagtctttgctattatgaatagtgctgcaataaacattcgtgtgcatgtgtccttatagtagaatgatttataatcctttgggtatataccaagtaatgggattgctgggtcaaatggtatttctgctttacatattttaacttactcgatgatatgtatatgatcaacactcaaatgggcccatgatgagatgcttagggggcattcatgaccaactcaggttgccaggcctctccactgggatttctgattgagtagctctaggtggggacccaggaatctgtgtttttcacaagtactcaggtaacccttatatacaggtgggtttgagaaacactgagtcatgatttctctgttcttgtttatgtttgctgagcaggtacagtgacatttgtgtctgtttgcatgcatgtggccattcgcttgaatttcgccttttctagcccgagtctccttacctgtacaatgggaattgtaataggatctacttcctgccatgtgtgaacattcagtgagatgaagtactcagagcatggtgtctgggatgtggtaagtggtcagtgttaccattgttattggttatggctgttatttagggacacgcaaagtatacaaagagagacttacacccccccgcaagagtgctacctgagtgaagtgacctttacccagttcactgctgagctatgctcaagctaatctcccttcgctggtttgtacaagcagatccggtgcccagaggaaaatggact

SEQ ID NO: 11527 - DNA, 1051 bp, Homo sapiens
gccacatatttcctagggaactctaaaaatgccagggagagaccctcctttcctgcccccctacccaaatcagaagtaaacagcatatggccgggcgcggtggctcacgcctgtaatcccagcactttgggaggccaaggcaggtggatcacctgaggtcaggagttcgagaccagcctggtcaatatggtgaaaccccgtctctactaaaaatacaaaaattagctggacgtagtggcaggcccctgtgaccccagctacttgggaggctgaggcaggagaattgcttgaacccgggaggcagaggttctagtgagctgagatcacgccactgcatgctagcctggataacagagagagactctaactcaaaaaaaaaaaaaaaaaaaaaaaaaggaaaagaagaagaagaagtaaatgacacaaacaaaggagacccagtgaaatgcctggaagtctttagaacttatgaagaaaacagagttgatagcaaccagattctattctaatgatccatgtcccatctgctggaaagaacttgcttccacagcaaaatctctgcatattctcttgagcaaggggagagggtccagaaaaacttgtagtttggggaactggccccacaaatactcgatctctgctcaagagaatgtggtggctgggccatctctgcattacctctcgggaccccctccttggcactgcagcctgtctctaaaatgcatactagagatgggtgtgcccaagactgcctttgaaagcgactccgaaaaatgtagcaccccaaaagatggagtatctgcgaatgacttgctggatttggctctcccgggacttcctctggcttccaggagtgatgtatacccgggttttctaccggtttggggagcatttattaatggtgctctgctgcttgttcgaggcaggtgctttttcactgccacagcctgccctgatggatggcacagcctcttccctggctgaggcggccccaatcagagctctctctcctcactccaggccttactcatcatagtagctactgtgtccc

SEQ ID NO: 11528 - DNA, 1030 bp, Homo sapiens
caacttatttttaaatagcatgttttatgttctaattatttactaataagcatgaagaacagataccacaaacaccaagataatcacctttggtatttgtgtgtgaacctttctggtctgttttctatgcttaaagctataatttacaaattcatattatgctatgcatactgtttgtattgttcttttttcagttggtagtatatcatgacctctttcttgcaataagtattattcacctaaaatatgattttaaaatactgtcttatattccatctctctcctagaaaaatcataatgtatttacccagtccccttttgttggacatttagattgttactgcttttgtgcttttataaatagcatcatgttgaatatttttgaacatgacatttgcccaggcatcgcagattactttctgaagacatttctaggtgtgcaactactggattaaaatgtgtgaaaaacacctttgcttttgatgtttgttgtttcagtcttactcttgaaaattctgtacaatttatactctaataatcagtgtttaagaatactcattttcccacactcttggctttcaaggttgactatcaccacacctacatataatcatgatttgggccccttctttctaatagttgtctttcatttatccatctgtctatccatccgtccgtccatccctttctcaatgtattggctgtaccttccagaatagtgttaaaaaataatggcgatacgtccctatttcttgtgcctgactttagtggaaatatctctagtgtttcaccagtaagtatgatgttgattattagagagatgttcccataatattaatgtgttgtgctcttcattttttaaatattaaagcagattatgaaataccttctgtcatattcaaagataattgctcatctcctttgatcagtatgattgaactatagtattaatttcctaatattaaccactttttattattagaacaaactcttcttagtcaacacttacaatttttaaaacacaccactg

SEQ ID NO: 11529 - DNA, 1047 bp, Homo sapiens
cctggccccccatgacctcttcgttgtctggattgtgcttccccatgcccacccccaggttgccctcatctgttttcaaccatctagtctcgagggtgcttccaggcaaccaagataggctgctgccctttgattctctcctgagcagtctctccattagtttgactgctggtcatgattagtgcagcgcctcacttgggttacaaagtctgttcaagccctagctgacacgtgtatcagcagtgtgaccttggacaagtcactaaaggctctgagccggttaccccccactctcaacccctgccttctaccagagtttcctccctgccctgctcaggccacgactgtgtaaaccaggggtcttccatctcatggctgcacatgagaatccacctttttttaaaaacaagcacccaagaatgattctactgcaggcaacaagcagaccccactccgagaagctgtgctcccacccggcctggctacagtcttttgtcacccggaagactgcagcccagccttgttcactctgtgcccagattatttctcttgcctctgttagagcctttaagtggctcttcattaatcttagaataaaatctagactttttaacatgccttatgagacctttcctgacttggcccccgcctttctctgcagcgcaaattctgaagccaaacagactaggttctagtcctagctctacctattgccggctctgtgaccttgggaaagtaacctaacctctctgtgcctcagtttcatcatctgtaaaatgataacaaataacagcaacaataataataataacagcaactgcagagggatgttgtaaggattagaatggttaatgcatgtaaagcattaacattgaatagtgcttggctcatagtaaatgccatataaagtcttaactctggttttcatcagtattattattatcttgctgcaaccctggatggatgtggacattccgtaagacaacctgctgtgggagaagaggtagggatcccaaccatttggggcagcttgttggaggaagtggc

SEQ ID NO: 11530 - DNA, 1052 bp, Homo sapiens
tgtttcctacttgttacactggggcaagccccatgcaggagccatctccacagagtccatacccaggaaaaatgatctgtatgctggaaggatacaggagggggatgtacctggaaaggtgcaaggcatgtgactggtgtatataactagatttgagcaaagcaaaacttcaacttggacacatcccagagatgagcaaagaggaagatatagcaagaccgagagaggctgggaagctggaaacaggagaacaggtgcaaagaactgatgggaaagccttcagaaccaagcctgtgcactgagcacgtatgcaggagctcccctgttaggcactttgtggtattgctgtgctacagctgtggctgcaggacttgaaggaaatgggcccaaccctgacattgttggcatctttgttcgctgattttttttttctgaatctaatgttgtgtttgtcttcatctaatgtttaaatttgtgacaattctgactatatgtgctgtatgccagacgtagatgaagattcctgaatgtaaatcttccatataattgtacttccacccctgctatttcatttcccctctgttattctcactctttaggggagagaagcaccaaagggttaggagacatctgtgccttctccatgcaccttgcaccagttcccattcagagccagctgccataccccagccaaatccaaacactcccccactttccagcctgcacccctccatctcctgacctcacaaggcctccatctcttggtgagatctgctttggttcttccttggtcgtgagctttacactcaccccctcgttggtagttgctctgccaccctacagccggccccagaaatcaacccctttccttggagggagggacttcaggattctcctgagaaggaattagacaagtaggcaggcaggggcacacgtggtcccctttccatctcaccagatactcagccctgaatattttgccagtgtccacggagtgagaggccctgaagtcctgacctgttcaaagagtccttccctatatagtaccaatg

SEQ ID NO: 11531 - DNA, 1032 bp, Homo sapiens
ttctggaggctggaagccccagatcaagctgctggcagggttgtcttcctccaaggccgctcttcttggcgtgcatggccaccctcttgccccactgtgcacacacaaccctggtgtctctcgtgtcctgatctcctcttcttctaaggacatcagtcagactggattagggccactctaatggcctcattttaacttcattacctcttcaaaggctctctctccaaatacaggcatatgctgagtactgggggttagggctgcaacataggaatttgggggaacacggttcagcccataacaacaggtagtttctctgaaccctggaacaaggcagtttagcatgtgagatgaattcctgagcccatggatgtcctcactcctaggttccatacctactccgcactctttaccacgtctccaacctcaccctcagcaactcttgatatcttttaatctactacctctggatatgcctgtggctcaagcatccaaccatgacctctttgtgggagggtcctatcttctgatctccccaaaactttctgtccctatcactaggaccttcatggtcttctctccatcttccctagtctacacactaggtacttcctaaggccccagcaactggcttttccaatagaatcgaagaatattagcattgggaagaactgaacaggctaatggtagccacctctgacctaccatctgcatttgtaagtaaagttgtattggaacccagccaagctccttcatttgtgtatcatctgtggctgttctcactgcaatgtcagagttgagtagtagcaacagagactgaccttatggcccacaaagcctaacatacttactagttagccttttacagaaaaggtttgctgagccctgaaatagatcatctgatgcaaacccaccccactttacaggtgaagacactgaaggccaaaacgttgatgggccagaggagccctccagtgagttacgggcagatccagggctgggattcagttctgcaaaatcccaaaccaggcc

SEQ ID NO: 11532 - DNA, 2053 bp, Homo sapiens
ggcattcacccacaaacacaggtcttacttgagcctggactttggaatgagacagatctgggttgaaattgaagtctaaggagctgagtgactgtagggccagatatgtaactcctctgagtctctgtttcctcatctataaaacagggacatgaaagcttaccttttggggttcctgagggtttaagcaagatacaggtgtgagctgaggagtcaggatgcctgggttgagtgccagctccatcacctacaagctgtgcgaccttgagcaaccgatacgcaacctcgatgccgcaatttttcttctgtaaaatgagcacaacagtccacagtttatgagattattttgaagatttaagtgagctattatatgtgaaatacttaacaaatgaaaagctgtctataaatgccagtcatgattatgatattaactatagtgtgttgggaaagctgtttgtaaatgtttactgtgcctttggttattgttattatctttgctctcttccaagacaactaatctgactgctggatggagccatagtgtaacccaaaccacaattcccaggggcccacacagcagaacggggctgcatcctctcatatttatccccacaacagccaaacacctcagtctgcaccttccaatggtgggcttcaggaatcttccatatgagcaaggaaaagtgacttttcctctcacacagctccccaggcagatggctgctgccttggagaggagccttggaatttgctctgttgcagattgccaacctgctggtgagacccagatgaatgagaacagaaacacatgcacagagaagtgagaagccactggagccacggcagagctctcacgaggccctgcaagtgacaggccacagggagggctgggatcagagggaccaggctctagaacaattggaaaaggacttggcagcaaggaaagacctgccctgggattggaggattgtgtggctgaaggatggtggtgggggggtgtccagatggcctgattaaatccctggagagaggatctgcaattataaaatcatagcaatgaattacgcattccatgtattaggcaattattatcatcacacaccgtgctaagtggttcaaaagaattatctcttttaaacctcattgcagatgtagacagtgaagactattatcatcttccctgttttgcagagggggagactgaggcttagagagtttttttcacctgcccaagatcccttagcaagtaagtactgggatgtgaattttggtcttaggcaccagcctctcctgcctctgtgagggcaaaggctttggattcagacactcagaccttcgcctcagtttccttgctggtagaattgcataatgatgatgatctcctcccaagagaggatccattgaagtggtgaaaattggctatttagcaccgtgtgtgaaacacaataagcacgtaataaagggtgtagtgtttctatgagtgatcatggttattggggctgctcgggccttttgtggtacaggatcccagagtcatagtatgaggaatccctttggaagcctgtgcttccaagcagcagcagcagcccagtgtttggcagcacatcactaagaactgggccatgcagagtgatcagcaggatggactatggagccagactgctgggttcaaatcctgactcctactcagctgtgtgacaatgagcaagttgattaacccctctgtgccccattttccttatctgtgaaataaatttaaaataatagtgccttcatcatagggttattatgaggattaaacaagttcgtatttgtaaaaagcttacaatatgcctgacaaataggaatgctatgtaagtatttgttaataaagcatgttaaataagattagtgttcccattttacatatgagaaagcaaaatgaaattaaagctgtgccaggttgcctggtgagtgagggcacagccaagggatgaacccgggcagcctggcctccgagcccagatcctcaggggtgggcttaacagagttacactggagtaaaactctcagg

SEQ ID NO: 11533 - DNA, 1051 bp, Homo sapiens
tttggagttttaagactaagaggtggagtagaatgagcatgatttttgaagtttcaggtagcgagagatcttatttgtaagaatctataaaatctatattttttaatatagagtctggattgatgtttgattcttatcttgatgacattgcttggcgttacattttacatttgtttgcaaactactttttaattcaaataatttgatgatttccttacacatattgtaatgaaatctttgctctcttacaggtagagctgagtaaagaagaagtaaaacgcctcattgctgaggcaaaggagaaattgcagtaagtttaggaccagatgaaatctatatcttaaatgatgatgaccatgtggtcttgttattagaaggtagcatttgggtgattctctttttctttctgtgctcatagagaagaaggtggtggcagtgatgaagaggagacaggcagtccttcagaagatggcatgcagagtgcacgcacccaggcacgcccaagagagcccctggaggatggtgacccagaggatgacaggacgcttgatgatgatgagctggctgagtacgacttagataaatatgatgaggaaggtgacccaggttagtttatccacttctgatggtttgtaattacaagctcaatatgttggatcatgtttgtggtgttccaaagctttactcttagattttattgttcttgacatcagtaagataatctggttgaagacttgggcagacagcatgattcctaaactagtttagaagataaactctaacccactaagatacaaatctaggatctaaaaaaaaaagtactgtgtattttattgcatatatcaggtttaataatctgtaacccacttgtgagtttttgtatgcagttataatgctatggtgtgcttgaacttatatccatataccttttcctcaactgcagtcagtcttctcacaatacagtagtccccccttatccacggttttgctttcttcggtttcagttagccacagtcaactgcagtctgaaaataagtgagtaaagtacagt

SEQ ID NO: 11534 - DNA, 1053 bp, Homo sapiens
aaagccctgtgtggtaggtataatgcccatcttagagatgaaaaaatgggtacagaaaggtacggttactaggaacattagtgccctgtaacatatttatagaggctcctaaaaaaggatgaggtctgtcagtcacaatggtaacacccattactgtgttattccccaggaatctaatgcagattattttgggacttctggagcatggggaattcaccagatgggtttgactacttccctttttcttctgagtatcttctaacatttgagggactaagtattctgccaaacagtttggggaaactacattttctttaagtgccagcctttatgtgggagcatggtttgccctttgattatgcagtacatttatgtttcttttgtttactgtatttcagagggacgcatttatagaaatactgtcaaatagattcttaccacatgttaggtaattttacgaaaagcaaaccaacagagatctctgcatttatgtttcctccctttaggtccaaacactgcagtttcatccatttgaagcacagactctgatttctggctcatatgataagtaagaaagcacagcaagaatgattgctactctgtttttatcctctagaagtcattttaagagtatcacttggtacccaggcagaatgtatccttgaggccacctttatgtttaaattatttgcactacttatttttccttttaactctggtcctttcagtctacaacggaacatgattctgtcataataatataactgtaggaactagcaacttctttggcttttagaggctgtactttgcctttatgggaagaatttccatgtcacatgacagagggcatggatatagggagacatgaagaactggggccactgtggtcaaccacggggtttatagctcatatcagtgctcctttttacagattgggtctacaggtaggagaaacagatagtagaagccaaaaccaactttgcagtctttattttcatttcttatcctcttgaagcatgatatgtttacatttcttgtgattcacgcagaatt

SEQ ID NO: 11535 - DNA, 1027 bp, Homo sapiens
actcttggctccttgcagatcctgctctctctcagccgcctgtggacatgcgcaaagggccctctcctgagtccagatgatgctcataccaatggcttcagtgatggcggtgactgaaccgaaatgggtctcggtctggagccgcttcctctgggtgacgctgctgagcatggtgctggggtccctgctggccctgctgctgccgctgggggctgtggaggagcagtgcttggctgtgctcaaaggcctctacctgctcaggagcaaaccggacagggcgcagcatgccgccaccaagtgcaccagcccgtccacggagctcagcatcacctccaggggcgcgacgctgctggtggccaagaccaaggcctctccaggtaagacagactggccgtcttcctcaatgcttgttaactggatagacagacatagaatgtgtcatgtcctgtatgtggggcatcggggtattgtgaacaagtcagccctgagctcctagtatagacaaggtgatgtgactgagacagtgtcacaagtgtggtgatggggaagcataaagggctgtaggagcataccaggaaggctccctggaggaagtgacacctgagctgggacccagttgttaagtaggagtcatccagggtgaagggcatccaaggaaaaggactccaggcagagaccagaggttagttgtcataactgacataactgtcgtaagagagcctgggggcattcgaggaactaaaggaagttgaatgtgtggggctgatcctcaggtggccaagaggggccaggacaggagggctagggctagagcaggctccccacctccaccagttctctgtggtggggactgaaagtgcattgttagatggtggtggcatccctggcctctccccatgagatgcctgtagcactccctccacctcctcagttatgacaactaaccaggtctccagacgtcaccaaatgtcccctggggcgcacaatcaaaccactgggttaaaagagttaaagaacagtcccggga

SEQ ID NO: 11536 - DNA, 1053 bp, Homo sapiens
aggcatgattcagagccatgttccttcactcactgtgaccaagttgggctcttagtttcttctgctataaaaatgaaagtgatagtagaacctgcatctgtggggttgttttaaaaatgaggtaagattgtcacagggcctggcagagagtatgtacccttaaatattagtgtttgattaggggattttaaagcactggtaaagcaccttagcacttccatgacagtcctttataatctttccaggcacttttgtgaactcacgtatcgtgtaaaagcacagtgatgtattaagaaacttcaagaatacctttcaccagctgggcatggtggctcacacctgtaatcccagctctttggaaggctgaggcaggtggatttcttgagctcaggagttcgagaccagcctgggcaatgtagtgagaccctgtctctacaaaaaaatttaaaaattacctgggcatgtggtgtgcagctgtggtcccagctacttgggaggctgaggcaggaggatcacctgagcccggaaggtgaagattgtgttgagctgagatggcaccactgcactccagcctgggcactagagcaactagagcaagacactgtctcaaaaaaaaataaaaataaaaataagaaaaaaagaaagaatagctttcatgaatgatcctgagattgtaatgcttaatttgtagcagctaacatttattaagttcttactatgtactgtatgcattcacacttatttaatcctcacaacagccctatgaggtaggtcttatggattgtccccattgtacagatgaggaaactgaggcttagaaggtgaagtgatgccaaatgaaatagcaaagccaggattgaaccagaataaggtaatcccactttcttaaccaagtttggtgcatattctgttgactctgtcttggaaaacaaatatttatctgaaattcagctatcagctatgatactaagaaatgctgattattataaaacagggtcaatattaccaccagtgactcttcaccaagttaatgtttactgaactgaaatcaaa

SEQ ID NO: 11537 - DNA, 1030 bp, Homo sapiens
catgtagctctacctccttcacttttttttttttttttttttttttgagacggagtctcgctctgtcgcccaggctggagtgcggtggcatgatctcggctcactgcaagctccacctcctgggttcaagctagtctcctgcctcagccccccgagtagctgggattataggcgccatgcctggctaatatttttgtatttttagtagagacggggtttcaccgtgttagccaggatggtctcaatctcctgacctcgtgatccgcccgccttggcctcccaaagtgctgggattacaggcttgagccaccgcgcccagccttttttttcttttttgagtgtattggtcttatagtttgtcttctgtgaattgctagtttatatcctttgcctactttttaaattgtggcaaaatatccataacataaaatttaccattttcagcatatagttgagtagattaagtacagccacactgttgtgcagcagtcacggccatccctctctagaactcttcatcatcccgtactgaaactgtacccatgaaacagtaactcccactctcccctccccctagcccttggtaaccactgccctactttctctctctttgaatttgactcagacctcattaagtcatgagtttcctcatatttataagatgtacctcattaagcggactcatataatattcacccttttgtaactggcttatttcacttaatgtcttcagggttcatccatgttataccatgtatcagaatttcattcatttttaaggctgaataatattctttctatttttttttttaagacaaagtctcattctgtcacccaggctggagcgcagtggtgcgatcttagctcactgccacttccgccttccagattcaagtgattctcctgcctcagccttccgagtagctgggatgacaggcgtgcaccaccacacctggctaattttttgtatttttagtagagacggggttttaccacattggccaggctaatcttgaactcctgacttcaa

SEQ ID NO: 11538 - DNA, 1053 bp, Homo sapiens
aagaaatatgtttctattgcatttgatgaaagaatattcatagtatccagccagataggctaattgaggctacctttagaaacctgagctttgttaaaagttgatttttagtggtgtaatcaacgtagaaacttgtaaggtttaggggtggggtgagggtggtgaaagggattatagtaaggttttcagtctgttttttttttttctcccctacagcagcagtcagaaataactcccaaacaaattacctgccgcacaagaggtagctgttttccattgaaatataacacataagatgtggacttttaagatatgataataatttgcttgttttaaaaagatttttttctggtgacatacaggccagcttgaagtgtgatgtgcttgcaaaggaacttgtattttggaaatagctttaaatagattctcttggtgttcccttgcaccccagcccagctgacttttcttgaaactggcttatttgtacttcaaacaagggctttctttttacctttttgaattgatcctgggaagaacataatgagctgaatctgtcgtgtcctcagcatttccagtgctgccaaattctattgcatattaccacagtcatccttaggaggaaattgttgttttcttaagacttaaaaaataagattagcatattaattcctctgtgtagtaataggaacaaatattttttgagcccatgctgtttgccaggcattgcattatctcatttaagcctcataacaactctacaaagttgatgatactggagttaatgggataataactatcccaattttccgcacactgaggcttgtagagattaaaggcattcccaggtcaggtagtgaataagaagcacagccagagctgatccctgggctgcacaactccagagcccaggtttctcacttatgttctttccattaaaccccattctagccaaagaaaggcctagttattcagaacttgcttattctgtttatttcagaagattttatctcgctttatggaatgttcacttgtggtatccttcttttgacatct

SEQ ID NO: 11539 - DNA, 1097 bp, Homo sapiens
agctgggactacaggcgcccgccaccacgcccggctaattttttgtattttttagtagagacagggtttcaccgtgttagccaggatggtctcgatctcctgacctcgtgatccgcctgcctcagcctctcaaagtgctgggattacaggcatgagccactgtgcccagccagtgattgatttttctaatgttaaaccaacctttctgggataaaccccacttgatcatgatgctttattgtttttatatattattgaatttgatttgctaatatttcctaaaggatattagtatctgtgtttatgaggaatattgttcttacacttttcttctcttgtgatgtctttgtcaggctttgttataaggattatactagcctcataaaataggctggaaaatgttccttcctctgtttactgaaagattttgtttaatattggtattatttcttgcttgtttgctaaaatttgtcttttctttagctctatttctgctaattttttttaaactttgttattggatacaagcatatgtattatgatgagttaactcatcttgtcatgataaattgtccctcttcatctctgctaagactccttgacttgaagtctatttgaatgattcatttttaatctagctaatgtttatttggtcatttctttctgtcattttcggcctttgtatttaaagtgtgactttgtggacagcatataatgggtcttgcttttttaactagcttgacaatcttttagttggaatgcttagtccatttacatttaatgtaagtattgatgtgattagatttaggtctgccattttaccatttgttttctgtttgtcttacatattttcttgttcctctgttcccccttcactggcttctttcaggttaatggaatactttttagtattccattttaatacctttgttggccttttagctttactcttgtgtgtttgtgttggggggggagggtgtgtgtgagagattacgttatgcagttttaccttatcacattctatttagagttaatattatacttcatgtaaaatcctggaatattacaaaagtatagttctgttaccccagcctttg

SEQ ID NO: 11540 - DNA, 1056 bp, Homo sapiens
gaaccctctctcaactagcaatcagtggctgtgggtctccgatgacactgtccgcaaggccagcctgcaggaggtcctgtcctccagcgcctacctgctgttctacgagcgcgtcctttccaggatgcagcaccagagccaggagtgcaagtctgaagaatgactgtgccctcctgcaaggctagagctgatggcactgtctgcactgtccaggaaaaaagtaaaactgtactgttgcgtgtgcaagcggccccactagagccttccagccttctggtgtgttctaagagcaggctccacctgggagccagccccagttcacaccaaaccaggctccctgaacagtcctgttcatgtgtgtaggtggttctgttgtgttaagaaagcattcattatgtccggagtgtctttttactcatctgatacaggtaattaaaagaactcagattcttgaagccaccgttttcatattgtaatgttaggtgttctcagaggggaggtacctttgtctaatcaacgtttccacttagatcttttatttttaataagcaggcccataaaaattgttgacaagaattaatgaaattattaaaggcaacaatttagaagaaaaagtgcctttcactttcgattgcttttgtagcacgtccattgtgaaatattccttccaggctactcaaaggatagcaagagaacaggtaaatgatgcctaaagaacaccttcctttttctatgccttttctaatctttcaattctttctatggagtaaaggctcatctgccaaatctgccccctggggaaactctttcactactttgtcagttataagtgaagagcttacttgttgcttttatcttttgtatattggactgagatgtaattacactgtattataaaactctgtgaatagccagaactgagctggatctttgcaacacctgattcctctgctctgtggaaaactttttcttacacaaggatccactgtggacggttactttcatctgtttatttattgcccatgcagagctcttaaggtttacaggtgggagctt

SEQ ID NO: 11541 - DNA, 1135 bp, Homo sapiens
ctttatttaattaaaatgtctgctgacatcaagaacaactcatgtgccttacaaaaatgcagatggttaacatgcagagaggaaattcgatctttgagaaatgtctgtgttctagcagattgggggctgtttctcctgcaggtgtatgtaattgtatttcaatcatttgttcattcttccgttcatttgcctaagtttattataatgaatcattctataaacaactgttggatgatttacttttttcctgaacagtcttatccttttataggccctactccccacagcagccaaagtgaccttttaaaagcataacttcttctgctgtattttctgaaggttgttaaaaacaaaaacctcagccagagcgctggctcacccctgtaatcccagcactttgggaggctaaggtgggaggattgcttgagcccttgagtttgagagcagcctgggtaacataataagaccctgtctctacaaaaaataaaaataaaaaaattaactgggtatagtggcacgcacctgtagtctcagctactcaggaagctgaggtgggaggatcgcttcagcccagggggtctaggctgcagtgagctgtgattacaccgctgcattccagcctgggaaacagactgagactctgtctcaaataaaacaacataaacctaaaagcataactcaggtccgagcacagtggctcacgcctgtaatcccagcactttgggaggccaagatgggcgaatcacttgaggccaggagttttgagatcagcctgcccaatgtggtggaaccccatctctactaaaaatacctcccaaaaatttgccgggcatggtggcaggtgcctgtagtcccagctcttcaggaggctgaggcaggagaattgcttgaatccaggaggcggaggttgcagtaggctgagatcactccactgcactgcggcctgggcgacagagtgagactgtctcaaaaaaaaaaaaaaaaaagcaaaacaaaaaccaacataagtcaggtcttcaggtctttttgtgcttctccttaaaatgcatcagaggctgtgtgctgttcccaatattagcaacctcagcaccatcccctaagccttcctgccccaagctcttcacagacatggcct

SEQ ID NO: 11542 - DNA, 1050 bp, Homo sapiens
gcgcggtggctcatgcctgtaatcccagcactttgggaggccaagacagccggatcatgaggtcaggagatcgagaccatcctggctaacacggtgaaaccccgtctctactaaaaatacaaaaaaattagccgagcgtgggtggcaggcgcctgtagtcccagctactcgggaggctgaggcaggagaatggcgtgaacccgggaggtggagcttgcagtgagccgagaatcgtgccaccgcactccagcctggccgactgagcgagactctgtttcaaaaaaaaaaatgtatttttaaattaactaattaattaatttttatttatttattttgagacaagctgtcacccaggctggagtgcagcagtgcaatcatagctcacaacagccttgacctcctgggctcaagcgatcctatcacctcagcctcctatgtagctaggaccacagtcatgcgctaccactcccggctaatttttttgatttttttgtaaagacaaggtctcaccttgttgcccaggctgctcttgaacttctgagctcaaatgatactcacgcctcagcctcccaaagtgctgggattattggtgtgagccaccatgcctggccttaatttttttgttttgttttgtagatatggggtcttggctatattgcccaggcttgaactcctgggctccagtgatcctcccacctcagtgtcctttctaaaatcctttctctctctctcttttttttttttttttttttgagacggagtcttgctctgtcgcccaggctggagtgcagtggtgcgatctcggctcactgcaacctcctcttcccggattcaagctattctcatgcctcagcctcctgagtagctgggactaccggcgcgtgccaccatgcccagctagtttttgtatttttagtagagacagggtttcaccattttggccaggctggtctcgatctcttgacctcgtgatctgcctgcctcggcctcccaaagtgctgggattacaggcatgagccaccatgcccagccaatcctttctctttttaa

SEQ ID NO: 11543 - DNA, 1045 bp, Homo sapiens
cagtctatcattgatgggcatttgggttgattccatgtctttgatgttgtgaatagtgccgcagtgaacacacgtgtacatgtatctttataatagaatgatttatatttctttgggattgctgggtcaaatggtatttctgcctctagatctttgaggaatcgccacactgttttccacaatggttgaactaatttacactcccaccaacagtgtaaaagccttcctttttctccactgccttgccagcatctgttatttttttactttttaataatcgccattctgactggtgtgagatgatatctcattgtggtttggatttgcatttctgtaatgatcggtggtgttgagctttttttcatatgattgttggctgcatgtatgtcttctttttgcgaagtgtctgtttattttcctttgcccactttttaatgggattgttttttcttgtaagtttgtttaaattccttgtagactggatattagacctttgtcaggtggataggttgtagaacttttctcccattctgtaggttgcctgttcactctggtgatagtttcttttgctgtgcagaagctctttagtttaattagatcccatttgtcaatttttgcttttgttacaattgcttttggcattttcatcatgaaatctttgtggggcaggtattttatttcagtaggggagtgtggtatctctgccatccactgcatttagaataaaaccccaattcctcgtgggagcccacggagcctgtatgatctgagcctgctccatcttcgacatcctctcttgctagtctccattctgccctcactcgggcttcaaccacaatggcctctcatgcccctagcctgcctcatgtatcccttcagcctgaaatgcccttcctgcctactttgtttacagctggctcctcatccttcaagctctgctcaggtgtcacctccttaaagaagtcttcccggccaggcgcggtggctcacacctgtaatcccagcactttgggaggccgaggcaggcagatcgcctgaggtcagg

SEQ ID NO: 11544 - DNA, 1043 bp, Homo sapiens
ttgaagaggccctcacgcagtccagcagataacacaaatgccccacatccccacaggtctccggggatttaggatgggcaggcagacagaattccagaagttgattctgggagaatcagttcagttttcccagaagtgcctcatgggcaaagcagtttctgccaagctataaaacggctcacgctggcccctcctacagaggaaaaccagtgtctcatcattgtgcaggtgctgccccacaaaacaggtgtgtttgtgcctttggataacctgtcaccaaacctacagttccttaccatgtgcctgcccttttgtgcagctgcatacaggccccagagccaagcagaagaaatgtaacccttgcccaggagtggatgtgaccacgaccatgcttctcttaaatgtaaagcaagcagagcatccaggggtttcctgtgtcctccgcccctccccgctcgcaggagcgggaaagcttccctccctcctttcacccacctgaatttgcagcgggcagacctgagccggcctaaattgggatgcacagatacttctgtgtctgtccccttattcttaaaacaggactaaccacagccccgacacacagcatccgtagagtgattggatgaggttgcattcagggaatgctcgtcacagtgtggaaacacaaaaatgcttcctgcattgatgctgctatggtttttataaataaaacatgttagaataggaatagatcttgttaatactctttttaaaactttttttgatgcccgacacacataaactgtctttggatggtctcaggaatctcagaaccatttataacagacccaaaccctcaaattgcccctgagttttggaggacagcttgatgatgtaagtgacaagcccctgtatcccctagagaagggagaacattcttggctactgttgagttaaagtgaatggtttcttgggacactcctgtgcaagtttatcacttagatttccaggctggtcagatgcctctctccaggcacgagctagcacatttgcaggaataacgc

SEQ ID NO: 11545 - DNA, 1045 bp, Homo sapiens
tgctattgctaacttcatgggtgcattcaacaactacttgtcaactgcctgctttgggtcagacagatcctaacattgttttttcatcattgcaaccccatccactgccatttgcataattctagtgtagaggttgtgacctggtactttgggtgtgatcaggcctgtgtgtgaatcccagctccacttctgctggacgtgtggcctcgctagagtgtcttaagaatgctcagattagacgggcgcagtggctcacctgtagtattagcactttgggaggccaaggcaggtggattgcttgagtccaggagttcgagaccaggctgggcaatgtggtgaaactctgtctctacaaaaaatacaaaagttagccagacatgacggtacatatcggtagtcccagctactcgagaggctgaggcaggaggatcacttgagcccaggaggtcaagtttgtagcctgggcgacagaatgagaccttgtctcacacacacacaaaaaatgcttggagtctcatgggtgacacgcaagcacaatgtctggtgtgctatgagcttagggaaccaaagagcccaggctccccctggacacagtccacctggcctggtgaatatgggctgttagccatctggctgcccttgcagaatgagaggatcgggtggcccctagctgccgtggctgtgcagcagccgtcagtgaagggacaggagaggggcgtgcggtctccatgtcaccacagtccctccccgcgccccgcactctgtagtcattgcctggtgtctcccggtcccccgtgggcattcgagtctgtagcccctgtgctgagtggaagctgccactaaagcaagccttttacaaatgattcttttcacttgatcctcacacccacctccctgtgaagtaggtgtcttatccctattttacagatgtaaaaactgaggcctgaagagagacttcccccaaggttatccagctagtgagtggccgagccaggggtccagccgacggactggtctgtccctttattcaacagatctgtcatga

SEQ ID NO: 11546 - DNA, 1077 bp, Homo sapiens
ggccactagggggcagctggcggccttccctgctgttgtcttcctgcagggtgagaggagcaggagccgagctccacccccacgccagccttgggcccggcctgggatcactgctgggaacgtgagagtgaagggaggacgcctaccccagcttaacttgtagaaatggccccagatcactgatggctgttccctgccccttcccttcaaaacacaacgcataaagcagtaatactaattaatactgaacgctcactgtggactaggcgtgtttacgcatcgccccttctcatctctgccccgacctcagtgtcattgctagtctcatccccgctttacagaccaggaaaccaaaggtcagagagatcgagtaactggtgcaagtccacacagctcatcagcatctgaggccggattcaaatggactccagagcctgctcttagcccctacgtgtgtctgctgggtgcggctctgtgtgcaggctcactgcgattttttagctttctgtgctcaggctcgtttttctggattcggatgtatttgaccggggtggggctcggacctgcatgttttcctccccacgcgattttaatgaacaaccaggccagaggctgctgtgccctcagtgatggcgctggctgacagccagcctccagcctttaggaggtgggcctgggagcctccccaggcttccatagatgtccgcggcagctgtgagatgggtgcaggggacagaggctgagacccccagagcccgtctgctccttgaggccctctctctctcattccctggggacaggatgtcactcctggggcaggggccagctcaacactcttgctccagtgaagcagctgccggtgcgctttggccagagcaacctttcaacccagccacccctgcggccaccatatgggcctggtgtcacactcctggctaccttgtagacagttggcacttgcggctgtcaccccttctcattgcctattgcagtggttctcgctctcagagctgcacctcggaaccacctaaggacccacgaattcctgactccaccccagatattctgagttaatct

SEQ ID NO: 11547 - DNA, 1065 bp, Homo sapiens
caggcatgtgccaccacgcgcggctaattttgtatttttagtagagacggggtttctccatgttggtcaggctggtctcgaactcccgacctctagtgatccacccgcctcggcctctcaaagtgttgggattacaggcatgagccactgcacccggcccatagttttcttttataatcctttttatttctgtagagttgctaatattccatctttaattcctgattttagtaagttaagtcttctctcttttttccctggtctatctaactaaatgttcgtcaatgttgttgacattttccaagaaccaacttttggttttgttgattttctctgttgttttctcttctctattttactcattccccctctactctttatgcacttattgttttaaaatcacactgtcatcataatacaattacagcattttttttcgactgcctcttcagatgagagagatgcaggaaggtctgaagagttacaattatccaagaaatgtgtgctgctctgtggcttatccataggtgctcctctgtggtccgaagtagaaaaaaagttaacatcgtaatgtatttggcttttattttgtacatcatctctaactgttgcccaggagtttgagtgttttttgtttgttgttttgttttgttttgtttttgagacggagtctcgctctgtcacccaggctggaatgcaatggcacaatctcagctcactgcaacctccgcctcccaggttcaagcgattctcctgcctcagcttcccgagtagctgggacaatataggcactcaccacctcgcctggctaatttttgtatttttagtagagatagggtttcaccattttggtcaagttggtctcgaactcctgacctcaggtgatccacccacctcggcctcccgaagtgctgggattacaggcatgagccaccgcgcctggctgagtttgagtgttaatccttactctgcgcttttagttttgctctggggtgtgaattgtagtaagtagtttcccctttcccatgataaacatttttacacacctcccctgtggcaggtagt

SEQ ID NO: 11548 - DNA, 1050 bp, Homo sapiens
ataaataaaggaattcatttggtaagtactatttattatctgttatgtattaggcactgtgccagacacagaggatacaacgtagagttgcttagagcaagatacttgcaggtcctgccctcatcaagcttaaggaatagtggggaaaacaaatactgaactgaagtttaaaatgatggcaaacattacacataactgaataggccctgcaaataagtaacaggagtttaacctggttagggatgaagacaggaagatgggggttgggaagttttataataaaactaaattattaagttattatataatatataattattatataaagttttctaataaaacgaaattattatatacgtgtgacatgttgggaagtagagaagaaaaaatgtgaatatattgagtttatacagatgtatgatatttagctactacttttctactcattagattacatattgtgttttttttacagttcaaacgatatgtcaataaacttcgaagcaagagtacagttttcaaaaagaagcatcagataatagctgaacttaaagctgaattcggtcttttgcagaggactgaagaacttcttaagcaacgtcatgaaaatattcaacaacaactggtaatacagtattatcttgggctactataaatacaaatgccaggaggtttatgggttacagctttatactgaagtcattgtttttactggaaaaatgataaaagtattacttttctctgattaattacagacatgacatataagttgattcatttatttttaatgtagcagtaagcactggcttttgtgtgtgtgctgacttcggggttattaatagaaaaacttgaattccaagtaggttttttcttttggttagttagttaatatgagtaaaattatcataccaagagagtgactgtaaaatatttttttatcatggcctgctgggcagaaatttctaagcagccacttccaagaagctttggaaagaaatatccagggaagtgctgtgtggaagtctgcctccaggcttattccttatgtgt

SEQ ID NO: 11549 - DNA, 1050 bp, Homo sapiens
tatatttatttatttacttatttacatattgcttatttattcccactagtagtaagctctgtgagggaagggattttttttttcctgttctattcactgccgtatacctggtgcctagaactgtgattggcacatttacatatataataaatattggatgagtgaacatatcatttgagaattcattctttcatcaaatgtttattgaatgtaccctatgttttaggttctgtgctgagtacataacattattataaagtctacgattagaaatacttcctatgtacctgaagataccataggtttataatatacaaaggcatgtaattgaatgaaataataattgaagtcaatgaagattgtcctttaggattctaaactaattaattctatttacaattttttgttatgtatgaaatttgtacatttcttatgggagccagcaagattttgacatgttttgtggcctttttattttttacttatagcaaactatggaggagaaaaagggtatatctggatatagttacacccaagaagagctagaaagagtatctgcactgaagagtgaagttgatgaaatgaaaggacgaacattggatgatatgtctgaaatggtgatgatacttttatttaaattttcttttattgtgtagctagaaggcaggtgttttgtgttagttttattttcagtgaaacattcacctgttaatttctgcacattacattctttcatcttttttttttttttctttttgaggcagagtctcactctattgcccaggctagagtgcagtggcatgaatttggctcactgtaacatccacctctggggttcaagtgattctcatgcctcagcctcccaagtagctgggactacaggtgtgtgccaccatgcccggctaatttttgtatttttagtagagacagggtttcaccatgttgggcaggctggtctctacctcccgacctcaagtgatccacctgcctcagcctcccaaagtgctgggattacaggcgtgagccactacacccggtctcatctgtctt

SEQ ID NO: 11550 - DNA, 1060 bp, Homo sapiens
tgctatttggactatactgtagtattttgaatatcactccatctatatttatgtatattttatatgcctacataaataatacatcatgattatagttgtatagggcaattttttaatatatttattcaatgttaaattataaagattttcccgtaatggtttacagtcttgagaactgacgttttgaatgattaaatagtatagtattccatcttgctgaggaatcaggattttctaaagcacttctctgttgtttgggactgaagtaatttgcagttttttgctcttacatttaacactgaaattaatatctttatgcatgtagtatttttctttttttgaattcttttttaggtgttatattttttgttcaaataacaggtgaaaaaactgtattcattggtatctgaaaagaagtcagctcttgcctcagttataaaagagctacgacagttgcgtcaaaaatatcaagtaagtttttgattttatcaagtaatttgattttatgatacttttagtattctatcttattcacatgtgctagttagaaccctggatattttacttgggtaatatagaaaacaaattatcattattacgttattgatacaattcttcaaaagagaattaaaacatgacatacaggccaggtgtggtggcttatgcctgtaatcccagcactttgggaggttgagacaggaggatgatcacttgagcccaggaattcgagaccagcctgtctaacaacaagaccttgtctctacaaaaaataaaaaaattagctgagcttggtggcatgcacctgtagccccagattctcgggatgctgaggtgggaggattgcttgaacccagaaggtcaggattgcagtgagccatgatcatgccactgtactccagcttgggtgacagagtgagaccctgtctcccacccctccccccaaaaatgacttgcaagggtttttgtttaatttatgctgcttatttagccataaataattggaggcagaggagatggagaaaaagcagtttaagctgaaatgcacaaattcagccagagg

SEQ ID NO: 11551 - DNA, 1053 bp, Homo sapiens
agagttaagttacaagactgacaagggcatgcattgtttcagagccatgtttgggacctttgtttttcacttattcaatcattttccctttttatactaggaactgacccaggagtgtgatgaaaagaaatcccagtatgatagctgtgcagcaggcctcgaaagcaatcggtccaaattagaacaggtaagaagagagtttttattttaacaatttagcaaaaactacctgtgtgtacacctgtagtcccagctactctggaggctgaagcaggaggattgcttgagcctaggagtttgaggctacagtgagctatgatcacaccactgcattctagcctgggccacagagcaagactctctctctaaaaaaaatgttttaaatactgcccgtgtacgcacattttcactacatcaatgtcaaaagattcccaaatctttatcatcatctcctaagctccagagatctttatttctttaatttgtacacacttaatttcccatctgtaccactcccagcaaagtacaaggctcattatctgctgcctggcctcccacagtaaactcttacctattctcttgcttctactcttgctctcctaaggtttattcttcatagggaagcctaagaaacctgtttaaaatttttgccacccttcattggcttcctgttgcacttaaaataaaatctaaccaccaaactatggtctacaaggccccacctgccttatgaacttcatgtccatgtgctctactcctcatccatggagcttcagccactctgaccttcttcctgagctttaaacaggccaagcttgttttcactttgggattttgcatgtactcttcccttctgcgtgatatactctgctcctaactcttcgccctcccttctccttttcatcactaggtctcagccttagtgtcactgcctttcagagatctctgatcacctgatgttacccactcttcttcccaacctggcccacccagtccctctatcacattctactgatggatttccttcatagcgcttatccccatctcaaatat

SEQ ID NO: 11552 - DNA, 1038 bp, Homo sapiens
ttgaactcgggaggtagaggttgcagtgagctgagatcctgccattgcactccagcctggggaacaagagcgaaactctgtctcaaaataataataataataataataagtcaggtaggaaaaatgtgcagagtccagcttatggagagctttgtagctaggataaggaaattggattttatttttatttatttatttatttatttattttttgagaagaagtctcactctgtcacccaggctggagtgcagtggtgtgatctcagctcattgcaacctccgcctcccaggttcaagtgattctcctgcctcagcctcccgcatagctgggattacaggcatgcaccaccacgccagctaatttttgtatttttagtagagacagagtttcaccatgttggccaggctggtcttgaactcctgacctcacgtgagccaactgcctgggcctcccaaagtgctactgagaagaccttgaaagctattaagcaaggaaggtgacatgaactgatctgaattttaaaagatcactaactttgagtagaaaatggatggtgtaggggtcgtagaatggaagtaggcaggtcagttgaggaggtcattgtagagagatgttagatgatgatggcttagactaggacaattgaagtagaaatagagagaagtggacagctacatggtgttttttgtggaaatagagtcaataagactttctgcagggttggggggagtcacagaaagggctatcagcaatgactttcagattttttcatgaattgagttagaaaagattaagggagaagcagacttaggtagggcaggtcaaatgaagagttctgctttgtccatgttaagtacccgttagacatccaagaggaattgtcaggtaggagctacatttatgagtctggcattccagagagaggtcagggctggagataaagataaataaagattttggaatcaataacgtataggtctcaccacccctttccactcacacctccatccctctgtgctctcttgcgtttcccccaa

SEQ ID NO: 11553 - DNA, 1774 bp, Homo sapiens
cgagcgcgccgcgcaccgccccgccggctcgcctccctcgccgcgttccgccctcagtggtctgccgggcgccccctcctccggcccgggcggggcctctgatcgcctcaagagagcggggagggggctcgggggccgcggcctgccctcccggcgggcggctgagggcgagggaggccctcccttctggcgaggggagggagggtgggtcaggagcccccaacccgccctgcggagctcggggccgcgcgaggggcggttgtctgggggagggggcgcggggtgattcagcgcccggcgaggcggaagcggccgcaagaggaggaggggagagcccgtccgcgcctgggctcccggggtggcacgagcccgcggccggagtgcgaggcggaggcgaggaggccgcggggacgggaggcgaggccggccgggcccccgaagccatggagaacgcgcacaccaagacggtggaggaggtgctgggccacttcggcgtcaacgagagtacggggctgagcctggaacaggtcaagaagcttaaggagagatggggctccaacggtaggtgcagggcgctccgctgcaggggcccggcgcggccgggagagccagggaagatggctgaccgggctccacctcgtgggcttcggctccgcgcccgccgacagctgcgggcggagggtcgggccagcgcgccggccccgcgggagagaaaggggctgcggtcctcgcctcgccttccctggacctcttcgcttctcgggccctcgaccttttcggcgcgcaaggctcggaggcttctctccagcagcagccggccccggtggagggagggacgtggcttctgcagctaggttgagcccggcaagacgttttctcgtcccctgccgatttatgaggagtcgaggtcgttggaaggcctctgaccgttcttgtcctacccaaagttacacatctggcagaagtgatgacatcgctgaaaccactcctaggttcaggagcccgaagtgatttcacgcttagggctagacctcaggccattgattacaaagagtgcatgcttccttgagatatcttcgtggtatgccctctgctaaaaaaatcggatattcttatagctaggtctgtgttttaaagatattgatgcttagaattgtagcagttctttttagaaaaacgaagtgctaaaatgtctctctctttttttttttaacctccctcttgacacattgcttgacgaatttctacattctacagagttaccggctgaagaaggtaatcttaacatgctgtttctgttttttttcctctgttggtgtgctgatggtaagatgacagttaaaacacatgtgtttgtttcttacaggaaaaaccttgctggaacttgtgattgagcagtttgaagacttgctagttaggattttattactggcagcatgtatatcttttgtaagtataaaaaaatttattttctttccccccaaaagctgaaagtattccatagataaatcagaaaacaaatgatgtccattgggtgaaaacatatttggagttgcaagctgtgtctctatgtttaaaaacaatctgggcattttaaaattacaaaacaaaacacttgaagccattggtattcagaaaatagatgcctgacatttacagtgtggttaggagttgtcccagagtgtggcatggtcttagaaattcttgtggtttatcagcttttaatatcaaaaagttcttttctgggaagcctttaatgttttgggttcttcca

SEQ ID NO: 11554 - DNA, 1035 bp, Homo sapiens
gcttacccacttgagtgctatatggttgctaagaaactagtgaaatgcaaagaactacagcagaaaaagggtgttggggtggcaagtatatttctaggtttttaacttttttttaaatgttcggtattaattttttgttgcattttttttcttgggcagtagattgcttgctagttttcctaaaaatggtcaggaataggacacagatgttcctaattctaatagcatgagatgccttttattcttgaattacgttattcttacaaaaaccacgataagtgaaattcacccagtgcagtacttctttctagttaaaacaaaattgacaaaacttcacggtttcagttcttgtacatatatgtatgcaggtcccagggatcagcctcagtctttgtgagaaccataccatagagggctattttgagaacgaaataaacaaagcagtgggcatttatttagttcagatgaggaaaagattaaatttatacccatcttttaagtagatagtggcagcagtaaataaatttgtggaataatttttacataaatcctgctatgatactttattatgccatattagccaagtattgtgtagccattaataattcagtccccaagaaccttttctgtggttttcattgattaaaatggggacttacatagcaaaccattcagcattctgagtcagtcacaatgtacctctgataaaatgtttcttcttgattgattaaaaaattttcccccagaaaatggctgctgttttaccaattaagggaaatgagtagacccgattaactatagtttatcaatacattgtcatggggcaaaataaatgatacatttggagctagtgtaagatttgtatttaactgggtacataatagcgttggcagttaaataatggggtccgataaggtcattgggaacttcttaaaaattaatcagctgactacaagccagaagcaaaatacatttttactgaattctctgtgttacaagttgaagcagtgtgggaaaccatgccactggtgttac

SEQ ID NO: 11555 - DNA, 1607 bp, Homo sapiens
actgtggtacttctcaacctttaggttacatttgaccatttgcatgtgtgtgtctcttttcttcctactagacccccttgagttagtgcttttttttttttttttttttaaatgtagatggagtctcactcttgttgcccgggctggagcgcagtggtgcaatctcggctcactgcaacctccacctcctgggttcaagtgattctcctgcctcagcctcctgagtagctgggattacagatgtccaccaccacgcccggctaatttttgtatttttagtagagatggggtttacctttgttggccaggctggtctcgaactcctgacctcaggttatcacctgcctcagcctcccaaagtgctgggattacaggcatgaaccactgcgcctggcctaagttagtgcttttgatgtcacaaaaacttgggtgagtttgtttcagtagaattttctgaaaatacatgagatctttttactgtagtttctcagaagagaatactcaaagcatttgatactggatttgtagtgattttaattttcttctgtatcttttaatttttgattttaaaaatgggataagaagggcaaattactgattggtttaactagtttattcagagcttttcttaaaataatgacttgaaaggtggatttaatagagtactttttaaaaagattgttttctcatgcctgaaagcattgaatgtttttacatagctttatatctggatcagaagggaacgagttctaattcatgcttttttttccgttttattaatgactgaaagtcctcccccagaaattatcgtaacgtttattggtaattctctgtatcattctcgaaatgtttaatttccatttcctctttatttaaaaaaaaaaaaaaacttgatgtaaatttcttcatttattgagcaattgtttgagggcccaaaggcacagtgcaagtttctgagaatactaggagcaaaatgtgcttatgatctttttaagcacttttttctttcgttttctttttatgatactaagagctcttcctattatcacagtgtatagatatctgagtcacaatatcatgactgtctcccagtttacagcagaacgtgctttttaccttggattaaaatttgctttatttggccgggtgcagtgagtggctcatgcctgtaatcccagcactttgagaggccgaggtgggtggatcatttgaggtcaggagttcgagaccagcctggccaacatggtgaaaccccacctgtactaaaaatacaaaaattagccaggcgtggtggtgggtccctgtaatcccagctactcaggaggctgaggcaggagaatcgcttgaacccgggaggcggatgttgcagtgagccgagattgcgccactgcactccagcctgagtgacaaagtgagactccgtctcaaaaaaaaattttttttttgctttagtatacttatcagaagtataatgcagtacagagtgttgtacagtatttcagtgctgtacagagattaatcttgtggataataattgggagatactctatccctactctatttttaacagtttaatgtagttgagtgttcattagcaagtggttact

SEQ ID NO: 11556 - DNA, 1049 bp, Homo sapiens
cttatgaacaagacatagccagttgtttatataattgcattttctaccgtttatttctagagaaagaaaatagattttgtctatcataatccctttagtgctagccacttttttttttttttttttttgagttttcgctcttgctgcccaggctggagtgcaatggcatgcagtacactcacggctcactgcaacctttgcctccccaggttcaagtgattctcttgcctcagcctcctgagtagctgggattacaggcacctaccaccatgtccagctaattttttgtatttttagtagagatggggtttcgccatgttgggcaggttggtctggaactcttgacctcaggtgatcgcctgccttggcctcccaaagtgctgggattacaggcctgagccaccatgctcggccagtgctagccactttttaaaaaagtgacattaagcctaaaaagacacattctaacgtgccatttctcttctaggttttggcttggtttgaagaaggtgaagaaacaattacagcctttgtagaaccttttgtaattttactcatattagtagccaatgcaattgtgggtgtatggcaggtaagcaaaaattcctgtactgcaaaatttcaataagttatgtaagtgattagggctgtattaatctttctgttatctgtttttcctgatgtgttgagtaaaaatatgtttgcgggaagtttacatgtattttccctttattccataaattaattgttttctgacacagtctcactctgttgcccaggctggagtgcaatggtgttgtctcggctcactgcaacctcttcctcccaggttcaagtggttctcgtgcctcagcctcccaagtagctgggactacaggcacgcaccaccacgcccagctcatttttgtattttttggtaagagacagggtttcaccatgttggccaggctggtcttgagctcctgacctcaagtgatccgccctcctcagcctcccaaagtgctgggattacagacgtgagccaccatgcccggcctattaatttaatt

SEQ ID NO: 11557 - DNA, 1049 bp, Homo sapiens
gtctctttctgttgcccaggctggagtgcagtggcaggatctcgtctcactgcagcctccgcctctcgggttcaagcgattcttctgcctcagcctcctgagcccagactattaagctgtactgcctctcatgagacagaattgattttaaatggcagggggatttggctaaaggtgaaagctgtgttttacagtcttagggacagcagagtctgtaattgcttttcctcattgttttatccccttagcttaattgagggtacttaacgtttcgtttttaatacaaattaataaatgtccttgtgtctgttgccttagatgtgaattgtttagtacaaatgttactggtgggcttcctttctttttaaagattagacctctaacattttattccttgggttagaaataattgcagtgtcaggcaggtctttactactcttctgttttcttttatacaggaaagaaatgctgaaaatgccatcgaagcccttaaggaatatgagcctgaaatgggcaaagtgtatcgacaggacagaaagagtgtgcagcggattaaagctaaagacatagttcctggtgatattgtagaaattgctggtgagttgagtttgtcatttttcttttattctagatagtatttctgaatgtagtccttttctcaaggctcataattatatttaaaataattgttttcatgtatcaattaacacattttattgccattcatacaaatcctacattctctaaaattattttgaaatgttttagcacctcccttcctgtcattgataaggcttttggtttttgtttttaaacaaggtattttgaattctacttgtttaaatacattgtagaacacaagtgctagagaggtaaaacctaatgttgatttgacagttagttatagtgaacaatttgttagaatactggctaatgacgacacagtttttcctgttttgtttcttggcaccaaagttcatggtcaagggtaatttcttgactctgaaagctatgcttggccaggcttggtagctcacgcctgtaatccc

SEQ ID NO: 11558 - DNA, 1038 bp, Homo sapiens
aggcatgagccaccatgtacctggctaagttttgtattttttttgtagagatgggtcttgccatgttgctcaggcttgtctctcaaactcctgggctcaggcagtcctgcctcagcctcccaagtagctgggattacaggcatgcgccatcatgcccagctaattttgtatttttagtagatgtggggtttctccatgttggtcaggctgatctcgaactcccgacctcaggtggtccgcccgcctcagcctcccaaagtgctgggattacaggagtgagccaccacgcacggcctaaagcagctccttccgtcagtctgtccgtccgtctgtccttccttccttcctccccctttccctcccctcccctcccctcccctcccctccttctgtcctccctcttttccttctttctcgctctctcttttttttttttttttttttaacttggagacaggggcttgctctcttgtccaggctacagtggagtagtgtgatcactgcgacctcgaactccttggcttcaagggggtcctcctgcctcagcctcctgagtagctggtaatacaggcacatgacaccatgcccagcttttttttttttttttttttaaagacggaatcttgaactgtcgcccaggctggagtgcagtggcacgattgcggcccactgcaagcttcgcctcccaggtttacgccattctcctgcctcagcctccccagtagctgtgactgcaggtgcccaccaacactcccagctaattttttgtatttttagtagagacagggtttcactgtgttagccaggatgacctcgtgatcctcccgcctcagcctcccaaagtgctgggattacttacaggtgtgagccaccatgcccggcctttttttttttttttttttaaagtaaagatggggtcttgctttgttgtccaggctggtcttgaacttctgggctcaagcgatcctcctcctcctgccttggccttccaaagtgttgtaattacaggtgtgagccactgtacctggctcaaagcaa

SEQ ID NO: 11559 - DNA, 1054 bp, Homo sapiens
cacccagctgatttttgtagttgtagtagagatggggttttgccatattggccaggctggtctcaaactcctggcctcgtgacccactcacctcggcctcccaaagtgctgggattacaggcgtgagccaccgtgcctggcctattattattttagttaagcccagctgtgtgagacattgggctcttaagtgctgcttgctttcgtcttaaattgtgacctttttaactgagtaatgcagaacagacatctaggtttagaatgtatgtgggcattttattaaatactgttgtcatactactaggcagtgagcaccttaaggacagaactgtcatattgactgttgtaacgttatcgtaagttctctatgaatgaaatttgaaatcagaagtatatgataggctcagctaatgtaaacatagttgctgtgcagaacaaacagttgaagtgtatgtgtgtgttcaatacaattattattataatattatacagacagagtcttgttctgtcacccaggctctagtgcagtggtgtgatctcggctcactgcaacctgtgtacctcccagtttcaagtgattctcctgcttcagtctcccgagtagctgggattacaggcttgggccattatgcctggcttgcttgcttttttgtttgtttgtttgtttgtttgttttgagacgagtctcgctctgttgccaggctggagtgcagtggcatgatcttggctcactgcaacctccgactccctggttcaagcgattctcctgcctcagcctcccgagtagctgagattataggcacgtaccaccacgcccagctaatttttgtattttttagtagagacggggtttcaccgtgttggccaggatggtctcaagcccctgacctcgtgatccatcctcctcggcctcccaaagtgctgggattgattacaggcatgagccaccgcgcccagccacgcctggctaatatttttgtatttttagtagaggcagagtttggccatgttggcccggcaagtcttgaatttctggcctcaagcgatccacctg

SEQ ID NO: 11560 - DNA, 1047 bp, Homo sapiens
tgatgtctaagaaactgttgccaattgaaggtcacaaagactttatatattagccagtatatatgatccaggcgtcgtggctcatacctatatgatcccagcactttgggaggctgaggcaggaaaaaccacttttttttttctttttgagacggagtcttgctctgttgtccaggctggagtgcagcgagtggcatgatctcggctcagtgcaacctccgcctcctgggttcaagcgattctcccgcctcagtctcccgagtagctgggattacaggtgcacaccaccacactcagctaatttttgtatttttagtagaaacggggtttcaccgttttggccaggctggtcttgaactcctgacttcaaatgatccgcctgcctcagcctctcaaagtgctgcgattataggcaagagccaccatgcccagcctaggaaaaaaacacttttaaattagccaggcaaggtggtacaggcctgtagtctcactactcaggaggcagaggtacgaagatgacttgagcccaagagtggaggctgcagtgagctactatgatcctgccactgtcctccaccctaggcaacaaagcaagaccttgcctctttaaaaacagcaacaacagcaaaaactatggtgtgaggtaggagatccagctgctttcttttgcatgtggatatttagttgtctcagcaccatttgttgaaaagatttcttcactaatttgtcctgcaacctttgtgaaaaattaatttacaaatgcaagaatgtatttctagactctattcttactccattgatctctgtctttaggtcagtaccatactgtcttgatagctagctgtcgttttgtattttttgaaattgggaacttgggagtgtaactttgttcaagataattttgggcattctgggttccttacatttacatataaatttttaagagttgcttgtcaatttctgcagaaagcaagctggtattttcagtaagaattgtgttgtatctatagatgagtttgggaaatatggtcgtaatatcaagtcttt

SEQ ID NO: 11561 - DNA, 1050 bp, Homo sapiens
tcattgtggttttgatttgcatctctctactagtgatgttgagcattttttcctatgttgactacttgattgttgtcttttgagaagtgtcttttcataccctttgcccacttttcaacagtgattttgtgtgtgtgtttgtgtgtggatttaagttccttatagattctggatattagtcctttgttgagtgcatagtttgcaattattttctccaattctgtaggttgtcagtttactctgttgatagatttcttctgctgtgcagaaactctttcgtttaactaggtcccaattgtcaagttatttgttgcatttgcttttgaggcttagtcataaattctttgcttagggcagtgttgagaagagtatttcctaggttttcttctaggatatttacagtttgaggccttacatttaagtctttaatttgccttgagttaggaattcttttttcaatttcattttcagattgttctttgctagcgtgtagaaatagttttttacgtattgatcttgtagtttgccatcttgctgaactcattagttagttttaatagtttttatgggttccttaagattttctatatacaagatcatgcatttgcaaatgaaaatgtttttacttctttctagtctggatgccctttatttcttgcctaattgccctggttagaatctccaatacaacgttgaagtaccaagagcagacatccttgtcttactgatcgtaggggaaagcatccagtccttcacagtgaagtgtgacataggtgtgggtctcataggcgggtgccctttatcatgttgaggaagcctagttacagctgtaatatttaggttgtcagtatactctggtgacctttcatggtgtttgtaaacttatatgcaaatcagaaatgatagtttgctgggttactaggaccagcaggtcattgaattgggtaagatataattctaaggcatttgcaactattatatggaacattttggaaaagcataccgtgactgtataacctgggccagataaataggtatttattttattaa

SEQ ID NO: 11562 - DNA, 1070 bp, Homo sapiens
aaccccgtatctacaaaaaatacaaaaattagccaggcctgtaatcccagctactcaggaggctgggtgaaaagatcacttgtgcctaggtcaaggctacagtgagccatgcttgtgcctctgcactccagcctgggggacagagcaagactctgtctccaaaaaaaagttgtaatttgttcgttaccataggtaaatcttaaggttgaattgttgtctgttttgtggaaagcaaattacttattcgatgtcctttttccaggcaagaaaaatagactccagtgctgtaatttttttcactggaggagtgctaatgttgtatcaatctttacagtatccaaatacacaatgaacaaaagttagcccccataagagatgaaaattgtactacctggaatttgcacaattgtttgaaacattttcccgtttttgtgtgataaaagcacaatctagggtggagggttcatactaactggaagtaagtttgtcagaagaattaactttaaatacaatgctaacttggattaaatagtaaacataaagtctaaaggctctcaagatttatctgattatcaattttgaaaagcagctaatgtcatggagacagttatatgagtaacctggctctattttttttggtattgtttctttataaatagcttacttattaaaattctcattagcaacaacaagctggaggccaattaagccataaaatgttggagaaatggttgggttatatgtgtgaaattctcatagtgtgccctaaagacgtagttgccatttaaaaaaaatttttttttttttgaggcggagtctcgctctgttgcccaggctatagtgtagtgctgtgatctcagctcactgcaacctctgcctcctggattcaagctgttctcctgcctcagccacctgagtgtctgggattataggcgtgcgccaccatgcccagcttatttttgtatttttagtagagacggggtttcactgtgttggtcaggctggtctcgaactcctgatctcatgatccgcctgccttggcctcccaaagtgctgggattacaggcatt

SEQ ID NO: 11563 - DNA, 1284 bp, Homo sapiens
tgatttctttggtttttggaccctgtcacatgagtaggggttgtcaagatagcccatggggctagttgccgtttctattacagtgagaaaagtaggggccttgagttgttggagccagaagtggagaatgcttagagttgaactatatgagtttgaaaaattgggaacacagaggggttaagagcactgcttgaagatggtctgcaagccgggctcaaatagaaatctaggtgggtcagtacagagctgcctgacataagtaagtagcacatggagcattgcttgttgtcacagttgtatggctggttgcttgaacagtagccagtggaagacctagtagaatgtgtagagaatctgggtgccctagtcaaaaaccagcgtcggtatttaagttgggatgtggtattcatcttgtgaccagttctctacttctgtcctagggtacaaacattgctgctgggaaagctatgggagtggtggtagcaactggagttaacaccgaaattggcaagatccgggatgaaatggtggcaacagaacaggagagaacaccccttcagcaaaaactagatgaatttggggaacagctttccaaagtcatctcccttatttgcattgcagtctggatcataaatattgggcacttcaatgacccggttcatggagggtcctggatcagaggtgctatttactactttaaaattgcagtggccctggctgtagcagccattcctgaaggtctgcctgcagtcatcaccacctgcctggctcttggaactcgcagaatggcaaagaaaaatgccattgttcgaagcctcccgtctgtggaaacccttggttgtacttctgttatctgctcagacaagactggtacacttacaacaaaccagatgtcagtctgcagggtaagaggagtaatttagaatattccgtgtcgtggttctttgttcatcctaccaatatgccttcatgccatcaaaacttttgatttgtaatttcatacatttctgtgggctgtatgtatagcctgagcttaatttctaatatttgagaggatctaatcatttaattcctaaaactttcacaaaatacaggatatctgtatggctgatatacttgtattagatgtaagagaattagagaaattatattttcctttaattaaaaaaaaaaaaagcctgggcgcagtggctcacgcctgtaatcccagcactttgagaggccgaggcgggtggatcacctgaggtccgaagtttgagaccaacctgaccaaaatggtgaaac

SEQ ID NO: 11564 - DNA, 1032 bp, Homo sapiens
agtactgcccttagatttctgtggcctcacaagcccggggagcctagacctcagtagaaacactttgcaacggctgctggtgaagaatggccatccattgagtctctagcacctgggtctcctcaaaagactggtccccctgcctgtcacttggctcagcttaagaacttgaagtggaccaggcgcagtggctcacacctgtaatcccaacactttgggaagctgaggcgggagagtcacttgaggcctagagtttaggttgcagcatcactgcacttgagcctgggcaacagagtcagaccccatctcaaaaaaaaattaaggcctgaagtggctaaacttgaaggataactccctttatcttatcctggccaaagtggtagatgattgcttggatgagaagtgatatgcagataagatgttgcaatacacaaagtctgtgtgggtcagtcggtcacgtgggtgccaaggacaggtgggagagaagaagcaagctacagaagcagctcaagaatgggaactgcggaagctgattgtattggaggaaggagtgtgatgctctcagagcagccagggaggagcagaaggagcttagggacgtaagtcaggctctcaaagtctatgtctggttcctgcccccacaaaccaccacccaggaaacatcattcctgagctgtgtggcagcagcagcagctgctccttttatatggcagacagggtgattgcttgttgggcaagagccctcctacactatcttagagtgaataccctctatctgcagtccagggtctgcacagccacatggtcctctaataggtccaccagaccatttgcctgcaaacagcctcatcctcagtgcccactgtctcctagctgtggagcttggattcctatggaattgggttctgctgaacatacctctttttagcatcagacctacctgtctgtcatcaccatggggctgccagtcagtacttttgcagcctctttataggacattgttgtaacttagggttccctggtagaataagg

SEQ ID NO: 11565 - DNA, 1085 bp, Homo sapiens
gaaccctcccacaagtctaaaatcgtagaatttcttcagtcttttgatgagattacagctatggtgagcatgtttgaacatgtacaggtgactcaggctacacaagcacatagtagcctctaattttgaccactgaatttttttgtcatagctccctaatttggaatttgtcatgatttgggtcttttctctagaattcggtgaatcagtggttagcatgttgtgtgctacttgcagggaagatcctagagtcgtttaaaacccagaagggccttccagatcagtcccagaggaacaatctggtgatctagtctcttttttaaatgagacgtgtttttattgtaagttttctgaaaattgaggatgtaatcagtcagttgtttggatcaccctgcttttaagttctttaagagctggctattgatgaagcatttccagtattcttcccctcacctgattttcacccagatacattatgttaaatttactttcttctcttttaaaaaaaaatcttagttttgaaacatactataagtgtactctcctctcccccagaggtaactgaagttggaatttagcaaaaatattaaaaacatgggagtgctgtttttgtgtctgtagacagtattatttttgcatgcttttgaaggcatattttttggccgagtgcagtggctcatgcctgtaaccccaacacttgggaggccgaggcaggtgaatcacttggggtcaggagttcaagaccagcctggccaacatggtgaaaccccgtctgtactaaaaatacaaaaaattgctgggtgtggtggtgggcgcctgtaatcccagctactcgggagattgaggcaggagaatcgcttgaacccaggaggcgtgcagtgagccgagactgcgccactgcactacagcctgggcgacagagcgggactccatctcagaaaaataaaaatttgcatatttttgcaatctgcatctttctacttgaaatttatccatgtggatacaagtgcttcctcttgactgccacataggttgtgtttttgtttttagtaagataatacagataaatttgaagtcccctttgt

SEQ ID NO: 11566 - DNA, 1384 bp, Homo sapiens
ggtctcttaactgctgagctcagccagtctgcccaccttggcttcccaaagtgctgggattacaggcataagccaccgcacctggcctcagtcatctgaatttaagtaataaactaagtaaaattgagctttaattcaaaattgggtataagtattttacagattacctgaagttgttgtcatttatttttctggaggagggcgggttgatgatgctctttaaatagtggccagaagtcatttgggctctctttgtcttcttttcttgattggaaacagtattttcctgacagcagcccttggatttcccgaggctttgattcctgttcagctgctctgggtcaatctggtgacagatggcctgcctgccactgcactggggttcaaccctcctgatctggacatcatgaataaacctccccggaacccaaaggaaccattgatcagcgggtggctctttttccgttacttggctattggctgtgagtacaatttttttatattactgatttttaaacaaaatgtttgtgagctgaaattttgtaaattcatcccttaaaagcgtgttttttcttctatccccgtatagggtagcaaaagacagagatgccctcttacagttcgatgaactatacatccaatttaccagagtcctttcacagttagttccagttttagcatcctgcccttacttgggcttttctgaatgagcaattaaacatcagggttttcagattgagccctctgtgcaaagggataagaatgattcacgctaggttctgccttccaagagttcataggtgggatttaaatagataattgtcaccaagttataaaatttagtccctgtttccataagagaagggttgcgcagtggctggtcccttttatatataaatcatctctttagccctcatcttcctcaccccgggttcttccccatttcatagattgggaaagtgaggtgaaatcacttccctgggatcccataggaaggcattgtgttttcataatatattcacatgacttcaaattcaaaaagcacacaatggcatagaatggaaagggtttgggccagtcacttccctctggcgttgaggtgctcatgtaccctgtgcccttccggagagattccagcatgctgtgcacacctgcatgttgacccttgtcttgccttcttcctgcttgtcagatccttccatatccggacatgcgtagtgcctcatccttgcagccagcggccttcatgctccactgtaattcgtgggttagtgggtatatgcacttgttgtttttgatgctaccacatggggatatttgcctcgtctgaactctgtgtattctctgctgcaccttgttgcttctttgcaataaacttcctgaa

SEQ ID NO: 11567 - DNA, 2369 bp, Homo sapiens
tggtttcggtatctatcaaatcatcttaagactcagacaataaacagttacatctaagatgattctgaaggaccagggcttctccgagaaattggggtaaacctcttggctggctctgcattcaggctggtctgtgctaggcttggtatggggttggagcctggacttgggaaatatactgggctgataggaatttgattggattttcttgcagagtcatttcctacagtgtaaagaggacaacccggactttgaaggcgtggattgtgcaatctttgaatccccatacccgatgacaatggcgctctctgttctagtaactatagaaatgtgtaacgccctcaacaggttagtgcaccttcacggcaggctgaggcgagcatggtgactgccagggcaccggggaattgtgtgtagtcacggttgattgaggatcacaggacagttcttcccttcccaaaagaaaggagaacaggcaataccagttttaaaagcatgagctgtcgtcacctccaggaagtagtgggagtgcttagccctgtgtttcttaggagctcttccttaaaagaaaccgtgggggccaaaaataggaactttggtacccctgtatgccagcacccacagggaaggaacctcaccctttcacacagacaaatggtaccatccagttaagcccgtgacaaaaatggaaatttctaaatagcccaagtctccagggcaattgggaacagctttgaacccactaagatggggtctgctatgccaaaacatagatacagaattcacagtttgtcctgcattaggacattctcttcaactttgccactgtagaaagtggaggtaggtcagcggatggtgccacattaacagccgccttactgaagtgtagtccaacagggtcttactgccactgtgacacgtgccttgccttgggggtgcgtttccccacctctccttgctctgcagcttgtccgaaaaccagtccttgctgaggatgcccccctgggagaacatctggctcgtgggctccatctgcctgtccatgtcactccacttcctgatcctctatgtcgaacccttgccagtaagtggttgggtggggcttgggaccagccacctccttccaggggaggctggaggcgtgacacgtcttccctgtgtgtcagctcatcttccagatcacaccgctgaacgtgacccagtggctgatggtgctgaaaatctccttgcccgtgattctcatggatgagacgctcaagtttgtggcccgcaactacctggaacctggtaaagagtgtgtgcagcctgccaccaaatcctgctcgttctcggcatgcaccgatgggatttcctggccgtttgtgctgctcataatgcccctggtgatctgggtctatagcacagacactaactttagcgatatgttctggtcttgactgacagttttccataaagaagatgtttaacttaatcaattaatttttttattgtttaaagcaactgtctatttctgctgaattttcacatgaacatactggctggtgatggaggtttcatactctagattttgttttgctttttctgactccagtggggcaagattttccttttttatacacataattaaagtgtccattgacatgtacagagaactaacactattttatgcaaatatttttttgtagatgaaaaagcatgtacagtgttctgtttaatactcatccttgtataaaaaaaatagttgagccagcagacattgtcagcaaattaattggcagcagattttaggaaatgaatgtgtgtggttttttttctaaaactaaatagcatgtattgtgtcttttgcatgatgatccggatttaatttgatatcacagtctaatttttattcataagccaatttttctgcactgagcagagtcttgctacctcagtcagtattgttttggtttgctacttccctcacccactttggcctccgttcaccccaccccaccccacctctccccaccttacccccgccccgcttggcttcttctttaggattgtgatggttcgttctgtttacatcagttttaacgagaggtatgcctgtactcgcttgtgcagaaaacattgttccagattcaatcgactgggtttatgtcccttcacatagtttttaaggttatttatttaaatgtctaatgtattttattgtaacagacattgttttgccaacattgcctatttcagtggcacgtcatctagttttaaaaaaataaaacattttaaatggacagagaaaaataactgtcttgtctttaactcgtaagtggcttacctgggactaacagacatgtccaactttctctccagttcttagctca

SEQ ID NO: 11568 - DNA, 1027 bp, Homo sapiens
gccagggtgtgaggcctcgactatattcttcaaaatgtacttaggctctggttactgggatggccagtagatgtaatgcagatggttggagtttggggagggttaggaggcatcaagcaggacaaggtgctgctgagttcagagggcccacgttcaagggatggaggtggaacctggagaccgactcttaaaagcacagtccgtggttgggtgtggtggctcatgcctgtaagtaagtctcagccctttggaggccacagcagaaggattgcttgagcccaggtactcaaaccagcctgggcaacagagtgaggccctgtcaaaaaaaaatcagccttactgtgaagcctccaaggctgctcgcaggcagctgtggctctcgggaagggaggctgctttgcccagcagggaacatttggggcagggggtaaattttgccagtttgagcatcatgaggtgtaacaagaaatgggttgaatgggccaaatgcaaggagtgcatctctgggctgcaaactgacttgagtgctgcactattgctattccgtgcaaacaaaactcagcttttcctgactcagttccttgacttagtggcctttacaaaaaaagttgagtagtgtgtggcctgctgtcgcacagcccctagttagcttcatggtttctcagcttcagacccctccagcccacagaggagcccatggagggacccacttcccttggtccagacagctgggagtgggttaggcccactgctgttttgagcagggccacttgctccatttcactgaaggctttgctgggtgaaaacacttcagcatctcctcctcaggtcaacccataaagaccaggtccagcaccgtggtcttggcacatccctggcctcaggccctcacctaacagtgaggcagcagctgcccagccccgcaatgtgcctgctgtcaggcagctcttgcctgaaacttacttccacattctttcctgatgggcaggtggctgaaggcccagccatcagtgtcgcttgttgccac

SEQ ID NO: 11569 - DNA, 1022 bp, Homo sapiens
tcaaaatactgattacagatgtacaatttagcttaatcagaaagcctctccagagaagtttggtttctttgctgcaagaggaatgaggctctgtaaccttatctaagaacttggaagccgtcagccaagtcgccacatttctctgcaaaatgtcatagcttatataaatgtacagtattcaattgtaatgcatgccttcggttgtaagtagccagatccctctccagtgacattggaacatgctactttttaattggccctgtacagtttgcttatttataaattcattaaaaacactacaggtgttgaatggttaaaatgtaggcctccagttcattttcagttattttctgagtgtgcagacagctatttcgcactgtattaaatgtaacttatttaatgaaatcagaagcagtagacagatgttggtgcaatacaaatattgtgatgcatttatcttaataaaatgctaaatgtcaatttatcactgcgcatgtttgactttagactgtaaatagagatcagtttgtttctttctgtgctggtaacaatgagcgtcgcacagacatggtttcaggtaaataaatctattctatgataaattctcagtgtggtggtgactgttctgtgggagggggactgatgggcaccaagggcctccactccgcacccgggcctgcccctctacagggaagcaggggaggctcagtctgggcagggtggccatgtgactagaggggacaggaacctcttggactcgacttcacagtagacaggctgactggcagcaggtccgcccatgtgaagcccaccctggctccctaccctttaaggatgggggaagctgagtgtgtgttaccagtggggtcttaaacacacaaggcctcactcgtcagtgtggtgaagaaagccaagactccgcgctctccattgttagcagcctggaaagatctggagactagcaatggagagatgtttcttaggctgttcagatccaaaacttccacattccccgttgttga

SEQ ID NO: 11570 - DNA, 1029 bp, Homo sapiens
tacaatatattatttgcttcgtcctaagatgtataaaaaagtagtttctaaagtgctaacacatgcttctgaaaaaaaaaaaaaagaagcctagtaggctgggcgcagtggctcacgcctgtaattccagcactttggaaggctgaggtaggtggatcacgaggtcaggagattgagaccattctggccaacatgatgaaaccccgtctctactaaaaatacaaaaaattagctgggcatggtggcgcgtgtctgtaatcccagctacttgggagactgaggcaggagaatcacttgaaccagggagttggaggttgcagtgagcagagatcgcgccactgcactccagcctggcgacagagcaaggctccatctaaaaaaaaacccaaaaaaaacaaaaaacaaaacaacaaaaaaaagcctagtagttaattagagatcagtatttgcttagagttgtttttgtttgagggcatatagtccaagcagtatattcaaaagttcttgggttggttaactatttatttgtggtaaaatatacataatataaaatttactattttaatctttttttttttctttgagatggagtttcgctcttgttgcccaggctggagtgcaatggctcgatctcggctcactgcaaccgctgcctcctgagttcaagcgattctcctgcctcagcctcctgagtagctgggattacaggtgcacccccaccacgcctagctaattttttttttttttttttttttttttttgagatggagtctcactctgttgcccagtccggagtgcagtggcacgatcttggctcactgcaagctccacctcccgggttcacgccattctcctgcctcagcctcctgagtagctgggactacaggcgcctgccaccatgcttggctaatttttttatatttttctagagacggggtttcaccatgttagccaggatggtctcgatctcctgacctcgtgatccgcccgcctcggcctcccaaagtgctgggattaaaggtgtgagcc

SEQ ID NO: 11571 - DNA, 1047 bp, Homo sapiens
aatttggagaaagggaaaactttcccaggcttaaaaacccaaacctgatttccagtgttttacgtcgttctgaagccataccgtccaaacaaatatgtaaaaaagtagctatccctggcagggcgcagtggctcacgcctgtaatcccagcactttgggaggctgaggtgggtggatcacgaggtcaggagattgggaccattctggctaacacggtgaaaccccgtctctactaaaaatccaaaaaaattagccgggcatgttggcgggcacctgtggtcccagctactcgggaggctgaggcaggagaatggcgtgaacccgggaggcagagcttgcagtgagtggagattgcgctactgcactctagcctgggtgacagagcgagactcagtctcaaaaaaaaaaaaagtagctatcccttatttgcattcagccaggtgactgtgcaggcaaaagagaagagagaatatacattaaaataatgtaatgaaacctctgtgtttgaagattgaattacatttcaatttgagttgtagacagtggtcacattttttgtatcagtgaattagtatagcctagggtgaaaagtgcattttaatttcacagcttttgttgtggacatagtatttgtaacaaaaaattagataagaaatctgtacttttctgatatgtaaatctaccaggaattctcacagttcgcattgtatagaacaatgaaaaatgacatttccagctgattataaggtaaataaataatctgttctgaatgatctcttataattgaggtttcaaggcttcttttttttttttttttttatgagatggagtctcgctctgttgcccaggctggagtgcagtggtgtgatagtggctcactgcaaccaccgcctcctggcttcaagcaattctcctgtctcagcctcctgagtagctgggactacaggtgcacgccacgatgcctggcgtatttttagtagaggtggggtttcaccatattggtcaggctgctctcgaactcctgacctcaggtgatccgccctcctt

SEQ ID NO: 11572 - DNA, 1083 bp, Homo sapiens
ctcaaaggtcacgtagttcaatttctcacccagggccagtcttttctaccacatgcagtcactgcttgagcacttgtagtgatggggaactgactacctgaaaacagctcactcaattgtttaacacttccagttgttggaaagttctaaagcatatcaacagctaaccattattaagcacatattgtgtgctgggtattgtgttaagtgcttgtatgtgttttcccttaaatactctctgtaatcccttgaggccaggttagtatctccattttttagagcaggaaacagagatgtacagtttcttgttcaggctcactcaggtggtggtggaacaggaatggaccccatgcagttggcctgcagcctgtgctcccctatgctcctctccattcaggagcctccaagagtttgcagaatggccccctaggcagtggaaggcagcaggcttggctctcccatccccaaggggcctcactatgaagaagctaagtaatggacgataggaatgtattctgtattctgctgaaaagacaaatgtattctgctgaaaagacaatcttgcacacacgaagaacagtgtaaattaaaaccaaaccaaaggctgggtgtggcggctatgcctgtaatcccagcactttgggaggctgaggtgggcagattgcttgagattaggagtttgagcctgggcaacatagtgaaaccctgtctttataaaaaatacaaaaattagccagacatagtggtgcacatctgtagttccagctactcaggaggctgaggtaggaggattgcttgagccagggaggtggaggttgcagtgagctgaaattgcaccactgcactccatcctgggtgacagaacaagaccctgtctcaaagaaaaaaaaaaaagaaaacaaaaccaaaaacaactccccctcccccacaacaaaacctaaaaaccaaactgagataccattttcccctgtcagattggcaaaactcaaaaaaactgaagctgtggggaaacaggcagtccacctacatagctggtgagactgtaaattggtacaaccttggtgaagggcaatttagcaattt

SEQ ID NO: 11573 - DNA, 1059 bp, Homo sapiens
gctcacagttgtcttgaagcaattccttgggcatccaggtacagttctctttcagcacaggtctctccaaacaggtctatttgtctccctccccacgtttctcagtgggcccttcagaaagaaagctgcagctctactggggaggcaagagcttgtcattgaggaggcttgggccagaggcaggaagaccagttaggagtctgtggaaatcgcctgggcaagcaatggtggccttccagcaaggacaggtgcagtgagagtgaccaggagtgcaagaactgtgcttcccacagtgcttatggccgtgagaccatgtggaaatatacaataatgaccctggagcatggagccttcctgagactagcttggtgagcttctacctggaggaaatgaagatagaaggaaaacgcaatgtgacctctttgattaggacatagattcaaacacatgcagatggggagtcttgatcaaggaaattctgttttcttctttgtgaagcctttaataagatgaatatactcttcaactcgagatctgaaaaagcaatgaaaatacttctttttgttgtacttaacacaattttttgtggtttctttttatctaggtacctgattcaagaaaaaaggtaagagtatttatttatttttgtaatagaaagtaggatagtttataatactgtcttatttctgagcccttttaaatgaatacagttacaattagaaggggaccttgttgctaatagcaaatacatttgccaaaaagcaagcagaagtgcaatagggaaactccttagtgggagtcacacttctgggcttcccagctgcctctgttgttgtggttttgtactcttccatggttcagtgacaccactgtcgtgaccagcagtgggtatgattgacttctggacattcaggctatcccttgctcccttcttagtctcttgttaagaaagctgtccagctcccaggatgctgcccgtccagggcagaagccataagcactttggccagtgggtgtccataccgcgtgggaggcgtgccccgtggtataccttcaggg

SEQ ID NO: 11574 - DNA, 1932 bp, Homo sapiens
gtcactctctggcagatgagtcacaggagatgaatgagctgcccatggctgcacagctgggaagtggcagagctgggacagggatctaggtggtctggccccagggaccttatactttaccaccatactgggccagctctactctgtgagcccatgtgacaggcttcacacaccttccttctttgcatcctgtggccacacaggacgtggcagactgggacttccaacttaggtctgtgtgacaccaaaggttgtgctctaaaggacaagcatgtaaactaatagtaggaatttgtttaaaattttcttaaaaagcagattttaaggttagaggatcaggagtatagaaattgggtctaatctccccactaagtgaagactgttatgattgcctggaatcattgtcagtatctgtggagccatcagtgaaagattccagggtagccctgtagtttcattgagtatgctggagttctttaccagtgtgtgtgtggtttgggaatggtatgtggtagaagaggaatcaaggaaatcagcacagcgctactgtttccttctcgggacagttgagtgagctgtcgagacgagggcagctcctgccattgacaccaggactctccaaagctcattgacactgaatccttcggtttttgccaattccacgcacacaccatggaagtggctccagcagaggctggtatggcaggctatgctctttcttggaacccggtgtcattgctgaatcaggggccactatgctcagagtaaggaacccggggttgcccttgtgttaaacaagagctaattgaataacagcctaggaccccctccatgctgaaaccccttggtgcggcatgttatgcagagggcctcacagtgactagcattgcccttctgccattctcgtcacatgacagctcacgtctttgttactgagtcatgtcactttcttctatgagaggttttgactcgcaggtcttcttggtcatgggagcagacacataaggactgcttatttatctctaaaataactgcttaaatacttggtcattttgaattataaacagcatggtgcatgattgagtgcaagttcaaagtggtataaacaactgttaatagatacatgaggctccttcctcaacagtggtttctaagaattgaagtttagagcaaatgacagattcatcctatagtacgaggaggctcagctacctttagaggatggcttgatgccttgttactctgctggtggtggccatgaatgcaaaacgtcctttaatagcactgggataagcagggcttccctggtgctgctgaaaatgtttgtctgtgtctgttttttgttgctcataatcctaccacccagagaaaccactgtgtgtgtgtgtgtgtgtgtgtatgtgtgtgtgagcgtgcttgcgcttgtatagaagttgtgtataaattgggtcaaatgaatattcgggggtgtgtgggggcttaaggatatatatcctgggactgcatgtgaatgtgcatgtgtgggtatggagtgtgtaggagttgtgttttggaggtgaggatatatatgtgtgcttgacagtgtgatggagttttgtgtgtatttgagatataattcatataccataaaactcaccattttaaagtatacaattctgtggtttttagtatagtcacaggttgtgcaaccatcaccactaattccggaacatttccatcaccccaaaaaggagccttgtgttagcagtcactcctcattcttccccagctttgtcccccatcccctggcaaccaccgatctacttttcgtctctatgggtttgcctatttggacattccgtataaatggaattagaactgtggccttttgtgtctggcttccatgacttagcatgtttttaagattcatctgtactgtggcatgtattagta

SEQ ID NO: 11575 - DNA, 1039 bp, Homo sapiens
cgtggcaccagcagtgttcctgatgcagttgaagagttgatgtctttgacaacatacggacactgcctggattacctagatgtcacatcttaattgccaattgatgaaattaggtaaatgaaaagaaagcacttaaatttccccttagagcattttaacatgacatgcaatcaggttttgtctgctaataattatttctccccctccatccctcccaccagtttctttcctgaagtctgtgaggccgctataaacaggtagatgaagttagagcagttatggccctaaatggtccacagttgggtattggcactaccgcagtttcaggtgatgtcggcatttttagaaataggaggagatggaaaaattacgcttcagctgttaaaaatatttttggggcattgagttactttaaaacacgtatattctctaagctgtttttatctgaacttgtagagtctattcattttcttgttcagaacattttgtaatatgtgaaaccttttataattaaaactctgaactgcagattaagtctgacttgcagttttgtaagattctaatggattaacagcattttgttttgcaggattcctgccagctcccaggggctttggttatagaagtgaagtggactaaatacggatccctgctgaatccacaggccaaaatagtcaatgtaactgcaaatctaatttcatcctcctttcctgaggtaggcctaacctagtttaaaggcataggttaagacagaagtctagacacaactcaagtgtggtaggtgacaggtattactttgtgaaaaagattataatttaaaccatgggggttcataaaatatttcagcagtcattcttagaaacactgacgatggttctacttacattagcattctggttcagattggatctttaaaattctcatgaaaattatgatattcacgtgttaatcagacaccctggtaaaattgtttctctcatccaagttaatggccaattagtgctccaggacctatcagattcatgaactgacagtagtt

SEQ ID NO: 11576 - DNA, 1025 bp, Homo sapiens
taaccggattcatacctttatgattttctttttctgcttaactttctactttttttttttaccatgctctgggtccagtctcccatgctgtcttccctgactccaaagagggttaattgagctaacaatgagctggggggcacccagtccaaatgagggtcctcggtccaaatgcccatctgtgtttctggggagaaaggagcttggtcaataggattacatagtactaatctgggaggaaggggcaaattctgcttcgggtgtcagcagttgggagaaagatcaacaggatgagcaaagagaggccggacttttccaaggagtttggagaaacttccgggaacactcaatctcctggcgcaggagagcaagatggtgcttgatggaatattttcccctgctcaaagtttagaaaagagcagggatgtgattaaaatattataaccttatgatattctgaagtgcataaattttacatatcagccacagagagtttagacatccattagagcctctgacagcttgacttatctaaatgtgctatcatttaacaatgtgtcaaaattcctctttctatagatgacagcagtaaataagctatcagccctgttggcggaatcctaactttggaaacttcaccataatagaattgctgccgaggtccaattgcagccgaggtggggagcgtgagcccgcagagcttggcatggctcagccccctgagaggggttggcattaggtgaagacagctctgagaataagacaaacccttggactctcttctaactccagccagtgggtgaccccattccctctgcctctccaagtccgtagaacccacaccctgtggcccttttctgcagaaagagctagaaacaggtgttgagaatttatttaaagaacccagcagccttttctgggtctcccaaaattgtagtttctcaacttgacagagattgcttctcaaaaacgggctctctctttgaatgctagaagaaaaaacaagcaacatctcatccctcact

SEQ ID NO: 11577 - DNA, 1026 bp, Homo sapiens
gggattgggacatctgcataaggctctcagggtgtaggagacgctccgttgaggtcgctgtcatgtcttgggggaggctggggagctgtcactcccagcactgtctctttcctggttgcctgtccttacttgccctcaggttttaggatcccctcatcctatccccctcccgtcccctgtcattctccccctctttattcaagcccctgtggcctccttgctgtgcctcaaacaagccaagcaggtcccagcttcagggttttggcacttactgttccctctctctgagacaatttccaaacacctcccttcagttagtttggtcctttgcttgaataccacctcctcagagaagtcctccttgacttctctttccaaatcagctcccctctcctcactctgcctcacctgatgtgataatatttatttgtgtatttatttgttcatttgtttactgtctgcctccctctctggggagggcagggacatagtaagtgctcaataaatatttgattgatgggtggctgaatccacaggagggatgaggtagggggcagttgcccctcgacttcaccttgaggggcagtcttgggggacccttggctgctacacccctcactggctcttgaaagttgctgggaattgggcaccggcctcaggcctgtggcgaatgagggtttgtttacctttagctccatcagtctcgccttagggtgacctcagttccaacctgggaggcagctcccatctaattagtatatctatttattaattgctggaaggctgcaggccataagcgatgatttggtggcctcagccatagagagctgaaagcatccctacagcctgtgagatggctgtcatccaggacacaagacagccagttaatgtcctcggacccggctgacattcctgacactgattcccaggcccactggatcatcccagcaggcatgagaaagcggcctgggtctctggacagtgatcccagggttgaagggctttctttcccaccatgcgcaggga

SEQ ID NO: 11578 - DNA, 1035 bp, Homo sapiens
cctcagcctcctaagtagctgggattacaagcgtgtgccactacgcctggctgatttttgtattttcagtagagacggggtttcaccacgtcggccaggctggtcttgaattcgtgacctcatgtgatctgcctgcctcggcctcccacagtgctgggattgcaggcgtgagccaccacgcccggccccttgctgttctttttaaaaacctctgaagataccttgccactgtcaactcatggaaatggatttgggccccaaagcctgagaagcatgggtcaggggaaggtgagagaaagctcccggttcccagcgtgtctcccagcctggagaatgagcaccacccggccatccatccccggcccccgctgggtcccggagccgcgtggcgcgccctgtcgtccggcctgcattccgcgagatggaattctcggctggggctgataataagcaggtattgattgctgccgtggtcattatcaagatttatttagtcaatatggcctccccggtcaataaatcgtgtcgttgataaagaaggaaggagatagacttgtagcctttattaaaaaagttttttagattttttttttaaagccaagtccagccctcctttctgtggctgtaccagccacactctacagttcgcgtttttaccttataagctctttctttccatggcagaccttatactcattgctctgactccaagaagcaaggacttggggctggggctagggctggagaatggtccctgacctttgttctttcattgaatcctcccagcatcccttggggcaggctctggtgtcaccctattttgcagctgaggctactgaggcccagggaggttcatttactagcccaaggtcacacaagactcgaacccagacagtctggccagagtctttgctctgaatctgacattcatccatcaaatagcaggtatttcttgagcacgtgctataggccccgcacaatgccagctgctgggtgtggaagggcaagctaaacaaataaatgtgtaatgacaga

SEQ ID NO: 11579 - DNA, 1050 bp, Homo sapiens
ctctctctgcctgcgacactcttcccatacttcttcccatcaactcctcccagatccttggagcttactcaatatcacttccttggggcagctgcctgctccaccttgtatggccccatgaggctgtgcaccccaactttacagcacttaccatagcaggtgtcagacatagctctgtgggttactgatgaacaccggcctccctctgtggattgtcatcaccatgagggtatagagcagcttgtccccagaactgagcagcagagggcagagcacatagtaggccctcaaaaaaaaaaaaaatcagtcaaatgaacaaacagggatggatgtgagtgtgatgtgagtgtaatgtgagtgtatttgtatacttacgtgtgtatgtctgcatctttgtgggtacatatctttgagtgtgtttgtgggtcttttaatttttgtgtctgtgtccttgtatgtgtatcttagtgtgtttctgtgtgtgtgtctttgtatctgtgtttttctgagtatgtctctgaatgtgtgcctgtgtatctgcatccacatgtggggatctgtgtgtgtgtgtcagtgcgtgtctttgtttatttgtgcaccttagtatgtctgtgtatgtgtttgtgtgctcatgctcccaggcagaacttctttcaacatctccttgccatgcaattgtattctgtctagtttggtgtggcatttaatgacttccccaaagctaagcatggccactgcagagttgatctcactgtgatggaggtgacacgggcatgtggggccagtggcaggcactgcctccccaggattgcctgctgtacctgctgaagctcccccacccccaccttcatccctttgaggggaaaaccccagacgggtagctaggtgcaggggcaaagcagggttattgccgaacagactggctctgctcttgccagatacatgaggccgccagaggactgctcagtgcctcagttttctcatctgcaaaatggggatagcaaaaataatcccctcatagcatctccacatggaggaaatgagcgcctg

SEQ ID NO: 11580 - DNA, 1133 bp, Homo sapiens
cttttgaaatctctggatagttttgaactctctgttcttaattaaatatgcaatttttcacggtaaccaggttaattcttttgtgttgtgttgtaatactgttaggaattttcatagttcttattaaacattattcaggcattgtgaattccataattaaaaaaaatgaaaagaacaaagcttgattcactcctttcttttccctggctaatttatcaaatgaattttgcaaatttttctttctgtccccagacagtgtggcaagtgttttaaaggggaaggatttaattgccctgtagggattggctggttatgaaggatttggctgtttgattagtaaacccagttgggaatggtctaatgctccatgatcttaaaaattgtctgattgtaccctctccaaggaggcctctctcttcgttatgtagagcatcaacttcacacaagtgtgattattaggtagtgaggaaagggaagagagaaagatctgactttactttaaattggggatcttgggagatttttacctccatttccctggctggggaggaagggagaacactgaagagacacagagagagagagacagagagagagagagagagacagacagacagagagagagacagagagggagcaattctctcatctcagatacaggagaagctggagggtggctgaaagggtggggcccaaggagacgttttagtgcacccttgcagatagtggtgttacaggaagggggtcccgagcgagaccccaagatctcacgcaagaaagaattcagggagagaccgcagtgcaaagtaaaagcaagtttattaagaaagtaaaatggtgaaagaacagctactccatagacagagtaggacattcctgaaaataagaggaggaacacatccaccctaggtacaatactcatatatatggggagatatgctctgtgacaagggtttgtgataaaggattaattttcttaattactatattttgcaataatcaatattgttatctttaaagcaaaattaggaatccctttgttctccaaatattgggatatctggacactcccaagtctgggtgtgtttagtaaacattattaatttgttcccttaaccgtaaacatctagagg

SEQ ID NO: 11581 - DNA, 1026 bp, Homo sapiens
aattgcccaggtgattctgatccatactcaagtctgagaattccaaagggacaatcaatttgaactccaaacccatgcgagtgcaggattatggttatacattctcaggggaagctaccttttggttttccaaactagaggcaaggcagagacagatcaaggcatgtcttcttccagtgttagtggatagaggtgttctgatccacatactcgctgagtgtgaaggcctcttcagtactaagatgggcacctatctatcccatgccccactcctttattgcagagggcacttaattattggttcacatacttagcagtctgagtgagttccctcttcagttttggcccttgggaatttcttactttttccagaactgacctatatatttaaagggatgctggtataccttatccagtatttctgggtgttttatagtgggagcatttcaggttatattgtcttccatgttactggacactgaagtcctctcaatgtaatgaaaattagtttctcctttagaattctttttagaaggtctggtagcctcctgcttcactggtgacctgacacttttcacttaccctggggtctgagcccactttgtcactcacagggaccaaaggctgaacaaatcctgggagtctctctaccttacctctgcctggagctggagtccagttcagccaacgtttgttaagcacccattgggtgaggggtgaggggagttcactttatacaagtgacaagtatctctgctagaggacaccaccccatggtcagtgtattccagcatgtaaatccccttgctctgctctaggggaacttgactgctctaaggaggagggtcagaatggtgtcagggtgaagagctctggctttaaaatccattggaatcaagttcaactcccagctctgccttttacaagctgtgtgatcttgagtgagcctctgcccctctctgagcatcagcttctccaactgcaaggtgggatgacagagggttgctgttaaggatccagtgagat

SEQ ID NO: 11582 - DNA, 1088 bp, Homo sapiens
ttctatcacagtttctcgactccacactgttgacatttgtggccgtttcatggtaggggctgccctgtgccttttagggtgcttagcagccttactggccactcccttctaagtggcagttgcctcccctgctaagttgtaccaaccaaaaatgtctccagatactgctgactgtccattgggggtcacgagcgacctcagccaagaaccacggtaccaccttaggagagagatgagcagggtgaccagccagagagcagccaccaagcaggtgaccattgaggtcacccagaactggggcagggcaggggaaagagggcatgggtgtgagaggccttccagagaaaggattaaaaggccagggatcagcaggccaaggagaccacgaaggagacagatgttggagcctggggccggggtccaaggtctagggcctgatgggtctatgggaccaaggacagatgggaagggaagaggagtcctttggggtgagtggagcttgaggaccccagagtcaatgcatcttggggtgccatccagggcttaacataaagtgggtctgtggtaatggggtgggtgttgctgagtgaatgaatgagccagatataagtcacttaggcaaaagaggactgaggtttaggagggagttaagaggctgcttcctgtgcagtttagtgagaacctgctgtgtctcggattccatggagaatacagcccagtggaggggacgcccaccgagcaaactcacaggtaatagaagatgacagctggcactgagagctccaagagggaagcacgggagtttgtagtcgtgaaccttggggctggcagggagattgggagaaaaggccaggcaaccagtcaggggctgccatccacagggcagcccgcctttggcccagagaacgtgcttgttcaaggttactttgatgggggaagaacaacaagccagcccttggcacaaagggcagtgagagtagagagcagggccatctcctcgagtaccagggtgggagtagtcagggagggcttccctgaggaggtgaatgctggagctgaggacggaaggatgagtagaagtgtacatg

SEQ ID NO: 11583 - DNA, 1026 bp, Homo sapiens
ccttcctgctctgtggccaagcccacaggcccctcacacagcctgcccacctggtgtgcacctggagtccttgagcccatgtaagtttctcctttgcaggaacttttttgacatctgactggggtgcatccattcttcttcaggatttcctgcctcatctaatcaggcaaagatgtcatgtacatgtcacttacaattcttttctccatgttcccagctaagttcttctgttgcctcagggagttccgggagctgcaggtttcacctggggagggcccagtgctgcagttcccaccgtattctgttcttgctggctctaggaagttgggagtattgggacatgtgccctggcaggcagaatgcccgtcctctaggtgagggagcagagggtgcagggaatggaaaggtctgggatggggcttctaagttacagtgagaaaacaaatgcctgaaattaaaattcaagaggatgaaaagcaaataaatgagatagggcagttagggaaagctttgggtgtaatttatttaaactttttttttttaacttttcattttgagataatttcaaaaagactgacaaaaagttacaaaaacagtacaaagaattccccagattccctgaatgctgacatccagcctaaccacaacacaattacaaagtcagaaaaattaacgtggctgaaacaccattacataatggactgacctgactcaaattttgccaagtgtcccactgatgtcgtttttctggtccagagtccagttctggatcatgtgacgcatggagttgttatttccccatagtctcccttaatctccaacagttcttcagtcttcttttgtctttaatggccttgacacttttgatgaaaactggccatttatcttgaagaatgtccctccatttgagaatgcagggtgtttacttatgattcgattcaggttgtgcattttgggctacaggagtgatgttgtgtccttctccatgcattggatcaggaggcaccactgctgttaactttggtc

SEQ ID NO: 11584 - DNA, 1032 bp, Homo sapiens
atcagttctctgttagataggtgatttggaaatattttctcccagtgtgtggcttgtgttttcattctctgaaagtgcaggtaaagatgctgcagccgtgaatgtctctaactctgccacactccagccatactggccttctttcagtttctcaagaaaatgaacctctttccttctccagggccttgtcctaagctgtgccctctgtctggaatacaccttctctcatatctgctgtaagaaatctttgcttagctccaaagatattctcctatgtttcttttggaagtgctgttgctttagcatttatgtttgggtttgtgatctgtctcaaattaatgtttgtgtatgatgtgagataagggtttgagggtcattttcttttttctttatggatatccatttgttctagcaccatttgctggaaagattttatttatcactttccattgttttgattcctttattcagaaagcaaatgagcatctaggtgtggatctatttcttggcattttattctttttcattgatcaatatgtctatccttatagcattaccgtactttattgattactatatcttcacagtaagttctgaaattggatagattaagtcttccaacttcattcttctgtttcaaagtttctttggatattctgtgtccttttaattttatgtaaattttagaattggcttttcaatttctacaagaaacaaacaagcaaacctgctggtattttgattgacattgcgttgaatctgtagatcaatttggagataataaaatttcttttttttttttttttttttttttgagatagagtcttgctctgtcgcccaggctagagtgcagtggcgtgatcttggctcactgcaagctccacctcccaggttcacgccattctccttcctcaggctccggagtagctgggactataggtgcctgccaccatgcccggctaattttctgtgtttttagtagagatggggtttcaccatgttagccaggatggtctcaatctcctgacctcg

SEQ ID NO: 11585 - DNA, 1065 bp, Homo sapiens
aggttttagatgaatgtttgtggttttggagaatatggtgatattgctaatagtagtcatgaattccactcattgagcaatgtatcagtaagtacaggctacattatgctgcagtaacaaaagacccccaaatttcagtggctaaacttaacaaagcaactttcatactcgcatgacccattcattggctacatgtccatcatatatgggcagtggacttggctcatcagtgtctctttagggacccaggctgatggtgcagccaccagctctgatgtgccattcaccatgctagaagtatggagacctctaagggtcttgtacctatggtaaaatgctccactctggaagtgacacatcacttactcattggccaaaactagcaacttggcctcattcaaccacaagaagccaataaacacaatcttaccttgtgcatgggagagagaaatccagaaatatttgacaaaacagcatgaatgatgaccataagcactcagtaaacaacaaggagttcctctgaccctacaacagacctccaagatgacactgagagctaatggttattgactatttaccacatgccatgtactgtttacctacagagcacttttaaccccacaacaatcctatcaggtagatactctgagtatttccatttcacagatgagaggactgagattccaagaggtgaagttacttgcccaagatcacacagctgaggaagcagtagagccacttggctccaggtatttgaatgcaggccaagcttggctacagaacccatattataataaccccatttacttgatgagaaatctcaggctcagagaagcaaaccaacatgcccaaggtcacacagccaggaagcagcaagtcctagttcctttgccttaccgtatttcccaggtaaaggctgggaaacctccctttgcagtttcagttggtgatgaccagacatccttccccaactctttcctgtgcaagtgactcccaactcttggcctctgatatgaattctgtgctagtgctagtttatatcagttcactagagccaaatgttaa

SEQ ID NO: 11586 - DNA, 1051 bp, Homo sapiens
gccaccatcaccactatctaggtcccaaacatttttattcccccaaaaggaaaccgcatacccctgagcagtgtaggggccaagggaaacttccctttcactctctgaaggttccttgaaaatcgatggatgaaaggcaaattcataggagaaaaggcatacaaatttatttgatcatcgttttactgacatgggagccttcagaatgaagacccaaagatacagggaaaactattcatttttacgcttaagttcagtcaagtgtggacagccatgtagaaacaggattgaacaaaaagatatgatgaaatgctcagacactgagttgggaagcccagtaaggcctatctgtctggattcttcttggcctccgtgcagcctgcctgccttgtctgtgtgaggcaggaccctttctggattggggctcctatgacctacagtcaaacaaggcaggtcagatcatttctttatggccagtttttatatagaaaggtagtgggaagttcaagtaatatttttaggttttatggctggtttggggaaaaaggagttctgagttctttttttctttttctttttcgacttttattttagattcagggggtacatgtgcaggtttgttacctgcttatcttgcctgatgctgaggtttcaggtacaaatcccatcacccaggtaatgagtgtagtacccaacagttggttttttgacccttgcttccctccttcccttccccttccaggggtccccactgtctattgttgctattttgatgtccatgagtacctgatgtttagctcccacatacaggtgagaacatgcggtatttagtcttctgttcctatgttagtttgcttaggaaagggttctgatttctaatgattcaccttggggaagaggattctagtttctgtggccagtctcagagaatgagggaccagagacaggagggcaggagaagtccggagaagaacctttgcttctgaggctgcttttgaggccttcattttggggtaccattttctgagccctaacaggagcaactccccat

SEQ ID NO: 11587 - DNA, 1059 bp, Homo sapiens
cccaggttcaagcaattctcctgcctcagcctcccgagtagctgggattacagccatgcgccaccacacccagcttttttgtttgtttgtttgtttgtttttgttttgttttgttttgttttgtatttttagtagacgcggggtttcaccatattggccaggctggtctggaactcctgaccttgtgatccacccacctcggcctcccaaagtgctgggattacaggtgtgagccaccacacccggccctggctatttatttttaaacaaactttgtatttagagaagttttaagttcacagcaaaattgagcagagcatatagagaatttccatatatgcctcgcccctacacggcacattctctaccaccagcaacacgcccacccaagtgggacatgtgttataactgatgaacccacactgacacctcattatcacccagagtccacagttgacattaggcttcactgttggtggtgtacatgctatgggtttggacaaatgtatgacgacgtggctccaccattgtagtatcatgaagaagagttttcctgccctaaaaatcctcttgtattccacctacttatccctctttcccccaacgttcctggtacccactgatcattttactgcctccatagttttgcctttttcagtatgttgtatagttggaattatactgtgtgtgatatggtttggctgtgtccccacccagtctgtgatacttctgcatggcagccccaggaaatgagaacagatgacagtggggaaaggggttgggatagcttgtgggtggccaatctgtagtgtttgccacaggtagattctgttattatcacattttacagaagagcaagcaaagcgagagagggttagtaacgtgtatttgatccaaggacactaacgtgcgggtgtgagaggttaaattccagcgtggtctagcatgatcatcagagttttggtcccagagtcagaccccgtaggtttaaatctcagcttccccactaataattctgtgtgaccttgatagagttgcttcagctcctggggctcggtt

SEQ ID NO: 11588 - DNA, 1032 bp, Homo sapiens
gcagcagcaggggctcacgacagcaggaaactggcctcatgttggggtgttggtctgctggaagtaatgtttaagctgcaacttggctgaggggtaggcctgagttaggccattgattttcagacttgagcatgcatttaaatcacctgaaatttccttgaaaaaaatcgccaggctctaccctcagagtttctgattcagtaggtctggagcccgtccaagaatttgcatttctaacaagatcccaggtgacactgatcctgctgggccagagactttgggaaccactgaactgggcaaagaattgggaggagagggcattcaggtagcggaaactgcacgtacaaaggtcctggggctggtttgggcttggcagtttccaggaaccaaatgaagggccagagggtggagcaaagcacaaggactgtgggaggaaatgctgtagagaagcaggcagggccctgaccacacaggccttgcagactgggctggagagttcagatttgatctgaaatggaatggggagtccggggaggttttaagcagggaagtatcaacatccagtttacatcttgaaatgccctgtctggctgccagggtggaagtgagatggcagagaattgcatggagccagggaggcccctgcaagcatccaggcaggaattggcagtgaccagaccaggctgatgacagcaggcatggagaggcacgggacgtgtctgaatgagtccacgctcctgctttccaggaagttttcctgatcagtttggttccacccttcaatctgtgaaccctaatttctcacttgaagaagttgtcctatgttgacgtgacattagcagttccttgagggtagggctgtgtgtgtcatatgtgagtcacatgcagcccctagttggatacacaataccttatactagctggccaaaagcacgggacagtttacctgcaatggttaccacatccagttttccaaataccctgcaggaaaggtggagttgtgcccattttgcagagggggaaaactgagat

SEQ ID NO: 11589 - DNA, 1026 bp, Homo sapiens
gaaagggccagtctcgttcaataatcggaatagcaccagccatttattcgccaccaactgccccggatcctgtaccaagcatttgacatgcaccttcctccttcaatctgcccgggtaccttgggaggaggttataattctacctgtttgggagatgcagaaactgaggctcagaggccttgagcaacttgtccaaggtcacacagctaagaatgggtgaggctggaagtcaaattcaggtcagtttctgaagtttatgtgcttcaccccagttgagaactcaatgaatatttgtggaatggctggatgaattactgaatgaatgaatgatatgtgaacatccagtcgggactcagctgggctctgggatagccaagaatgacagggtcaggctgtccctcaggcaggcctggcatttgggcctccaagcctgctgggggtggctcctgcttcatcttcatgggcatagagctgtgcccaggctccagtcccctcagttggaggagccagtttaacatcaccagagaattctgtgcaaggaaatctcagggtctgaggggtctggcaataggcagaagcaacaccggggtctcagaggcagggtgaggttgttgtttacctggctgggagccagattgcttcgagccaggatagcatgggggttaaacgctcaaaccctaaagtcaacagaccttggtttgaatcccagcctcatcacattcttagctttgtgtgaccttgggcaagtgactaaacctctctgggcgtcacttctccatcctgcaggtagggctgatgacagtgcatccctgtccaggtgactgtgagatagaatgaggtcatacacatcagtgctcacatagtgcctggcgcgttctgtttggtggcagtaattattggcctagggcatttggggagtcccaccaccccctgcagatatttgtgactaacaagcttatttagctcaaggagaattccaggtcaaggcaaagaggtatcaagtgacctccttgaagttactgtgag

SEQ ID NO: 11590 - DNA, 1071 bp, Homo sapiens
ttgatagaagttgtggtgggggaggctctgatccatgcagtcattcagggatccaggcgtctaccatcatctggtaggtgggaaaagaggaaaacatgatggccctcctaggaggttctcagggaccaaaactggaagtggtcacatcatttctgcccacattcatttgtccagaactctgttacaaaaccatacccaatttcaaggctatagtctaacattatatgcccaagagtgggtaaaaaaacagaattaagttagcacataaccctgtctgctgccctgtggactccctcacagatagagcacctcactcactgtcagggaataggacagagccctgaatacacagccttgcacacagtggtacattttggacaggtgaatgggaatgaaacccaagaggcctgccaaattcagggagcagcaaagcaggagcaaggagggactgttaacaatttggcagatgttataaagctcctactatgcattcttccctgtgctgagctggctagagaaagagatgaactctgttcagcaaggaggctgagccaccattgggatcccatgcccaaggtccacttaaaaaaaagccagtgtgcagtaggaacaaatgtcccaggtgtaccaatgagagtggttattttttgggcaggcaatcagagaagacttctggaggaagtgaggtcccagctgagattaggaagattgggcaggatggaacatggggaatgaagagtggtggtgagcacaggtcttggcatcaggcagacctgggttcaagaccagtttgaacaccggtgaggtgatctgaggcaagccacttcccctttcttttttttttttttttttctgagacagagtctccctctgtcacccaggctagagtgcagtggcgtgatctcagcttactgcaacctctgcctcccaggctcaaacagtcctcccaccttagcctcccgagtagctgggactacaggcacacaccaccacgcccagctaatttttgtatttttagtaaagatggggtttggccattttggccaggctggtctggaactcctgacctca

SEQ ID NO: 11591 - DNA, 1053 bp, Homo sapiens
gcgcacctgcttacctcggcatggacgcccattgtccaagcccctgccacctaaacaaacaggccacagcagagtaaaacagggaagccgccttgttccagccggacctgaaggccccatgtacaggcattgccccgtttcttccatcagcagatctttgttgggttggactgtgggtcatacttcatggtaggtagaagaattccagcagggtaggggtggaagggagtgcaaaaacatgcagtctggccttgccttgtcgagtttgcagtccagtgggtgttaattaggtgaacctgcaaataaacatgcattagaactgcagtgggtaccgtgaaggaaaggtgtaggcagttcatatcagaggacaggttagtcgaggagggcttcctggaagaagtgacatttgagttgtactatggaaggcaagtaagtgtttactagctgaaaggggtaggtcaggggagggtgttcctggcaaaggttctcgtgcaaagggtctgaggtgggaaggtaagaagaagccaatgtgactggagctcagaaagaagtgagggcttctgcttactctgagctaaccaagtgtctggtgccatgtggagcattttacatgcatccttaccacagccccatgaggttgctacatttatggtgaggcacagagaggtagagtcacttgccaaagtcatacagcaatcccaagaagcaagtatagattagcagactccagggatacctaaccttgaggtccacactcttgatccctctgcttcccagcagagagcaagggccaagcagatactggcagaaaaatctgggggagcgaccaggcacgataactcatgcctataatcccagcattttgggaggccaaagcaggcagatcacctgaggtcaggagttcgagaccagcctgaccaacatggtgaaaccccaactctattaaaaatacagaaatttggccgggcgcagtagctcatgcctgtaatcccagcactttcggaggccaaggtgggtggatcacctgaggtcaggagttcaagaccagcttgg

SEQ ID NO: 11592 - DNA, 1068 bp, Homo sapiens
gagggaatggctcatgccaacacccacaggcagctggcgtgactagcggcagatcgtgtaggtggggcaggagcctgggtctggaatcacagctctctgggcatcctccaagccacgagggcagcgcctgtctcacctgtgtcaaggctgggtgtggggaacagtaggattgaccaagaacaggtgcccttatgcaggggttagaccctccccccttcagggacaggaagaacatggtggccaagggcagatgtggcccctccctctcccttcccatctgcctgacagcttttagtgactacttactgtgtgcaaagtacctactgtgtgcgggtcccaaggaccctgtgatgtacaaaactgtcgactgtagcagggcacggtggctcatgcctgtaatcccagcactttgggaggccaaggtgggagggctgcttgagcccaggagtttgagaccagcctaggcaacatagtgagaccccatctctacaaaaaatacaaaaattaaccaggtgtcgtggtgtgtgcctgtagtcttagcactttgggaggccaagatgaggatagcttgagcctgggaggtctaggctgcggtgagccatgattatgccactgcactccagcctgggtgacagaacaagaccctgtctcaaaaaaaaaaaaaaacattgtcgactctgcatggcccccttccatcgagggcagaggcacctacttgtgctttttggggtttcttgtggagatcggctgtgggggttccaccatggcctcatgtgacaggggcaccctttgttgccactgccctgcagacatgcccagcgggacatggccacatgcagagacggtgcctgtggaggggtgtgtggcagagagaaccccatttgtaggttcgcatctccaccttgcattccctttcatgggttccttacaaggtggatgccatgctgccacctggttggcagatgaggaaatccaggttcagagaggttgagtcaggcatcaggagccacacagccaatacgtgtccccctttgtaatgtgagccctgggagagcagtgttcgtctgt

SEQ ID NO: 11593 - DNA, 1011 bp, Homo sapiens
tgatttttgtatttttagtagaaatggggtttcaccatgttagccaggcacttggtgttaagagtcaccggtggctgcgttcctggatctcaaggtggctttactttgcgtttccctgatgactcatggaggttaagcaccttttcatatgttgattggtcatcggaatttggtcgtttgtgaagtacatgtttttattgtctgtctagccttttttaaattgatttgtaaaagtcgttatatattttggacaatttctttgcgttttaaaagtcatttcctacctttatggcctggcttttcatgaaaagcagttttgttttttttttttcttgagatggagtctcactctgttgcccaggctggagtgcagtggcgcaatctcggctcactgcaacctctgcctcctgggttcaagtgattctcctgcctcagcctcccgagtagctgggattacaggcgcatgctaccacgcctggctaattttttgtatttttagtagagatgggttttcgccatgttggccaggctggtcttgaactcctgacctcgtgatccacctgcctcagcctcccaaagtactgggattacaggcgtgagctacctcacctggcctcaatttttgtatttttagtagagatggggtttcaccatgttggccaggctggtcttgaactcctgacctcaggtgatctgtccgcctcggcctcccaaagtgctgggattacaggtgcgagccaccacgcctggccaggaggtcacttactttcattctaagtaaatcactgggccttccaggcagagggaacagcatgggcagagaccctgagtggggaatgtgtttagcatgttttgaagaaaggacaagatgaagaggccggtgtggtgggagcagagagagggagatggggagcggggaagtacatgtgggtggaggacactgggaacgggaggacttagtgttttattccaagcacaatcagaagctgttgggaaaacgcaagcacagat

SEQ ID NO: 11594 - DNA, 1048 bp, Homo sapiens
gcacctcagcctcccaaaatgctgggattacaggcatgagccaccatgcccggctgagcctgttaattttcatcacttcaatgattaatcaagtctcgggatttggggatgacaaactgatggagctatgtggagcagaactgtgaagagtgatttgcttgcactcactacagaagcacatatcacgtgatccagtattcctggcaattcacatttctgcaatcatgccttttcatttctcttcccttgatcttgcttaatgtatgatggtatattattcactaaatactcttgatttcactttcaaaagcatgaaaattaattcaaatcagaactaacttgcatccccccaaattcatcctcttcaagtttttgtatagaccaatcctcatttaaaaaaaaaaaaaaaagctgatgtaatatcaaaaataggaccatggctaattaaaccaatgtttttttttctaaccacagttactcagaattcgtagaggctcatctatttgtagacactccaggaatcccaaaagagtaaatgcaataaaaaacattattttttaaaaaatgaaaagtgtttgggggagagggcttccaggaagggattatttatataccttgtatgcaaagtaacaactttcccatagctttgaaaaaagtggagggtggggagctgcaaaattgtagagaacacagcaacattatttaaagaacttttaaatgagccattccctccaaacgagcacactcctggttgttaagttgctcgttttgttttaccttgtgggatagaataatgatgcagtaacattattcacaaggcaaagctggttgccagctgaaatagacacagaagaaagaattctttatttttcattggaaatgcttgggctctgcagagccagaaatttaaagaaactcagccttttgtttttcctctttctcccttttttgtttttattcaccctctttttgggggtgagtttggtgggcagcctgttgtttcagggccacagatttatggaaagccaaagatctgaattatgcatga

SEQ ID NO: 11595 - DNA, 1029 bp, Homo sapiens
atcccagctactcaggaggctgaggcaggagaatcacttgaacctgggagacagaggttgcaatgagctgagattgtgccactgcactccaacctgggtgacagagcgagactctatctcaaaaaaaaaaaaaagaatatgcatagaaaataccagatgattagctgggtgtggtggtgtgtgcctgtagtcccagctacttgggaggctaaggtgaaataattgcttgatcttggaaggttgaggctgcagtaagctgtgatcatgccactgcactccagcctgagtgacagagcaagaccctgtctcaaaacaaacaaacaaaaataccagaagaaacatactctaaagtgttaataacttcctctgttgagataaccatttaattttctttatgtttttctgtttaaaaaatataacattgtattttttaacaggggagatagaaatattctacacatcttgatttgggtagtgattacatgggtatatacaattctcaaaactctttgaactgagcacttaagatctgcattctattgtatgttttttattattattattattattattattattatttgagacagagttttgctcttgttgcccaggctggagtgaaatggcaccatctctgctcactgcaacctccacctcccaggttcaagcaattctcctgcctcagcctcccaagtagctgggattacaggtgcacaccaccacgcctaatttttttgtatttttagtagagatgggattttgccattttggccaggctggtcttgaactgttgacctcaggtgatacgcctgccttggcatcccaaactgctgggattacaggtgtgggccactgcgtggggcctattgtatgttaattatatctcaataaaaaataaacacacaagcaatatacttttgtacttcctattgtctaatagcatttagaatatataagtaggggctgggtgcggtggcttgtgcctgtaatcccagcactttgggaggccgaggtgggtggatcacgagg

SEQ ID NO: 11596 - DNA, 1047 bp, Homo sapiens
tgtctctgctgaccttgttttcttctcaggccttggagaccctggacaatggcaagccctatgtcatctcctacctggtggatttggacatggtcctcaaatgtctccggtatgggctcagctttcctgttctttgttctggcaggggaaaaggggaggcaacgttgttaggaggtaaaaattaaattacaaaaattcaaaaggggcagagcgcggtatctcatgcctataatcccagcactttgggaggctgagccaggtggattacgtgaggtcaagagtttgagaccagcctggtcaacatgatgaaaccccatctctactaaaaatacaaaaattagctgggcatggtggcgcacacctgtaataccagctactcaggaggctaaggtagaagaatctcttgatccctggaagtggaggtcacagtgagccaagatcacgccactgcactccagcctaggtgacagagtgagactctgtctcaaaaacaaaaacaaaaaatgaataaattacaaaaattcaaaaggatcacaggagtcagagaaggctactctatttagactccagctcatgggaaaatccttcaatatcacaaattgtgattagtcataaatgctttcttttgttcttgagtcacttttggtactttctgtgttatttggaacttgtccattttatcgaggttatctaatttgttggtgtacaattgttcacagtattctcttataatcctttttatctctgtaagatctgtagtgttgtcttcattttcagttttacttatttgggtcttctctctgtttcttagcctagctaaaggtttgtccattttgtaaatgttttcaaagaaccaaacttttggttttgttgattttattatttttctattcaagaaaatattgtcttttgtctatctccgtttcagtctttatttccttccttttactagctttgggtttggtttaatcaaaaatgtttgattgattgattgattgattattattattattttttgagatggagtctcgctctgttgcccaggct

SEQ ID NO: 11597 - DNA, 1022 bp, Homo sapiens
cccagtactttgggaggccaaagtttggaatacattatttcgttaaatatgtggttctcagtggaatgggcagggattttacctcttgggagacatttggtaacatctggagacatttttggttatcacagttggtagcgggtgcttctggcacctagtgggtagacggcaggaatgctgctgaacatcctaaaaggccaaggcaaccccacaacagagaactatctggctcaaaatgtcagtggtgctgaggttgagaaacccaacaaatgtgtagtatttaccactgaaaccaatgtgcctagactttgtttcatgggaagatactcagttattaattcagttttttttacttgttacaggtctattcaggttttctttttcttcttgagtgagttttggtaatttctttctagaaatttgtccattttatctagtgctttaatttgttggcataaagtcgttcatggttttcccttttaatactttgatttctgtaaagtcaattgtgatgttccctctttcctttctaatattaataatttgtgtcctgccctttttgtattggtcaattcagctaaaggtttgttaactttgttgatcttttcaaataatcaacttttggttttcattgattttctctatttttctgtattctgttttatagctctctgctcaaatctttattattttcttctttctgcttgctttgagtatagtctgctctttttctacattttaaaggtagaaggttaggttagtgattgtgatcttttctaaggtaggcatttacagctataaatttctgtttcagcaccacttcaacttcatctcattatttttggcaaattgtgtttgcattttcattgagataaaatattttctaatatctcatgttaaatcttctttgacctcctggttatttataagtgtgttgtttaggccaggtgcagtggctcacgcctgtaatcctcgcactttgggaggccaaggcaggcggatcacgaggtcaggagttcgag

SEQ ID NO: 11598 - DNA, 1033 bp, Homo sapiens
tttcattatgtgattctactgtcttctggcttgcattgtttctgatgaaaagtcagccattatttatattgctgtccatgatttgtcattttttcccttcgtacttacattattttctctttctctttcagtgtttttttttgtgtgtgtgtgtttgtgtgtgtgtgtgagacagggtcttgctctgttgcctaggctggagtgcagtggcatgatctcagcttactgcaacctcaatctcctgggctcaagcaaccctcctacctcagcctacccagtagctgggaccacaggcacaggcatgcaccactacaccaggctaaattttgtattttttgtagagacggagttttgccatgttgcccaggctggtcttgaactcctgacttcaagtgatcctcaccctgcagcctcccaaagtgctgggattacaggcgtgagcaactgcacctggtcttgtctttcagtgttttgactgtggtatgtctaggtgtggttctttttgtgtttatcttatttagagtttgttgagcttcttggaggccataggttattactgttcatcaagttggggaaggttttgcctattatttcttcaaatattcccacctcccccatcttcacccctctttggctctcccattacacatatgttggaacgcttgacattattctacaggtctcatttttctttaatcttttttctgtctattctttggatttgatcatttctttctatgtattttcatgttcactaattattctgtcacctgaaaatctgttgagcacctctttttttttttttttttttccaaaacggagtcttgctctgtcacccaggctggagtgcagtggtgcgatcgcagctcactgcaacctccgcctcctgggttcaagcaattctcctgccccagcctcctgagtagctgggattacagcacctgccactgtgcctggctaatttttgtatttttagtagagacggggtttcactgtgttggccgggctggtctcgagctcctgacctcatgat

SEQ ID NO: 11599 - DNA, 1032 bp, Homo sapiens
agctggcatgtcatttgggacagatacaatgccaggaggtgaactaggtgccgagatgacaaacagcatccttggatgctgtggttatgtgggtttgtcaggcctggaccccaccctccaccttcgcgctgccagttggttgctttgagatggagtctcgctctgttgcccagggtggagtgcagtggtacaatcttggctcactgcaacctccacctcctgggttcaagtgattctcctgcctcagcctcggcagtagctgggattacaggagcccgctaacacgcccagctcatttttgtattttaagtagagatggggtttgaccatgttggccaggctggtctcaaactactgatctcaagcgatctgcccgcctcggccttcccaagtgctgggattacaggcgtgagccaccgcacccagctgctctggcatatcttaagatgggaagatttagtcagaattagggctagtgagtggatgagggagagttgatattcagagtcttttggtagctgtaggactaggtaagaagtcaggcctaaattagaatatgtttgttttttctgcccacctgtgtgggaggctgggtgcccatggacttaggcactgcccctgtcttcccactgctgggtcttcactgagcagtgtctcccttgttggtctcagtttcttcctctataatgggatgaaggtacatgtttaggggcaacacctgggagctgtctcccaacagtacagccatttctccgtggaaattactccctttcaaaagtaagcttgtcctgttgattagaaggtgggggttgggggcaggttctgtgtgctataaagagggactgttttctaaaatagacaagtacaagtttttaggaacgtgggtgcaatgattaaatcaccatctgtcttgacatgctatttccttgctgtattcccagctatttgaccaaaacctcaatgtcctgtaagtagttctttgccagttttctatagaatacatttcctgtccctagagcaacactgattatc

SEQ ID NO: 11600 - DNA, 1089 bp, Homo sapiens
atatgaattgggttaagtctatgtatcagtttgaggagaactggtatctttattacgttgtgtcttccaatttgtaaacatagcaaatctctatttatttacatctttgatttctttcatcagtgtcttgtggttttcatttaataggtcctgtacatattttgttaaatttacatctaaatatttcattttttgagtgattttaaattgtatttttattttgattaaattgttcattgctagtatacagaaatataattgatttttatatgttgctactgtatcctgcaagggggaagattcagtctttcaccattaagtaaaacattaactataggctttttgtagatgttcttattacattgaggtagttttcactctctacctagttttctgggagtttttatcatgaatggatgtaaagcttagccaaatgcttttttctgcaccaattgatatgatcatgggatttttcttatttagcctgctaacatggtgaattcaatgtttgattttcaaacataaaccaatcctgcatccctggaaaaaacaaaacttggtcatggtgtataattctttttttcacattgctgaattttatttgctaatatttggttaaattttttttgcatctatattcatgaaggatattggtctgtagttttctttttttgtactgtctttctctggttttggtatcagggtgatgctggcctcataaaatgaatcggatagggttccctttccttctcttttatttttctagaagagattgtgtagaattagtgttaatttatttttaaaggtttgttataattctccagtgaaaccatctgggcctgattatttttcttgggagatgtgaagttataaattcaattttcttttttctttcttttttttttgagatggagttttcccaggctggagtgcaatggcatgatgtcggctcaccgcaacctccacctcctgggttcaagcgattctcctgcctcagcctcccaagtagctgggattacaggcacgtgccaccatgcctggctaattttgtatttttagtagagacagggtttctccatgttggtcagg

SEQ ID NO: 11601 - DNA, 1027 bp, Homo sapiens
tgccaactcctttgtaggtaggtttgtttatttttgtcagatttcttgttcagggtttactgcgaaaggcctcctgggatgatgagcatgacaggggctgatgtagtatgcagagggtctccttcacctaactgaaaggaaccctgaaggagaaggccttagtatgtctgcagccttgtttattctggacagggttgtgtatatctttgattagtgtgaacaggtactaatggggtgccctgcatgttgctggcactcactaaattgttaaatgagtcagtgggtgaatgaataaatattagtttgtgagagcttgcctcccttgtgggcttgtttccactctatttcttaaacaggggccccttgggaaggggaattagccccaaaagtccctggaacacccacttgctcagctctatacgccctcaggtcattcccaaaagcaagttcgtcttggtgaagttcgacacccagtacccctacggtgagaagcaggatgagttcaagcgtcttgctgaaaactcggcttccagcgatgatctcttggtggcagaggtggggatctcaggtatggacaagtccaggacggctgggggggcagagagggaggaagctagaaatcgtttccctacttggaacaggaatacccagcatctttccttctgagccactctcaaggagtgtaagtaaacaggttcatggtctctaaaggaatctgctgcccacagtaggcttaacctgagcagattttgggaccatggaatctaagctcagctgtacaggtgcctgaagggaagggaacccctcttccttcacattccacccctctctgacattaaactgtgagaactttgagctctccttgcagggaacactgggcagagggggtgctatgtcccctaggggacagcatagtcagttcttctgtcttcatttcagtttatgtaccaaaactgttaggttttggtgttagctcaaatgcactgatgccaccactaatccaagggcacctcccaaccacagcgac

SEQ ID NO: 11602 - DNA, 1106 bp, Homo sapiens
gtctattaggtccacatggtccagagctgagttcaagtcctgaatatccttgctaattttctgtctcattgatctaacatggacagtgggatgttaaagtctcccactattattgtgtgggagtctaagcctctttgtaggcctctaagaacttactttatgagtctgggtgctcctgtattgggtgcatatatatttaggatagtgagctcttcttgttgcattgatccctttactattatgtaatgcccttgtcttttttgatctttgctggtttaaagtctgttgtatcagagactaggattgcaacccctgcttttttttgcattccatttgcttcataaacattcttctatctctttattttgagcctatgtgtgtctttgcacgtgaggtgtgtctttgcatgtgagatgggtctcctgaatacagcacactgataggtcttgactctatccaatttgccagtctgtgtcttttaatttgggcatttagcccatttacttttaaggttaatattgttatgtgtgaatttgatcctgtcattatgatgctagctggttgttttgcctgttagttgatgcagttttttcctagtgtcgatggtctttacaatttggtatgtttttgcagtggttggtcctggtttttcctttccatatttagtgcctcctttaggagatcttgtaaggcaggcctggtggtgacaacatctctcagcatttgcttgtgtgtaaaggattttatttctcctttgcttatgaagcttagtttggctggatatggaattctgggttgaaaattcttttctttaagaatgttgaatattggcctccactgtcttctggcttgtagggtttctgcagagagatctgctgttagtctgatgggcttccctttgtgggtaacccgccctttctgtctggctgcccttaacattttttccttcatttcaaccttggtgaatgtgatgattatgtgtcttggcgttcctcttcttgaggagtatctttgtggtggtctctgtatttcctgaatttgaatgttggcctgtcttgctaggttggggaagttctcctggataatatcctgaagagtgttttcca

SEQ ID NO: 11603 - DNA, 1077 bp, Homo sapiens
aatgaagtgtgttattttttctgataagagtgctaccatctttcattcttgtgtgccatttctagttggggtgaatttgttttcggagttcctttcccagctgtttgcctgaaaaaccatgaaatgtgttccacatgaactatgaaatgattagatgctaatgtggcaaagaaagtgtgaattctcttgtagaaacagggacatttggttcggtacagtaagttgttaatgcgtgactctgtgctttcaaattctgtggttcaaaagtacttttcactcctactgtgtatttaccttgagaaggtgaatcccctaacaatttggtcaatgtatcagtattctcaacccgtctatcaatttttttttctttctccctcttttttctttttttgggcaaaataccttttttgctttttatccccttaaaataaccattgtccctcacatgtgcactcttccaaatttcagaaaagcaagaggaaagggcacgaatatacaaatattaagtattctctagcggaccagacgagtggagatcagagccctctcccgccttgtactccaacgccaccctgtgcagagtaagtagtgctgaaggaaattctttttacctggtcatggtggtttaaaaaggtttaaaaaacaaaaacaaaaacaaaacacaagtttgtagcacatgcctttcactggtgcacgttcctgttgccctactgttagtgtatctgtgactggtgatatctattgattgtgttaatgctatctcaaccacgttttaattttcctaagctggccaggcacggtggctaacgcctgtaatcccagtgctttgggaggccgaggttcatggattactttgaagtcaggagttcgagaccagcctggccaacatggtgaaaccctgtctctactaaaaatacaaaaattagccgggcatggtggcgcatgcctgtaatcccagctactcaggaggctgaggcaggagaatcgcttgaacccaggaaacggatgttgcagtgagccgagatcatgccactgcactccagcctgggcgatagagtgagcctctgtctaaaaata

SEQ ID NO: 11604 - DNA, 1244 bp, Homo sapiens
atatgttccttaaaaactcttaacttatttcttccccagatgtggactttcaccctctccctaaaaagatcaagaacagacgcaagaaagtttatgtgaagacagaatttggatttggaaggcttgcaatgtggttgactaccttttgataagcaaaatttgaaaccatttaaagaccactgtattttaactcaacaatacctgcttcccaattactcatttcctcagataagaagaaatcatctctacaatgtagacaacattatattttatagaatttgtttgaaattgaggaagcagttaaattgtgcgctgtattttgcagattatggggattcaaattctagtaataggcttttttatttttatttttatacccttaaccagtttaattttttttttcctcattgttggggatgatgagaagaaatgatttgggaaaattaagtaacaacgacctagaaaagtgagaacaatctcatttaccatcatgtatccagtagtggataattcattttgatggcttctatttttggccaaatgagaattaagccagtgcctgagactgtcagaagttgacctttgcactggcattaaagagtcatagaaaaagaatcatggatatttatgaattaaggtaagaggtgtggcttttttttttttcttttttccagccgttgaccaattatagttcggctgttgactgagaagtttgtggtgggaaaacgtttgccatattttctttgcatttgaataattgtcttgtacttagaaaaaaggcgtctatgaatgaccagtgtttttggtcgccaaatgttgctgacaaacttatcccaaaactttagtggcttaaaaaaacctgcccccaactgttagtcaatctgagctgggctcagctgggctgttcttctgccagcctgcaggtggccactcatgtggtcagcaggtcggcggagagactgggatggctgggcttctctctctgcctgcagtcctgagtctctccttcttcgtgtagtctctttcagtggcctggctggcagggtagctagacctctcacatgcagctcagagctcccaagagctcaaaagcagaaatggccaggccttctgaaaacttaagtccagaattgtcacagtgtcccttctacttccctctattgatgatgatgatgatgatgatgatgatgatgatgatgatgatgatggttttttctaatcagaagaaagctggggtatgccct

SEQ ID NO: 11605 - DNA, 1020 bp, Homo sapiens
tggggcaggggtcagagttagaagtacattattttcagtgaatgtgtttgtttgttgctttcaggtattattttgattattttgatttcaaataaaattgtgtttctccttgttgagattggcaggccagttttgtgtctatgttattttaaattatgcatatacacacagacaggaaaggtacaagtggttgcaaattaaaggagtagaaagaatacaaggttaaacccttcccccacatctgttccctaattttcttgctagagacactgtctacttccagtctcgtatgtgtcctgttgcctatttaagtgaatctgcttaaatacaaatggtagcatactgaacatatattttggacacttgtcttttaaattttttaattatggaaaaattcaaacatgcacaggagtagagaggatagtatgataaatccctctgtacttcccatttggtctcaagaattatcagtatatggcttttgctttttcaactatatgaaacactttggatcttgttccaattcagttcatttaaacttgcctcatttattttcacagttgcttagtattctataataaagatgttccataattcatttacccagtcccctttagatggacatttatattgcttcccttcttatgtcactacaaacaatgctgcaataaatatacttttatatccatctttgggcatatgtttgaataaatctgtgagaaattcctggaaatagaattgctgagtcaaagagatgtgtatttaaaatattgatataagtactgccaaatagcctattgatggaattttattaattttcactctcactaagagtatccaagatggctcacttcttcatatgcttaccaacacaatgtgttatcgcatttctaatctttaaaatacactctcctagttttgtttctaaatagacatgaaatctatttagtaagttgtaaaatcctacctatctaggggatagaagtcagcatagaatagaaaatatcaaagaacatcact

SEQ ID NO: 11606 - DNA, 1031 bp, Homo sapiens
ataattaaggatacagtagggggaacaagtgcgtaaatttacattttaacttgtcttttcttcaaataggtattaatatccttgtgaagtccaaggccttccagtatttcatgtgtaagtgtgaaatatctccactctaggccactttccccctgagtcctttgctgttctagaagcgggagaggcaagagattggtcctagagtcctgtgtttgactttttattgtggggaattcccagcatgtataaaagtgaagagaacattaccacacgcatccccgtgcccatcacccatctgtatcttcactccggctcatcatcctctctagacctagattttttggaagcaaattccagaaccacagagttgactggtcgatatgtctcttgagtttgttttaatctataggcttctcttcctcacctcatttaggtgaggaagcaggatttgggttttgtatgttcctctgttgccttttcctggaatttggtagttctgtctagagccatgctgtgcagtgtggaagccactggccacatgtggcaatttacatttaagctaattaaaatgaaaaattcagcttagctgtcacatttcaagtgattaatagccacaaatggctaatgactaccaattggattgtgcagataagaaaatttgtattgtcacagaaaattcccttggacagtactaacctagaggcttgatccaatttggtctttccaaggagctctggttccttttagtaggaaatggtgttagagacacaattcgaggtgctgggtgctcattgcttgggttggtcattgtttctaggcctttccatggacagaactagggttttgttttttttaaagataaactgttgtgcgttcatgctaatacttcacattcaggcctacagcaattttaagattaagaatctagatgtgtaagactgatttcatcaatcttacacgtctagattctcaatccttttttttttgagacagagtctcattctgtcgcccaggctagcgtaatctgtgct

SEQ ID NO: 11607 - DNA, 1031 bp, Homo sapiens
ggccggactctgttgggcgtgggctgcgcagccacggacacctacccaccctcctcccctgcctctgcccctccctccctatccctggccaggtggtgatgacgatcattgtcgcctttatcctcgaggccttcgtcttccgaatgaactacagccgcaagaaccaggactcggaaggtctgtgcagggatgatgccttgggcatttgatatctgccgcctacccagctctgtctgtctgtctgggtggctgtccagccagccatcaggctgtcatttttctgctgtctggctgtccagcttatctatctggcttgtctttctagatcttgtatttgcattgattttcaaatatttaatgtcagaaaacgtaatctaactttaaaataagacagagcatgtcatagttggagaaaaatcaagaagtagagaaaggcttatgtggcagcagcagcccctgccctgcctttccctcccgtcctccagaggcttctccttcttggctatttcttctgttagtcatctccacgtttctcaataataggttcacactacggttcttgatttaaatggtgtaaatattgcttatggcacaggcgaatcgtattcctgctgcaactggatggtgctggctttagtgactgcctcactcttcccagattgcacagctttctgtgtgctgaccctcccttcttcccaaattctccatcaaaactgtctgcacttgatctcttgagcccaggaggtcaagactgcagtgagccatgatcacaccactgcactccagcctgggcagcggagtgagaccctgtctcttaaaagaaacagaaaaccctgtgcccacacttgttacctctcatcctcagatctctgtgctatcagaccatctgaccattttctctgtgcttagaggccccttcctgaaaccctctggccctgtaacagctgccagctagacctgcgctcctgacatcacagcagagggaggggaagggaaaggagggccaacgaggagagcaggacaccaatgca

SEQ ID NO: 11608 - DNA, 1050 bp, Homo sapiens
ccagcaggcgagcctggactcatgcaggtggcatctcggtgggaagtgcagagggccgcatgaagtctgggtgaaactgccacggcattctcttgcccagtggaatcagaagggttattgctgttttgttccctgctatgtcctcagtgcttaaaaaggaacataataggtgctcaaaaaaaaaacattcatggattgactaactgaacacacatatagattggggtccccagtagcagaggtggtgccatcagttataggctttgcaggctaaaggctctcagggcaacttccaggggcctggggtccctatccggggcagagctgggcagggagaggagcctccagggagaggacagcatgagcaaggactcaggtggccacaccagcagcctccgctctggggcagcctgggtggggggctctcagggaagagagcaccccagctgcccgcccttgcctcgcccaccccctaccccacagctcatctacatgcactggatgaacacggtggtgaattactgcggccccttcgagtatgaagtcggctactgcgagaggctgaagagcttcctggaggccaacctagagtggatgcaggaagagatggagtcaaacccagactcaccttactggcaccaggtgagtcctgctgccacgcttggtgggagggggcttccagctggccagccatcctgtctcctgttgttctggccagccttgtggcatgtccagctgcccagccgcctctgtttccatcatcatctccatccctcctagccgacctgccactcatccatctgcccagtctccatctgtccacttgctggaactccagccatccatcctagcctacctacagttaaataatgaccaaaaacaaatagtcagttgttagcatggtgttttgcttgtgtacatatggtgttttgcttgcatacaagggaggttgcttggtagattgattacattggatgcaagtaaagacagtatgagaaagaggggaaggggaaaaccagaaaatcccagaaagtctggacacagtgaatt

SEQ ID NO: 11609 - DNA, 1047 bp, Homo sapiens
ttcctcctcccaagtctgttctcttattgtcaacctcagcacaacaggctggcgccaatggcattacagagaaagcaatctgtgtggctagtgggcagattaccatgcaagccccaggagaaatggaggagctttgtagccacctcgctgtcagccagtattaacatgtccccttccccctgccccgccgtagattcaggacatttgcccctgtgtgccaccaaaccaggactttccccttggcttggcatccctggctctctcctggtacccagcaagacgtctgttccagggcagtgtagcatctttcaagctccgttactatggcgatggccatgatgttacaatcccacttgcctgaataatcaagtgggaaggggaagcagagggaaatggggccatgtgaatgcagctgctctgttctccctaccctgaggaaaaaccaaagggaagcaacaggaacttctgcaactggtttttatcggaaagatcatcctgcctgcagatgctgttgaaggggcacaagaaattggagctggagaagattgatgaaagtgcaggtgtgtaaggaaatagaacagtctgctgggagtcagacctggaattctgattccaaactctttattactttgggaagtcactcagcctccctgtagccatctccagggtgacggaacccagtgtattacctgctggaaccaaggaaactaacaatgtaggttactagtgaataccccaatggtttctccaattatgcccatgccaccaaaacaataaaacaaaattctctaacactgcaaagagtgagccatgcctgttaacactgtaaagaatgtaacatgtgggggacacacaggggcagatgggatggtttagtttaggattttattagtgcatgccctaccctctgggggaacgtcccatctgaggttttcttctcggtggggggatttaacttctgtcctagggaaaacagtgtctgatgaggagtgtttccaacacaggctacatgaattcccctataccagtgcgaaagcagccaggagt

SEQ ID NO: 11610 - DNA, 1085 bp, Homo sapiens
aaaacagtgtgcagactgctggtgtggtgtgacacatggttagcaggaagcagaaggacagagactggcaagaaggaaatacagtttcctagtttatgtacttctttttctgaacgtgccttacttttctgatctgaattccctttatctttctttcacttaccatctgtgtatttctgaaagacgttgccatccttctcatctttcctgaattggctggttcctgtcacatagaatttaaccttaagaatctagtcccccagtctagacattcaaacatgtctcatctgttgtgtctctgtagctaagcaagtggccttactccagcaaatggcctgagtcgttctcagggtgtcacactgagcccggtattttgagggcagtgagctccagggtatgtgttctggtatagggttcctcattgagaagggtgagctgaccgctgcttggagagcctgggggccagtggccgtgctttggctggggtgatctcaggatctgcccttgcttgcacgtcgctgggcttaaggacattcatcttgtgtttctgtttactggaggatcagtggtcaacccagaggtacagcaggccaggttcagaaagcacgtctctcccgtttggctctttatcccacatgcgcactctctgggtgccaccctgcaggtagagagccaagttctccaaccaaggaattggggtgacagaatggcctttggactgtgcaatatatgtatttactgtagattaagaatttgggtgcagtactactagtaaacaaagcactcctgaatcagagtacttctctataagaaattccacctgaggccagctgtggtggctcacacctgtaatcccaacacttttggaggccgacgtgggtggatcacttgaggccaggagttcaagaccagctgggggaaaaccccatctctactaaaaactaaaaaaacaaactagccggacatggtggtgcacgcctataatcccagctacttgggaggctgaggcagaagaattgcttgaacctgggagacggaggttgcagtgagccgaaattgtgccactgaactctagcctgggcaac

SEQ ID NO: 11611 - DNA, 1066 bp, Homo sapiens
cacatttagttatcccaaatactcaatccaaaaaataaaaaaggcaacaaaagaggagaaaagggagcaaagaacagatgggataaatttaaaaaattagcaaaatggtagattaaacccaaccttatgaataatcacagtaaatataaatgatttaaacaccccaattaaaagcaagaccaactacatgctgtctatggaaaacccactttaaacatataaagacacaagcgaaaagatgggagaagttctgcatgctaacactaatcgaaaactggcgtggccatgcaaagtggatttcaaagcaaagactatagtaaccagggataccgagggactttgcctgtgataaagaatcaactcatcaagaggacatacaatcctaaatgattttgcacctaaaaatgatgttgaagaactgtgcacgtgatatcagccccccgacaagtgaggatctgatcaagtgcgacactttataattgaagtaggggaaatcgaaaaagatgaagacacaacaggctttcaggagagaaagatttgaccatttaattgatggagccctggatttttttttttttttttcccaaaaagactcttctcaggatagctctgtgctactcaaccttgtggtgaaggatattttattgcataaagttctgttggaaaaatgatgccagcaaagccaatacttgattaataatgaaaaatgtgtttatagataaactccatgtgtgcttagagtgagctgtggttaaatagcttccacgcttggcagcacccagggtgagtgtgatggtgtacgtcagttactcattgagctcatagttattttatgcacttacaaatgcagccgctcatcctgcacttttccagctaaattccagcccaacttcatgacgtaccaagtcatgacataacaagtggctttggaccaagttgtttaaccgctcggtgcttctgtttcttttctgtgagaggagtaaaatggtgcgcctcccaagatggaagtgaatgcccagtgagaggagacacacgagtctctgaagactcagaagctctatgcaaa

SEQ ID NO: 11612 - DNA, 1049 bp, Homo sapiens
tttagaaactaggcttgataagtggccccacatgtggcacggcaaaagaatcaagtcagtttgtagttttaatcccgcattttagttttcaggttgagctatacagaggctccaagctcctctcctaggatctccacacagggacctggcagctgcttggttttgaggagaggcgatgtggagagctctttgggatggtggatggtgctcagagtttgcttgcagtgtgaacatttatatcttcagccacagttaggctcaccggaaaccagaagggtgttgtggagaagaaacctctgttttctgcataatttcaaaaatattaagaaaaaaattctacaaagttccaaaaagcaaaacttgaatttgcagcaagccaagtactatgttgaatcataatgaagcgatgtgtaggcattgtattcgctcttataagtaatctagagatggtttttaatggaggatgtgtgtaggttatatgcaaataccacaccattttatatgtaaagggagacttgagcatctgtagattttggaattgcagggggtcttggaaccaatcccctgtggatactgagggctgactgtatacactcagtaaagctgacttttcctctggagcaagctgcctcattatgtacgcactgccagggaggtgttccatgcatagtgtcaaagggctctctggtcagtttgcagtccaaatctgactatgttaagtccattttattagtaagccaatgttacatttttttttaaaacgctctgtctctgtggatgaaaagaacagactagtgacttagagttggaggtggggcatccaaattggcatttaaccagtgtgagtcctagagtagtgccagctgtgtgcccactgctggtacattaggggccagccatcatatgtaagaatactccctgagtcagggttgctcggtcagcagcttagaatataggggtttaaaatctgttgttttaataaaaattgcacatctagaaaaaaggaatgaggaagctagactaagtgtggtagagggaagtcttacatt

SEQ ID NO: 11613 - DNA, 1033 bp, Homo sapiens
gttccccccaataggaaaaagttaaacccttttttcaccttccatattttgttatgtttagaaaggtcttcctcctttgaatatgttttatagtttatgtttaactctttgcgctctctgtaatttgtgtaatatatgtgattgatagagctccaagttgagaaaattattatagagtattttgcctctaactgctgttacaaatgggacattttctttgattctatttatttttaaactagattttagcatataaatttatatttgactctgtgttactgaattctctgggactgtcccttctcactgataagaagtctacccacttctttccgattttttttaacctttcattttttccttttgtctaattgtgtctggtttttaaaaagcgatgtgaagtaatggtggtgccagtgcctcactgtttctaaagaccacatctggaatggctgtgacgtttcatcccgttgctttcggcttccatggacgtgactgcctggtttttcgttgattccccttgtctgtggcatcttgctgtggagtctgttcctgatgtttcactcggatatgtagttttctttgatcatgctctcagggttaggctttggtaatagaatgctggcttcatggagaatttggaagctttcctccttttcctaggctgtggaacagttaacttagccctggaggcagctggtccttaacaggtctggccaaagtcacttgttctttttttgcagggattgttgccccttgctggcttcctcaggctgctatttgttattttatctacttggattttctgtctcctggggattcgttttgataattcttattttcccagaaagccatttactcatctaagttttcagatttggagattttaaaaattcaagaaatagaaataatttctgaatagattatagtgactaaagaaactattaaaaaaaaaaaaaaacaggctgggtgcaatggcacatgcctgtaatcccggcactttaggaggctgaggtgggtagatcccttggcc

SEQ ID NO: 11614 - DNA, 1023 bp, Homo sapiens
catttggggctgggtgtggtggctcatgcctataatcccagcacttttggaggctgaggcggtagatcacttgaggtcaggagttcaagaccagcctggccaacatggcgaaaccccgtctctactaaaaatacaaaaattagccgggcgtggtggtgggtgcctgtagttccagctactcgggaggctgaggcatgagaattgcttgaacccgggaggcagaggttgcagtgagccgaggtcatgccactgtactctagcctgggtgacagagggagattccatcttaaaaaaaaaaaaaaagaaagaaagaaaaagaaaacgcagttggctttattctctactagaaggagttacaactctatctttcagaaagcccttactgaagatgaaacaaagaaaaataaagaattggagtccaacacgtgcagcttcaagttgaaagagaaacagttgtgttgggattaaaagccttactttaaaaagtctcttgcccgggtttggattcaaaattctctgcagtatgtttgttctggaacttgttccctttgccttaactgctcctctagatattacagagttgaaaactctgaaggggttggcactgcatgatatcctgacagagatacacttgtttgtgcatagaggtaacttacattatcccccagctgagaagctgtggagaaggtagcctgctttggggttaaggatggttaggacaggaggcttcattcttgaagcaaagaaactaatgaattgtaaatcagacccttcttgttagcagttctgtcttgccactgtttaaaattttgttccagagctgggtacggtggctcaagcctgtaatcctagcactttgggaggccaaagcaggcagatcacctgaggtcaggagttgaagaccagcctgggcaacatggtgaaaccccgtctctactaaaaatacaaaaaattagcctggcatggtggcgcacgcctgtaatcccagctacgtgggaggctgaggtgggagaatcatttgaa

SEQ ID NO: 11615 - DNA, 1051 bp, Homo sapiens
ttaaactatgccactgggtggcagaggctgtataaaacgcacttgttttcatgcaggagcggggcaagtaaggttgagcctgactgtaaacctagaactgcggaaggactgggacttttgtacaaatttcacatttattttacagcaatcatgctgcatttgtgttagtgttctttataataaaaaacaaagcagcctcctggctggctgtgttacaagtgactcttccttagacagctagaaagatgctgactttgtcaaacttgcatttatatgaaaaccttctgtctctaatatcacagaataaactttctttagatgctgttctttataaaatgtcaaattcttaaactgtcaaatggaaaaagtcactattccctttgttcatggaggactcacccccttaaggacagcggcaaagtatgaagctaaatatctgatggccaaccaggcctcaaaccacccagaggctcagcatctgctgtacctggaacttcaagataaccatgaaatgtaaacgttggccaatccattcccagctcttctgctgtactacttgttttatgtgtttattttttgaggcaagatcatgctctgtcagtcacccaggctggaataccgtgacacgatcgtggctcgctacagcctccatgtcccaggctcgagcagttctcccacctcagcctcctgagtagccggaaccacagaaccacaggtaaatgccaccacatcctcagccccctgagtagctggggctaccatgcacaccagcaccacactaagtttttttggctatttatttatttattttttaaataaagattgggtcttatctcactctgttgcccaggctgatcttgaactcctgggctcaagcagtcctcccacctcagcctcccaaagtgctgggattacaggcatgtgccgtcacacccagccctgcttgttttaaaaggggacttttttttttcttaatggaaaaaaatgaaacagagagccaaaagcttttaactgttgtttttttcttttcttcaatgaaagcctctcattt

SEQ ID NO: 11616 - DNA, 1039 bp, Homo sapiens
ataaaaggctggataatattctgttgtgtgtataaaccacattctgatcatcttttcatccatcagtggacagtcgggttgcttctgcttcttggctattgtgaatactgctgcattgaacatgggtgtgcaaatatttaaacaactttttaaaaaataactttgtttctggccgggtgcagtggctcacagctgtaatcccagcactttgggagggcgagatgggtggatcacttgaggtcaggagttttgccaacatggtgaaacctggtctctactaaaaatacaaaaacaaaacaaaacaaaacataactgggcgtggtggcacgtacctgtaatcctagctactcaggaggctgaggcaggagaattgcttgaacccaggaggctgaggttgtagtgagccgagatcatgccactgcactccacgcctaggcaacagagtgagactccgtctcaaaaaaaaaaaaaaaacccactttttaaaaaaataagagctcatggtacctatttgcatccagtacatcattgaagcttgtagaaagctgcttagttaaagtgaggttgggtcacttcgaagtagtcctccagttttctaagcaagtaaattttggaggtagaaagaaaatgttctcctttatcctagaggctcgactgtggtatggtgggcccgggtcattgatttgctttgtccttaattggttgctcctacctgacagaagtgaaatgggtgttctgatggggggtggtgggtggtgacttgagaaggtccgggagcctgaagtgggatgaatgaagagcacagaggctcgttgggaggcgaggataagggggtgcagaggccagatcccacaggccaggagaggctggaactaagggcttgggcttgacaccagttacagcaggggcctaacacattctattaggttgatgcaaaagtaattgcggtttttgccattaatgtgttaattgccattaaatgttaatttgcaccaaatacctgtctggaccctcggtgtcctccttgtaaatggtgtgg

SEQ ID NO: 11617 - DNA, 1050 bp, Homo sapiens
attttggggggtattttggtactgtgatggggtcatcaaattattaatctgaaaatagcaacccagaatgtaaaaaagaaaaaactggggggaaaaagaccaggtctacagtgatagagcaaagcatcaaagaatctttaagggaggtttaaaaaaaaaaaaaaaaaaaaagattggttgcctctgcctttgtgatcctgagtccagaatggtacacaatgtgattttatggtgatgtcactcacctagacaaccagaggctggcattgaggctaacctccaacacagtgcatctcagatgcctcagtaggcatcagtatgtcactctggtccctttaaagagcaatcctggaagaagcaggagggagggtggctttgctgttgttgggacatggcaatctagaccggtagcagcgctcgctgacagcttgggaggaaacctgagatctgtgttttttaaattgatcgttcttcatgggggtaagaaaagctggtctggagttgctgaatgttgcattaattgtgctgtttgcttgtagttgaataaaaatagaaacctgaatgaaggaactgagtccccggatgttttgttctattgggtataggtttcataagtgtgagaagtcaagtctcagggtgagtcgtctccgtgaccagcaagtaacagctgggacttgttctaggggccatatggagggtctgtgcctctacatgtgccattaacccacagcaggagcaaacagttcagatttgaggtttctaaaaaaaaaatcataaaatgtgaggccgagtcttattgcccaaaaagcacctttgcttcaagtggtccttttgacccaagaaggatgttctaaagaagatggctgaaaaccttcccccttggtgaagtctggcgcggacaccgtaacaatgcctaagaagtagcctgcacttcccgttctgatgtgttatccacagaggctcagtaccaaagaggtgcgcagggtaggagggtgagaaggtcacggtctcatgccatctgatgtaccgaaagaaaggaaaggaggtgtt

SEQ ID NO: 11618 - DNA, 1044 bp, Homo sapiens
ccctgtgtttaagtcgggatttttacagagggagctgtctccagacagctccatcaggaaccaagcaaaggccagatagcctgacagataggctagtggtattgtgtatatgggcgggacgtgtgtgtcattattatttgagttatgctgttgtttaggggtaaataacagtaaataattaataataataataataataataaaggagctgacgttcttagccttgtgtggttcttttaatgaggaactaaatgtaataccacctagatatacaacatcagttagcaatgctgtggcttaaagtaatgttgcgcggagccgcgatgcctaaaggagggagaaagggaggccacaaaggctgggcgaggcagtataggagccctgaggagatcgacgtacagctgcaggctgagaagcagaaggccagggaagaagaggagcaaaaagaaggtggagatggggctgcaggtgaccccaaaaaggagaagaaatctctagactcagatgagagtgaggatgaagaagatgactaccagcaaaaccgcaaaggcgttgaagggctcttcaacatcgagaaccccaaccaggtggcacagacaaccaaaaaggtcacacaactgtatctggatgggccaaaggagctttcgaggagagaacgagaagagattgagaagcagaaggcaaaagagcgttacatgaaaatgcacttggccgggaagacagagcaagccaaggctgacctggcccgctggccatcatccggaaacagcgggaggaggctgcccggaagaaggaagaggaaaggaaagcaaaagatgatgccacattgtcaggaaaacgaatgcagtcgctctccctgtataagtaaccgcgacccatgggaggagatgccggggacctgggccgcgctgccaggacctctgctgtgtctcgcccaccctgtgccctggcgccgccgcaacagcccctcgtggccaggagccccccatggcctggggcctcctcttcattttggcacagaaattgtttgggggatgtgggggg

SEQ ID NO: 11619 - DNA, 1035 bp, Homo sapiens
tcctggtgggagagggaggagtgagctccctgggttccagtatttacttggtatacctgagtttgggggtacccttttttgtgacttttcaaaacagtgaattactgtcaccttgatggacaagtttcaataaaactttgtaaaaataattggacatgtgcctggaggagctctgattttattcagtcccttggagaagagactggaactcttcgagagttgcgtttcagtaccgttcttgtggctctgagcggacagggctactccagctgcccaggcctgagaaccagtcctgtgactcacacccattcacacagtttggaaccttaagggacccctaaaactgagcccctctgaacagctcaagtcacaaggggaagctgaagaggggtaacagcagaggctcctggcttcggccagttgttggtgtccccaggccagagggtttgtttccttttgctcctaaacaagcccggtgggacagcctgggatcgtgaccctggcgtgtgagagagcaggacgttgtggagtcagagctgttttcatccactaaaagaggccgtgtccctcctccaaaaaggtggaaggttatgggtgttcctttaagccttctcaggtatcaggaaacattttaaatttagcagaaaagcatgctaatgagctctacccactggtgcagaaaacccaagctgaaaatgctatgtaaaataagactggtttactggagccagtcaccccatgagttctccaagccctggggccacaggggacttccaggtgaggtcactgctgagatgatggaggagacacaaaacaagaggacatggtcagagacaacacatctctgtgcgtattcaaaggatttcattttctttaaaaagcacattatagtcggaaagcctgcccaccaagtgaaagcctccatacccaagaagctaaaggttaatggtgattttacaaaggtggaaaaggagaccttgttttgcccaaatcacaggggcaaagccatatgtcaaatcgtgtcctatgaccaag

SEQ ID NO: 11620 - DNA, 1053 bp, Homo sapiens
tgggggctcagaaggttcagtgggttcacaggggagcagaggctcctgagggcttactcagacaggaagcagccccccaaaacatacttccccttctcctcccacagaaacagaacagataaagttcagaattctaggcccaaaagggtgcaacacccttcaaccagtttcagtgaagagcttgctggcctgggaagtaaagaaggggtttccaaatacagcagtttataaaacagtcctggtgagctatgaagtgaaagagggggagtcacagagctgctcccagttcacctgcttgtgctaagaaacaataaaatacaaattgcttccccaccccaaccctcagtacaaagcaaacttcacaccagagccaccatcagtgacaggcccagtggcggtggatgaggaagagaatacaaaagggaacgtctttaaaatctcttcaaaatcattttgtatagagaagtaaaagcaactcaggcgatatgaattcaaacctcagtgtagaaatctatcaaagtcggtacagtgtccaggcacgccgtcccggagacggaggaagtgactagaaaacattattgctggagaggcttttctcagtagaacaagagcaggtataaaaggggagggcgggtctaaaaggcaggggcagtcgccaggcctagggcactggaagggtaggaggagcacagagaaccttccatggcccctttggttctctgcctttggatggatggatttatgctggcattgtctggagggagccgggtgtcccccaataatcacagaacaaagacaattaggtcgggggaggaataaggataaaaagagaccccaacagaccctgcctgcccttccctgccccccggctgcactgctgaaatatgaggaagagatggctccagtgtggggtgctggccaggccagttcgtggggacgtacatgggctggggtggagcccccagcctctacccctggggaggatggagagtgggcagcctagggagagctacaggagggaggagggggcccagaggctctggcaggggtgaa

SEQ ID NO: 11621 - DNA, 1035 bp, Homo sapiens
acagactttatattctagtgggggagacagacaaaataataatataacgacgaaggtgcaatgttatgtgctatgagaaaacgcagtcggaggatggcgaggaaggggaacggaattttagatagggcggtctgggatcagaacctccagatgcccgtccatggactccaacgaagggagcgattccaggtaccagggcaccctgcacaaacctctcttgagcttccgcctcgcccaggtggggacggtagggagaccggagggcacacgcatgcgcacgaaggaaacggtaaagcctgaagggaggtgcagagcgcatgctctctcttgcccgagatgccgaggattttgacaaggactccgtcgtcccggatgatagtgctcaggttaatgccagtgggagggcggcgcccaatagtaacttcctttggaggttgtagtaccgcccccagagccaattttccacttccgcttccggcgctgcggcagtccagatcaaaaatggcggtagttggtgtgtcctcggtttctcggctgctgggtcggtcccgcccacagctggggcggcctatgtcgagtggcgcccatggcgaagagggctcaggtactggggccggggtcgacgggtcgagcctcagccccactcgggcgagacagggagggactgtgaccttggcccgaggccttgcgggagggaaagtgagacccgggcccgccccataccggcgctgaacgtttgtggcttctccgcagctcgcatgtggaagactctcaccttcttcgtcgcgctccccggggtggcagtcagcatgctgaatgtgtacctgaagtcgcaccacggagagcacgagagacccgagttcatcgcctacccccatctccgcatcaggaccaaggtacgcccttgtacatctcttcaagcgtccgttctcttttcgttatgtgtgccttagtgcaagttcttcattctctgaaggcatgggtgccaggcgtgtacagcttgtttatcctcacaaacagaaaatgtattttctt

SEQ ID NO: 11622 - DNA, 1031 bp, Homo sapiens
cctttcaaactcagatctcttatttaataacctggtcccagatccattcctctgtcgaagaggaagtcatccttcagtggctattcattgtggggttaagagcgcagactatgaattcagtctttttgggtcccagtttgccagaccttgagtgagtgccccgagtttacttacttgtaaaggtaggtggaggtaatataattaaataaacttaaaaaactaattaaaaacaaaacaaatgaactaaggtcttaggatatctggcgtctattttgcgccaaatacacataatgtctattgttgtgtgttggactataggattgtcctttaacagggaaggttttatttctgtaatcaagtctgtcaatattatgaccatgttgataatagctacctttaattgagggcttaccatgtgccaagtactaggtgaagtttttacctctgttttcactgtgccagtcactgacttgtctaccagggtgaaattgttcatatttaaagaaggaataaactgagcaggtaggatgttaggagttggcagaggctagagtcccggtgttcttcattttatttcgaagtttgtactaatctctgctctcttttgtatttcagtcacattagcagtaataggaaggtgttttcagcgacagtggggatgttgtggcagagagggaaatatttgaagtccctaaatgtggaggtccagtttaaaacttgtcaagattaaaaaaactgtttagagtgagaccgggcgcggtggctcatgcctgtaatccgaacactttgggaggctgaggtgggaggatagcttgagcccaggagtttcacaccagcttgggcaagatagtaagaccctcgtctccataagaaaaaaaaaaaattagccgagtgtggtggcacacacctgtaaccctacctacttggaagggtaaggtgggaggatcgcttaagctcaaggaagttgaggctgcggtgagctatatcacgatactgcataccatccagcctgggtaacagagacccccatc

SEQ ID NO: 11623 - DNA, 1072 bp, Homo sapiens
gagaggcctaaaactttgacagtccctaatcagttcttcaagcagtgaaccttctggtggcattttgtttcagcgcatttgtagccatgaagtgccatcttgcccaatatgcctctatccacctactgcagccaagataacccgttgtggacacatcttctgctgggcatgcatcctgcactatctttcactgagtgagaagacgtggagtaaatgtcccatctgttacagttctgtgcataagaaggatctcaagaggtgagattgagacatttactcagttagatcccaatctcttcactccttgccctgctacatatgagtgtccatgtttcagtgttgttgccacagagtcacatcagtatgttgttggtgataccattacgatgcagctgatgaagagggagaaaggggtgttggtggctttgcccaaatccaaatggatgaatgtagaccatcccattcatctaggaggtgagttctttaaattttggggacaaataatcctgggtacattctttaaggtgattgaatatatctaagcatcagaaagtgaagcctttgggcagggcacatctggcatgttcatattagtcataggattccagtaggttagggtggggtttgtagagagtagattaattattggtttcaagtttgtttaatctatacatcctaatttttcattttacaaggttttattacatagtgtctttcactgtgcccaatcttagaggttctgtggtcagccagtcttggtgcctgtcgtcaagaaactcagtagtccgatagaagagacagactggtagactggccattaggataaagagtgtgataagtgctcacaatgaatgccagagatgtattccctgtgtttcatgcagaaatgagcatttgattaaaatagcatttcagtctctggggaaaagatagatttctcaataaatggtattgaaacaattgattctccctaaggaaaaaataaaattagattcctatttcataccattcatgaaattaattccagatagattgaagaagtaaatgtaaaaaatccaaaagttttaacctt

SEQ ID NO: 11624 - DNA, 1787 bp, Homo sapiens
gcagatcacttgagctcaggagttcaagaccaggctggacaacatggtgaaacctcatctctttaaaaattcaaaaaattagctaggtgtggtggcacgtgcctgtggtcccggctactcgggaggctgaggtgggaggatcgcttgagcctgggaggcagaggatgcagtgaacagagatcgtaccactacactccagcctgggtgacagagtgagaccccatctcaaaaaaaaaaaaaaaaaattgaattctgtaaatgggtttacaagggttatctttcctttgcagacccagaagtccacattcccctcgagaatctacagcagtttcctgccttcaattcttatacctgctcctctgattctgctttgggtcccaccagcaccgagggccatggggccctctccatttctcctctcagcagaagtccaggttcccatgcaggtaaacaggtgaaatttaatgaattcacccatcagttagaccttatgcaaagctttggtgtctgagtttacaaccccggcccactcagcatggtgtggacttcaggggcataaccttactttggtagtcctgaggtacatcaaattcttttattcatctttcccacttgctatactgactgctttaccctgccagcttctaagcacctcaaggagctctttaggcaggatagttgaaaatggagtcttccctttgacccacctatttttgtttctagtttttgtttgagatactcccctgtatgcctaaacatctttgtacatgtctctttattgtagcatcgttttaatagctcaaaaaaaaaaaacagtttagaaagcctaccaataagaaaatgactaaattatagtatttatactgtaaaatgtttcacaccagaaggccgggcgtggtggcttatgcctgtaatcccagcactttgggaggccaaggcgggtggatcacgaggtcaggaattcaagaccagcctgaccaacacagtgaaaccctatctctactgaaaatacaaaaattagcagggcatggtggcaggcgcctgtagtcccagctacttgggaggctgaggcaacagaattgcttgaacctgggaggcggaggtctcagtgagacaaggttgcgtcactgcattccagcctgggcgacagagcgagactttgtctcaaaaaaaaaaaaaaaaaatcacacctgttaaagaagggaatgtaattcttctattcacgtactaatgggaagataaaagtaatttgtagaacaagaataaatgttcgtgggttttaaaaaaacaccaccaccaccacaaaactaaagcatttcattatgggtgtgtgtgtgtgtgtgtgtgtatgtatatatatatatgtaaatgtatagaaaaacttctgttagaaggcaggggaggaaataaaaaaatattaaatgtatagaaaagaattgaaggccaggcacggtggctcacacctgtaatctcagcactttgggaggccaaggtgggcagattcccttgagctcaggagttcaagaccaaccaaattttgtctctacaaaaaatacgaaatttagccaggtgtggtagtgtgtacctgtagtcccagctacttgggaggctgaggtggggagatggcttgagcctaggaggcaaaggttgcagtgagcccagattgggccactgcactctagcctgggcaacacagccagaccctctcaaaaaaaaaaagaaaaatactgagacagatgtgttccaaattggtagtagtgttacattctaaggaatgagactggatt

SEQ ID NO: 11625 - DNA, 1069 bp, Homo sapiens
agacactctggatacggttttgcctatcctgcatgcaatgcttccgccaagactaccatccatggactcacagagtgccttatccaccgtcatggtattccacacagcattacctctgaccacggcactcactttgcagctaaagaagtgtggtagtgggctcatgctcatggaattcactggtcttaccatgttcctcattatcccgaagcagctggattgatagaacagtggaatggccttttgaagtcacaattacagtgccaactaggtgacaatagtttgcaggcctggggcaaagttctccagaagaccacgtatgctctgaatcagtgtccaatatatggtactgtttccctcatagccaggattaatgggtccaggggtggaagtggaagtggcaccaatcaccgacacccctagtgacccactagcaaaatttttgcttcttgttcccgcaacattatgttctgctagcctagaggtcttagttccagagggaggaacactgccaccaggagacacaacaatgattccattaaagtggaagttaagattgtcacctggatactttgggctcctcctgcctctaagtcaacgggctaagaagaaagttacagtattggctggggcgactgactcagactatcaagatgaaatcagtctactgctccacaatggaggtaaggaagagtatgcgtgaaatacaggagatcccagagggcatctcttagtattcccgtgccctgtgattaaggtcaatgggaaactacaacaacccaatccaggcaggactgcaaatggcccagaccctacaggaatgaaggtttgggtcactccaccaggtaaaaaaaaccacaacccactgaggtgcttgctgaaggcaaagggaatacagtttgggtagtagaagaaggtagtcataatacaactaccaccacgtgactggtggcagaaacaagaactgtaattgcattgaatattgaatatcctccttattttgttaagaatatgtttgtgcctgtatacacttgtactaagaaaatgtcttcattttatttcctttctt

SEQ ID NO: 11626 - DNA, 1050 bp, Homo sapiens
ccctgctggaaaaagctgggtgcaggaaacagggacacttgcacgcggggaatctggctggggctgtaggtctcaaaccggacatctgaggcgtgagatgaattcatatcaaagccgaccctggagggacgaggaagagccagtcatctaaaaagctccagctgtgggacctcgaagagcgcttcgtaaagggcttcttctctgcccggcaccccaaggaagctggggagaggtctttgctgtggatgaggcagggggcgaggaggaggaggttcagagaccttttgctcatgccctctctgcctgcgctgcctccgtcatgctcccctcggggccatctcctggtttccttcgggtcagagaaattgcacacagagcagaaggatctgatctgactgttggctcatctgcactgccggcccccgagcctcgtcccatttcagtgacaaggcaagtgtgaaaaatggagcatgatggaggcgtcaccagacctcccaggctctcgactggagccgcagctctcaatgcagctggaattgccaggggcagtgagtgcttgtccagctcactgctctttggaaggggcattcatctccctgagcgcttgtgtgtgcatgcatgtgtgtgtgtgtttgtgcgcgcgtgtgtgtgtgcatgcacgtttgtgtgtgtgtgtgtgcgcgcgcgcacacacacaaggctgggagctgtgcggcaggcaccctggcttcgggaacccaaactagccagcttccctttctgggcctgctggcctaattcccagccgcagctgccattctgggcccccctccctgaggccatctccctgcagatttggcagcggggaaaggaggggccgagagaaggggagagaaccagagacaggactgagcgctaatctgatgtagatgatccggcagccttctccagcttggttcccctctgccatcagctctccaggtgactttccctgtgccctgcactctccccttctgctttcatctccttaagaaagtgcccagaaagttaaacccacacacaaacacacac

SEQ ID NO: 11627 - DNA, 1050 bp, Homo sapiens
tggtgagtccatatccacgagcaaaataatgatgatgataataataataataatatcagatacattgttttgagcacttactaggtgagcactgtgcctagtgtgttggcggattgcctcatttaagcctcagagcagctctaagaggtaggtgcttttatcatccccattttacagatgagaaaactgacttgggctgggcgcagcggctcacgcctgtaatcccagcactttgggaggccgaggtaggtggatcacttgaggtcaggagtttgagaccaccctggccaacatggtgaaaccccatctctactaaaatacaaaaattagctaggcatggtggcgggtgcctgtaatcccagctactcaagaggctgaggcaggagaatcgcttgaacccaggaggcagaggttgcagtgagccaaggtcgcgccatggcactccagcctgggtgacagagtaagactccaactcaaaaaagaaagaaagaaagaaaactggagtgcagaggtcacatgctcgaggtaacagcttgttggtggtagaggtaggattcacacttggatagcctgactcaagagcctcttgtgctcctaatgacaactctgtatacgtggcactgtccggtagaactttctacagtgatggaaatattctaaattccgtgctgtccgatacagtagccactagccacatgtggctattgaccacttgaaatgtggctagtgcaactaaggaactgaattatggattttatgttattcttactcaaatttacatagccacatgtggctagcggctagtgaattggccagctttctacaagtagctaaatagttcaaagagaggagaggactaatgaggatgttatagaggtaaacatttgtaggttgcatttattgaatgccacatgctaaacactttaatatcttgtctcactgaatgcacactaaggccctgtgaggtgggtactggtattaacccattttacagatgaggagactgtggctcaaacagcagagtgacctgcctgaggaagtagatctgag

SEQ ID NO: 11628 - DNA, 1001 bp, Homo sapiens
ccaaggttgggagagggccagggccaagagaggttttctgctcttctgatactgacccgaggtaagtaactttttacttttatcctctctcattccttgtcagtttgtgaaatgtgaaaggtgattcccctaggacttggacatcttaggcagattgccttgccctgcaggatgctccagccttgtggacagagtggcatggcttcactgctttgcaggcacctccttcattgtcatttattcattcagcaaactgtatgagtggcgactatgtgccaggtcccgtgctaggcactggaggtgcagtggtgactttttttttctgctgttggtttatctgagtgaatgttcaagtaagtaggtgaggtggagttttgtgagtctgtgggaaggaaggaaattagcatcacacctttcttttatgagcctgtttttgtttacagctttggaactttttgaatgaaaattataaaaaaaacacacaacaactaaagctggaattttattcgtaaggacaatgaagaatgactttccaaagcagatatcctgtttgttttagactctgggcttttctgaatgagagaaaacattctttgaacttcatcttgtatggagttcctggccatcccccttgttttaggaggtttctctgaagccctccctcttggggaaccaggcagctgcaacacagcactttcttctggtaatgagttagacttgttctccgtacagtcagggggaaaaagtcattttaatgtgcttttagaaagttccgctctgaggtttacaggggctgttggcctgattagtgtttagtttctttcattttactcttccatagtaatggctgtatgattcctgcctttgttggagctctgtttggagccaggtgcagagtgggtggccccttttatggagagggttattagcattgccctggaaatgcctctggctgttctggggtctttgcttttcttttgtgtcttgcctctgatgtgctt

SEQ ID NO: 11629 - DNA, 1050 bp, Homo sapiens
cagccctcattcaccacctggtcccagacgtgcttcagtcctcgtcctctctttgtggctggctcccagccttctctttcctcttgaggatacttagggtaaactggatccttcctgctcaaggatcctcatttgtatacctagtggaaaggactctgaactcagaggagtcactgttcctttttttaggttagaaattaacagcagggaaatgccatcttattacctgagacgaccagcactgggagttaggtacggtctgaagttatgtctagataagacttcagacgtcctgggattgaaagaatgtgtgtgaaggggtagaatttgtgcggtaaagacttaaaaaaaaaagtagggagattaaaaaaaaagaaagaaaatgcttccttatctggaagcctttctggattaatccagtgatggtcccacctttagtgtttgagctttgtcattgcttgtctccctggcatgtgccagttatagactgtccagcatccaagacgtttcggttatgtcgggtcctcagatcgcctctgacttgttaccacaacaaatcattttgatttcagtgcctgttggggacttgatttcttctcagttttgtttgtttgtttgtttccttaatctggctcatttgaaatttcttctccctctcaaccatcccactaagttatagccaagaagggaaggagacacggggatttggggttctctgcttgaatgtcttctcctttaccacctcaccttgttggtacctccctccctggatctctgagccagcagccaggaggacctgacccagcagttctttactggcccctttgtagggccttgctgccagggggcagggatgctttccagcctgcagcaacagaacacttgaccttaaaagtctcttctggtctttggattagaaaaggcttatgttagcatagcttaagagcaacctcagagatttgagccctactaagtgactgaccactgtttagagtgtctggtatctgatgttcatttattcccatgttcttgtgtgtcacagttcagcca

SEQ ID NO: 11630 - DNA, 1016 bp, Homo sapiens
tcagaaggaaaccctgactcctggggccatttcctaatggtactgtaagccaagcagctttgcttctgcctctgtttccaagcccacccttttcccctgagctcagggttagggatgggcgctttcctctctggttgtgaacgaaaggaaggaacatctttctatggctaacaaaaactaaaggggaagtgaggaaacaggaagaagtatggtgggggctggggtagactcccctggagccaagcctatccagctaacaagagctccctggggctggtcacagctggctcatgatgctgaacttgaaagtttttttgtttttgtttttgttttgtggctcctccaagatataggtacatgaagtttaggttaaaggggtgggattctttatttttatttttgtattgtatgtgtcaagaattactctgttgttcaccttttgctttttgcactgtttgttctcttatctgtattttgagcttagtgctaggactgagaggctgcaccatagggaatgtatgggagatggtgaggggtgccagtgaggggtgcgtggaggagaggcctgggctcctctactggatctacactctgtcccaggtttttagatcccactgagcccagctgactgaaaacaaggacagtcagggtgaaacttcttttgccagaagtgtggcctgagttgaatttctgggaggatgacgcagatgtctgctgcagagctgggctgagagttctgcagtctagctctgacttaggtcaggggcctgttggtctctcattggacgtttttgggtctcactcatgcttactgaaacattgtgccaagaaactctgtgggatttgtgtcccttaaaccagactcacttttctgaaaaatctccattgttgaggagaggctgctcaatcgacaccccgagttctcatgactgggaagatagttttcttcaggtgtcaatggcgttagactcccaggaagactagccctgcccacagggccacctgttggtttgaga

SEQ ID NO: 11631 - DNA, 1214 bp, Homo sapiens
ggaaaggcctggatatggtttctaaaatctcagctgagaacttcagaaaacagcagcagtattttccttttcctagtgctaaaatccctttccctagaaattggctcaccttgggaaacccagggaaagaatcagcaggttctctgccctccctaggggttggggaaggacccaccccggtcagcacagtgccttttcctctcctgctctgagccagggtggggcattccctctagattcaggtttgggcaggggtcctatagtccctgccatggggctgcttccctgtcccttccctcccctttgctggcctactctggcataattcaagtgtcttcttgccttggggatccttagtggcatcaaatggcaacatggaatattgtcctccatgcccctccagaaggacctaggagagtaggtgagctttccaaagtgagagacgaatctttctttctttttttttttaaagggcaggatgggtatgctttgggctttctccttctgtggccccggaggaaggagagactgaggcaaggcaaagtgatagtacacggaagcagaaccggaaacacccaggaactgttcagaaatctcagaagaaatctgcttctcttcgatggaaagatataattaacgatcaaagagctctaagaaaattgcaaagaagccttaatgttcaagctttagaaagatcagagcaatttttctctttcagtccaaactaagactctctgtatttaaatctctctggggcaagagggctagatttcctcattttgttatgagactagattggtaccagtagatcagctgcctagcgagggcaggtttcttctttgcatctgtgtggcttgcttccagtctggcctgtcctttccagctgccttttgtctagcctgctatggggggccagattatcttgataagagcaggtgatttggggactagctgggttggcaggaaaagagcaggatggatctcttgggacaggttcccccaggagtataaacacaaggagccaggattgtgctggcagccaaggaaacagtagtgcctgtttgagttggcagagagggccttggcacctcttgcatccaggcagtcttgtgagatgggggcacatagcactggggaaagcagaactccattctcacctctattttgagcttcagtgctttatttcagtatgaggaaaaacaacaacaaactga

SEQ ID NO: 11632 - DNA, 1041 bp, Homo sapiens
ctcgtgaattaagaatgatttcagagtttcagaaatgcgtttcctgcacaaaaggcaaccatcctaagctttttcgttgataggaggatgggtgggaagaaaaatgttgcccagtccctgccctgggtgatctccctttttctgttctctgccaagccagtccctgacttgacgtcttttctcttgctgctgttttccctgcaggagtgtgcactcacctagttaggcctatcttggcctgcccatcactcctggcgtgcagtctcctaaccctgtggcagcagcaacattccctggatggatcgaaggctgccatggtgtctgctgagctgctatagcaggcagcccagggctgttcaggtgcacctcaggttgccgattgcagctctagtaatttggggatggaaatttggggggagtaggccttggtccaccctgtgcgaaagggaattcccatttcctaaaagagttttaatttgattctagatatttggatgcccccgtttcccaatactgtttgggttgagactgtccttaccagacctgaacgtatctttagacattcttgttagttttattgaaacagtgtgaaaaagcttcttttcttctgaaccagttttcatttggggctctgaaagtacagatgctcagcacctggtcttggtaacctcatgccctctcctgccatccaagtgagttagggtattctgtgcctggccctaagcaggattctcagtgggcactcagatcctatctgggggcttgggattgttgctcattgtccaaacccacctctgcagcttcttagagtctggcaacctctttgttactcttcttaacgtctcgttcattctatccagcagattatttgagtaccctctaagagtccaaagccaatgttagcctttttagcagttacagaataatcagtagttgtcaagtttgtcgtcttaataaagagacaacttgtaaaacacgaaaacaactaactcaggcaataaaagatcaagtatcaaaatgagctgtggagaagatgctatc

SEQ ID NO: 11633 - DNA, 1026 bp, Homo sapiens
accactatctgattctgtctctattggaaaacttggatacttttaaaatgaaatttgaacgttcatatttacagtcacaaattctcaagagtctggtttagatgctctgtggcacctgaagcaattattggcctttgctcacaaacacaactcacttatttctcccttttctcctgcttcttcatcgtttcttccacccagggctggttcccaggtgggatgacggaaaggtgaggaagcccttagagcatttgccaatgggagccattcatttgactttaaagtactgagaatttagaggcgttcttttaaatgcattatttaaaaagaaaggtaacacattaaggactttgctgcatcttttgattggctttcttctaggaagtagtgaccgaggtttccactttcctccaagaggaagagacagaagttttggcaaataggtcaatgctgggaacagatgcctgcctggctgagtgctgggaaagaaaggcagttggagggatgtgtgggtgcctgggagggcgtgggtggtgcccaggaggctatgggaatcagaatcacacttgcacaagagaagacccttatgggacaagtaaaatcagcatagtttcttgggcggggcaaaggtgtcctgatgaggatgctaggggtcaaatatgtgtctgggttctgccccaatcgggaatgagacacagtactgaagtggaacgggggtagcatctccacccaccttcacagcctctggggaaaagaaagctttccttgcagcccaactccaggggcctaaatattgagcaccaacacaagacaggtccttgagcttctcggagcgagtcggggaagcagataatttcagatgcaaagtgccttgaataaacagaacgaaagatagagagccagagggggagaaacggcttggtgtggtcagggcaggcatccatgagacctaaacgaagagggggcattccagacaaaaggaacagtgatcacagaggccccgagtcaggaaccagctaagggtct

SEQ ID NO: 11634 - DNA, 1046 bp, Homo sapiens
tcctcacctcaagtgatccacctgcctcggcctcccaaagtgccggaattacaggtgtgagccaccgcacccagccatatatttttaaatggtcttactgagatgcaattcacatgccataccgttcacacatttgaagtgcagaattcatagttttcactatattcacagataagtgcaggcttcaccacagtcgattttagaacatttccgtcatctcaaaaagaaaccctgcacccttctgtcatcccccggcccctggcaacagtggtctactttctgtctctgcagatgtgcctcttctgagcatttcatataatcaatatgtggccttttgcgtctggctccttccccttagcctgatgttttcaagcttcatccatgtcgtagcctgtgtcagtacctcgtctctttttatggccaaatcatattctgctgtgttgacagacgacgttttgttcatctctttatctgtgtgacgaacgagtggttctttttgttgttgttgttgttgttgaagactgtgtgcacagaatcaatgtttctttgaaaaaataaataaatttaaaaagccctaggtcaagagattgagaccatcatggccaacttggtgaaaccccgtctctactaaaaaatccaaaaattagctgggcatggtggtgtgcgcctgtagtcccagctactcgggaggctgaggcagaagaattgcttgaactggggaggtggaggttgcagtgagccaagattggtgcccctacactccagcctggcaacagagggagactccatctcaaaaaaaaaaaaaaaaaaagtccctgcactgatgctgtgttggggctggcttagtcccctcctgcaatgctggctggtcacattcttactgttagatgttggaggtcagggtcccttgagggaggcaggcaggatgtaccaggtgggatgttgagagcaaactgttcaggttcaggagaggacactggtgctggaggaggaggtctccctgtgcccctgtacctcgtgggccccgcatcctcctgcttgcacag

SEQ ID NO: 11635 - DNA, 1034 bp, Homo sapiens
gggctaaattaagtgtttttcttcattttctttctggggaacaaagaggaaattcccttccttgtatagaaacgtgaggaatgggacaaaattgtccccctccaaaattggtatctacacagagaatccatctgttttcccaaaataagtccttctattccctttaccagagctgtgtagttgaaaaaaaaattttcagcctagaattttaatgctcatactcattaacatggtttgaaaaattgtattcttccctaattcattgtaaaactatccctgatacaaaggtcataatctctgacagtgctgcttttaaaaaggggtgtcatttgagatttttggttttctttaccaagaaaacatattttgaactttctaaatagcatgtaaaattttataatgttacattgtctgtgaagagataataggaattttttacacagttacttgtcagtcataccatggtggaaagaggagcaggagaaaaagaagtttttgtccatgaggaactttcactgtagtccaggaggcaacatcagacatgaattagaagggggataaaagctaagagagctgttggtttagtagctacattagtaggaagctaaacttgtaaaactgcacttctgttaaccctggaatgaagagaagtttatcctgggagtactttctgcagttgaggtatttttttccccaaaaaatgtaacgtgcaaactaaattttttagaacaaagtttttccagttttaagagtgcatactctaaagaactgtggatgaatcctttacttaaaagaacattaactttattattattaattttttttgagatggagtctcgctctgtcacccaggctggagtgcagtggcgcaatcttggctcactgcaaactccgcctcctgggttcaagcgattctcctgcctcagcctcccgactagctgggactacaggcacgtgccaccatgcccaactaatctttttttttttttttttttttttttttgagatggagtcccgctctgttgcccaggctg

SEQ ID NO: 11636 - DNA, 1081 bp, Homo sapiens
agccattttccatctagaaaaatacttaattggagggattatattactgctcaagttttatagacattgtttctcatgttcaggcatcctttctcctgaactttgacctgtttgtatcattttattttctattatgtttatttccaaaagcaagaaatttgttagtctgtagttttgttcacaaatgatttactgtaactatgattcagattcaagtttcaaaaaagtatcccgtaccttaactttcaaatgaataaatgaatgcaataaattaactactctttagagattcaacatcaaatacttagctaacagttattttcactaagatggaaagtcattcagagacccatcatattggtaggcctccttgctctctttgatctttagtttagtcttctgaaatacttaaggaaaaaaaatgttagcttgcaggaacaatgcagcgagcagaaacgaccacatcttagtgccctctttaagcttctctagtggcaaggctttgattgtgattaggctgtgtagtttacagattactgtattagtgggtcctgtattttcttggattcaccttgagagatcagttgcctttctctttccctgtcagtctgttatgctttttgtctcctgctctttaaatggaggaaattgttcatgtaggaaaagaccaggaagtgtgattctgctttctgctctgtgtggttcaagctctgttttgttaattacatgtttataccaaggggtggaaaggttttaattcattaacacaagagtgtgtttttcttaaagtcctatattagaacttctgtgaatccagactgccttggcaatgaatattttgattttcatggcttttgaaacatgaaaatacctctggaaatagtctggtgccactggggacttcactaagaactaaaattaaattttagtagaaggcagaaagaaaactcatgctttcataatggtttatatcttgctgtcatcaaatgcttttctttcttcagcatgtttgctgtgactgcaagaaggatttttgctccgtttgttcagtcttacaagaaaatctccgtagatgttctac

SEQ ID NO: 11637 - DNA, 1050 bp, Homo sapiens
ggaattagattgtctaagtacgctgtggtaggactgagatctttcaaatcagatgcccctgatgcttgggctgacccatcagagctttagcttttttctgtctgcatcttacaggctccagttaaactagccatttgcaggtactttgataatgacacagtgctgtcccatatccttaatggctttggcattccattatgggaccttcctgagagagttaatactctggttagattttataactttacacacacacaggaatttgtgttttgagctaactttatggaaggtaggttcttcatgcaattttgtagggcccaactttttggaagggtcagcagcattctgaatccaaagatgtgcattatgctggctttctggtcatcatggggagcatcaatgacaaggttttctctagtgataaatacagattgattcctgacctaatcagatacgttgtataagtgtaggtacaaagtgaaatcacttcagcaaacacagaagatgatgatgacgacgatgatgaggatgatgatgatgaagaagaaaacgcagaggatcgggtgaggccacctataaaatttggtttccctgacatgtcagcctgacaggaagggacagtgccctgtggacattcgctagattagtacaggatgtttcttctggtttgaatgtaggacagtatactgaaacacttctaggactgctgagatggctgggagaatattcagggccagtgatgagtttagagtggggagggtctggacttatgggaccagggctaatggatgctctgtggtttcagaaccccgggctctccaaggagagagtgagagcttcactgtctgacttgtcaagccttgatgatgtggaaggaatgagcgtgcgccagctgaaggaaattctggctcggaattttgtcaactattctggctgttgtgaaaaatgggaactggtagagaaagtaaaccggttatacaaagagaatgaagaaaaccaaaagtcctgtaggtttatcttttcattttttccctgtagtatttttcctta

SEQ ID NO: 11638 - DNA, 1057 bp, Homo sapiens
tatatatagcctggtaggtgagttaaaacaaattctggaaagcactctaaggctgtgctgtttgatgggatacattagctacatacagctacttaaatttaattaaaataaaatgtaaaattcagctccttaacccagtacctacatttgaaggggctagaagtgacagcactgaatggtgcagatacagaatatccctatcattggctgggcgctgtgggtcacacctgtaatcccagcattttgggatgctgaggcaggtggatcacctgaggtcaggagttcaagaccagcctggccaacaggatgaaacccccgtctctattaaaaatacaaaaattggacaagcgtggtggtgcacacctgtaatcccagcaactcgggaggctgaggcaggagaattgcttgaacccaggaggcagagtttgcaatgagctgattgcaccactgcactcaagcctgggtgacagagggggattctgtctcaaaaaaaaaaaaagaatatcttgaataactctatcatcttctgtgggacagccctgaagggaggcttagcatagtgggcaaccctgtgggctctggattcctgtaagctctgagttcgaatcctatcattatttcctagctataaaatttggccaagcaagttaacctgtctttgagcctcagccataaaggtggggaattacagccccttatggagatttggcaaggattcaaaggtactgcaaatgtgaggggctttgcacaaagtcatagtaatattataaaaaatctggagtgaagccaggcgcagtggctcatgcctataatcccagcaatttgggaggccaaggcggacagatcacctgtgctcaggagttcgagaccagcttgggcaacatgataaaaccctatctctactaaaaatacaaaaattagctgggtgtggtggcgtgcgcctgtagtcccagctactcaggaggctgaggcacaagaaccgcttgaacccaggaggcagaggttgcagtgagccaagatcattcactgcactccagcctgggtgacatcccgagac

SEQ ID NO: 11639 - DNA, 1050 bp, Homo sapiens
cccgcaactctgctgcccgcggtgcagcgccttgcccttcctgagccccccggcccgggcggtggggacagtcagggcctagggagtgccccggagaggccctgggggcggacgggaggcatggaccagccccctcccatcacccggcgcttcagctcttcgtccacgtggggcgccgggtcgcagccccctcttccgccgccctcccactggctctctgctccacgcacccccttcgctgcagaaagttggtctgtggcctctgaggcaagttccaggcgtgttcatctgtgggggtggttcaaagagaacagcccagcccccacctctgcagggtctccccagatctcaccccgccccctcccatctgcttttggtagctcagctcccaccccgtgctctggcggggcagcactatcctgcagctctgttttgggaggtgtacttaagagctgttcaccttgaacctctaggttgtgcttggggattagggacccctatttcctgtctttgggggctctgacgctgctgcaggctgattttggcgtggagagcatctgtcagttcggacagctgagtagcctcacccagtgataggggaaactcccagctctatccttctggcccggagccttacacggggtggagtgagggcgggtgtaaggcgggggtcccctgagagaatggcattgctgctgggtgtggggagcggtcctggcagcagttgttcctgctaagaggttcagagaggccccagctacctaccgtgttgactagagacgcctcaggaaaccttggggttgaccaagagggactcggtgactatttttgaagacagggctgttccctctccagtcacgggattgtttttcggggggttggctttgcctgaaattacattgcacactatcaccccagtcctctcatttggagcagtgacattgtccctgtccatgtacctcttgtctgcagttcagttggcctcctacagtgtgcagaggggagaggaggttgccaagggtgtctctgatgggtctttctagacacgtg

SEQ ID NO: 11640 - DNA, 1045 bp, Homo sapiens
gaaaatctgtgtataagtggacatgcagttgaaacccgtgtcgtttaagggtcagttgcatttgataattgtactatggatatttgagagaatatagctgttcttactatatacacactgtactatttaggagaaaagaggtgtgttgcctgcaactgactcccaaatggtttagcactggagtgggcaaatctttttggtaaaaggccaaatagtaaaaattttgagctttatgggccatatggtctctgtcacaactacttgttttgctgttagagtcccagcacagccacagggaatatttgaatgggtgggtgtggctgtgttccaataaaactttatttatggatactgcaatgccaatttatataattttcacacaccacgaaagattcttgtgattttttttcaaccctgcaaaacccatttctgtcttactgagcatacaaaattaggtagccagacttggcctgcggcggtggtttacgaatgcctgcttgatagagaaaaagaacacacaggcaggcacacatacatgggggataaagcaaatacagcatgatggaacagctagtgaatctggtgaagaatagaggcgagttctttgtattgtttttgtaattctgcaagcttgaaattattattattactattattattattttgagacagagtttcactcttgttgcccaagctggagtgcaatggcgcgatctcggctcaccacaacctgtgcctcccgggttcaagcgattctcctgattcagcctcctgaatagctgggattacaggcatgtgccatcacgcctggctaattttgtgttgttagtagagacagggtttctccatgttagtcaggctggtttcaaacttctgacttcaggtgatccatctgccttggcctcccaaagtgctgggattacaggcatgagccactgcgcctgaaattattattattattattcatttatttatttatttgagacggagtctcactctggagtgcagtggcataatctcagctcaccgcaacctccacctcctg

SEQ ID NO: 11641 - DNA, 1043 bp, Homo sapiens
ctctccaggcattgccagctgtcctcagttgagaagtgctgggttagaaggttgacccgtgagttagggtcttagaccaaggacccctgtcattctgagatgtgtctgctgacttgttttctggttttgagagttccgtgttaccaaagaataacagaccatgattggtcgactgcttatgctttcaggtgcctttttgtctgtctcttggtcatctgtaggttattcctttatttctattttttaaaattattttcattcattcattcattcattcagagatgaagtctcgctctgttgcccaggctggggtgcagtggtgcaatctcggctcactgcaacctctgcctcccgggttcaagcaattcttcctgtctcagcctcccgagtagctgggattacaggtgcccgccaccacgcccagctaatttttgtacttttactagagacagggtttcaccatgttggccaggctggtctcaaattcctgaccttaagtgatcatcctgcctcggcctcccaaagtgctgagattacaggtgtgagccaccatgcctggccttactttttttgagatagtgtcttgctctgtcacccaggctggagtgcagtggcgcaatcacggctcaccacagccttgatctcctgggctcaagcgatcctcccaccttagcctcatgaatactaggactacatgcatgtaccaccatgcttggttgttgttttttgttattgttgttgttgtttttgagatggagttttgctctgtcacccaggctggaatgcagtggtgctatcttggctcactgaacctctgcctcccgggttcaagtgattctcctgcctcagcctcccaagtagctgggattataggggcctgccaccacacccagctgatttttatattttcagtagagacagggttttgccattttggccaggctggtctcgaactcctgacttcaggtgatctgcccacttcagtttcccaaagtgctgggattacaggcatgagccaccacacccagcccctggttgttttc

SEQ ID NO: 11642 - DNA, 1035 bp, Homo sapiens
gggctgtctgcatgcgcagtggcctgcgagctgggaggggcgcgtgcgcagtttgtttcctggagttgcacacatgctcacttgaggcatccttccctttgccagtggaatgtccccggaaagtcatgtacgagttaaacactgtcattttgcctcctagtgcacgtgcttgagcccacttgctcagctcctgagatcttaccaggaggctgctgatcaccagcttcatgtttttcctatctatagggagattgcctttccctggcactgggtgtggccaattattatttaagagagacagttaacaaccacctgaccattacctgatggtcacctgacattcctggttggagggggccctgtttatatctgattagctacctactctaactctctaacatcacagacggtagggcccataggtaattttttgtattaaatacatgtaacaaagtttacagatgctttaagggggcagagggagtttatatcttaacactgcaggcaaccttaaatagaacattaagtctcccattcttttgtttttttttgggacagagtctcgctctgtcgctcaggctggagtgcaatggcacgatctcagctcactgcaacctccacctcctgggttcaagcaattctcctacctcagcctcccaagcagctgggactacaggtgtgtgccaccacaccctggtaatttttgtatttttagtagagatggagtttcaccatattggccaaactggtctcgaactcctggcctcaagtgatccatctgtctcagcctccccaagtgctgggattacaggcgggagccaccacgcctggccaagtctcccgttcttaaagtccttccgttaacatcccaccagaaatttcacatcacatgggaagagtttagaagacagacaggttgccctgggctgagtggtcagggaaggagggggagactcagctggagcttgaagcgcaggtgggactcagggagaaagatgaggaggttcagaggcatttgcagggccggggaagacg

SEQ ID NO: 11643 - DNA, 1045 bp, Homo sapiens
tgaaaccctgtctctactaaaaatacaaaaattagccggacgtggtggtgtgcgcatgtagtcccagctactcaggaggctgaggcaagagaatcgcttgaacccaggaggtggagcttgcagtgagccaagatcatgccactgcactctagcctgagtgacagaatgagactctgtcccaaaaaaaaaaaaaaaaaaaaattcccagaccctcggccccagaccttcccaaaggaggctcagggattaggtatctggctgttggtgacacaggtggtctatgaaccagttctgagaaactgtcccgcgtggacagggggtagatcccatcagttctcaaaggaggccaggatgtctcgcctcctgaactccacaggctggtagaagcggggcttgagggacagcaggttgggagcttgaggactaagtgggccagtcctgtcctaccacagtggggggaacagtccacagaaaacttgctcatgaccacactgggagccgactgttcttcccatcccaagtctctgacactgggggctttgggtgaaaccttaaggagatggtcagatgggtggtccagggtatacttttaacaactgagaagccattttttctgccccctgggcacatgtgcccagctctgcaaagacagtggccaagttgaagacaagtcttccatgtggggtggagatgggaggggtgggtgccaggctgcagcctgtgtcctcctgataggcccagccccctcggtggcctccgtgttcctgggggaaggaaggaaggagctggaggatacagtggtgcctatctcgggagcccagggaggcagggacacaggagtggcaggcttggggcgcccgcgtggaacagtgccaggtctacgtttacccactaccagatagactttttcatttcaagcataacttgagtctgcactggggagacactcgtggtgggggtggctgtgatgagggcacttgcgagtcccgacaacagacactggctcctgcacccacatcaccaccatgtcccaggggcagcctgg

SEQ ID NO: 11644 - DNA, 1085 bp, Homo sapiens
agagttcatgccctgccttccagagcaaggctgactccttccaaaccactgccttccaggacacagggacaactctcgcgtggggcgagtctcatgccagctcctccctggcatcaggctgactagctgccactggcctgttcatcactttttttttgttttatttatttttttgagacagagtctcagtctgtccccaggctggagtgcagtggtgcgatctcagctcactgcaagctccacctcctgggctcaagtgattctcttgcctcagcctcctgagtagctgggattacaggcacacgccaccacacctggctaatttttatatttttggttagtagaggtggggtttcaccatgttgtccaggctggtcttgaactcctgacctcaagtgatccacctgcctcggcttcccaaagtgctggggttacagtcatgagccaccacgcctggcctctgtttatcactttaaatcctaaagcactgggtgactaggaggacaaagcccttggccatcctctcgtgcacaagattgtagttcttggtcataatcctgcctggaaggtctttgatttctgacagcctgaggcagaaagaaaatcccagcctaaaccaagatgttacagtcttcttttttctctgcctcctctggaattaggaatgaccctcaaggttccctgaacatatttggctacccctaagattagagaaaaagttagtaccatcctgacactcctcctcaatctcccccacttccattccttatgctgcagttctagagcagtttggctctgagcttcccagcagccagagtgagaagggaaaatagccctgttccattgcatgttttcccccagtggtctgacatctctgtctctccttagctgtcagatgccctgaagcgcctcaaggatggaggcctgtctgcaggctgtggctccggctcctcctctgtcacccccaatagcggtgggacacccttctcccaggacacagcttattccagctgccgcctggacacacccaactcctatggacagggcaccccgctcacaccgcgcctgggcacccctttctcaca

SEQ ID NO: 11645 - DNA, 1043 bp, Homo sapiens
cacctcaccctcgtcctcggcctccgacaaggaggaggaacaggagagcaccgaggaggaagaggaggcggaggaggaggaggaggaggaagtccccaggagccagctctcctcctcctcaacctcatccacatcagataaggtgcctagcaggccaggaagcctcagggggccgggccaggcgacgagggccagacccttcggctcacctgtccccactcttccttctcccccaggatgacgacgatgacgacagtgatgaccgggacgagtctgagaacgatgacgaggacacagccctgtcagaggcgagtgagaaggacgaaggggactcggatgaaggtgagcagggaggccgtggctgcctggccctcccggagtccctctttccccggggcagagcctgagcaattgtcagaaatacttctgagccaaaatgttgtgcttttgagacgttaccttgttaaaacacacacacagggtggcgtacggttccatcttcagggagtgccgtgaacataatggcatgtccatagaaatagaaagcaggtctgtggtccttagggctggggagcccggtgttcaggggggcttgctcagcctacatggcttccttttcaactgataaaaatacttagggaccagatcgaggtggtggttgtgcaacattacaaatgtactaaatgctgctggaattatcactttgtaacgagcagttggccggacgcagtggcttacacctgtaatcccagcactttgagaggcctaggcgagtggatcacctgaggttaggagttcgagaccagcctggccaacatggtgaaaccccgtctctactaaaaatgcaaaaaatagccaggcgtggtggtgggcacctgtaatcccagctacttgggaggctgaggcaggagaattgcttgaatccaggaggcagaggttgcagtgagctgagatcatgccactgcactccagcctgggtgacagagtgacactccacctcaaaaaaaataataaataaaattttttttacaaagtgagcagtt

SEQ ID NO: 11646 - DNA, 1042 bp, Homo sapiens
ccttgaggggtttagctggagaaggacaggtcccgtgctcagactcagggctgtgagcctgccaggtatggagcacaaaataaggcactgagagacgtttggattgaatagtaaatgtctcgtgttcgctcacctctctgcagaacatgacctggaagtggagccggagccccctatgatgctccccttgccgctgcaaccaccattgccgcccccacgaccaccccggccacccagcccaccgccggagcctgagaccacagatgcctcacacccatctgtccctccggagccccttgccgaggaccaccccccgcatactccaggcctctgtggcagcctggccaagtcgcagagcacagagacggtgccagccacaccaggcggggagcccccgctatcagggggcagcagtggcctgtccctgagctctccgcaagtgcccggcagccccttctcctacccagccccgtcccctagcttgagcagtgggggcctccctcggacacctggccgggacttcagcttcacacccaccttctccgagcccagcgggcccttgctcctgcccgtctgcccactccccactggccgacgcgatgaacgctccgggcccctggcctccccggtgctcctggagacgggcctgcccctccctctgccccttcccctgcccttgcccttggcattgcccgccgtcttgcgggcccaggctcgtgcgcccaccccgctgccacccctgctgcccgcccccctggcctcttgccctcccccaatgaagaggaagccgggccggccccggcgatccccaccatctatgctctccttggatgggcccttggtccgaccaccagcaggggccgcccttggaagggaactcctgctcctgccgggccagccacagacccccgtcttccccagcacccatgacccccggacggtgaccctggacttccggaacgcggggatcccagcccctccaccaccccttcccccccagccacccccacccccacctcccccacctgtagagcccaccaag

SEQ ID NO: 11647 - DNA, 1033 bp, Homo sapiens
gtgggaccgccgaggacacggccagctccgctgagccccgcacaccgtccactgcagggcatgagcatcccagcacagccccacgcctccacccgggcaggctcggagcggcgttcggagcagcgccgcctgctgtcctccttcactggcagctgtgacagtgacctgctcaagttcaaccagctcaaggtgaggccgggcttcacccagatcgccggggtggcggcaggacctgagaccggggctcacctctccccctcttccctcccacagttccggaagaaaaagctcaagttctgcaagagccacattcacgactggggcttgttcgccatggagcccatcgcggctgacgagatggtcatcgagtacgtgggccagaatatccgtcaggtaggcaccgcccggcaggatgggcaccggggtgggcatggggccggcccagccagactgacccccttttgtggccaggtgatcgcagacatgcgggagaagcgttatgaggacgagggcatcgggagcagctacatgttccgggtggaccatgacaccatcatcgacgccaccaagtgcggcaacttcgcgcgcttcatcaaccacagctgcaacgtgagtgcccagcggggggtggcccctgcccctgctcctgcccctggccctgcttctgtgccaggagggcctggaagccccggcacgggaatcagctcggcctccttcccaagctcaggttggccaagggttatagggagaggaggacatgtgaggtcttttaccaggagctctactcctctgagcctcagtttctcatctgtcaaatgggcatagtgagacttctgtggcatttagaggactcaaagaagtggttggttcagttcattggtaatttcggagttatttctctgcgttagccttttctccgtgccttcattggtcaggctcagtcctgctcgggccgagctgtccactagaactttctgcaagggggaggtgcactgcgtgcatctgtgctgtgggttagccacatgtgtggtgg

SEQ ID NO: 11648 - DNA, 1046 bp, Homo sapiens
ttttttttttttaggacagggtctctcgctctgctgcccaggctggagtgcagtggtgcaatcatagctcactgcagcctcaaactccagggcttgagcagtcctcctgccttggcctcccaggtagctgggactacaggtgtgcaccaccacacctggctaatttttttttttttcattttttgtagagacagggtcttgctatgttgcctaggccggtctagaactcctgggctcaagtgagcctccagcctcagcccctcaaaacattcagattattaagcatgagccaccacgcctggctgtgattgctttttgacaaagatgacacagaaaaggcctaatgtacatgttactctgcatttccgcccacttcgaagggaattccttgtcggcacatttgtatcttcattcctttgaatgatcccaccatgttccattggtcggttcaccatcttttacttagccagcctcccatgttcgacatttaggttgtttccagtgtttggccgtaacaaacagtggtgtagcgagtgtccttgcctgtgggagaatttctgccatgttgctagatgtgtcattactgagttaaaggcagtgcacatttacccttcatagatcttgtcaaggtgtcctccaagaagcttgtgccagtgcaccttctctcaagtagcacctgtgagtgcgtctgtttctagctttcccaactatgttacagtctttggcaataacatagatattctttgacaatctggtaggaaatgactttttttttttttttttttttgagatggagtctcgctctatagccaggctggagtgcagcggcatgatctcagctcactgcagcctccgcctcccaggttcaagcgattctcctgcctcagcctcccaagtagctgggactacaggtgcctgccaccatgcccagctaatgtttgtatttttagtagagatgggttttcactatgttggccaggatggtctctatctcttgacctcatgatccgcctgccttggcctcccaaggtgctgggattacaggt

SEQ ID NO: 11649 - DNA, 1032 bp, Homo sapiens
gaagtcactttttttttttttttaagagacagggtctctgttgcccagtctggagtgcaatggcaggatcatagctcactgcagcctcgacctcctgggctcaagcaatccttctatctctgcctcctgagtagctgagactgcaggcatgcatacctggctaatttatttattatttttatttattcatttatttttttgagacagagtctcactctgttgccagactggagtgcagtggtgcaatcttggctcactgcaacctccacctcccgggttcaagcaattcttctgcctcagcctcccaagtagataggactacaggcgcgcgccaccacgtccagctaatttttgtatttttaatagagacggggtttcaccatgttagccaggatggtcttgagttcttgacatcatgatccgcccgcctcggcctcccaaagtgctgggattaccggcgtgagccaccacgcccagccacacacctggcttatttatttatttaatagagacagggtctggctgtgttgctcaggctggtctcaaactcctggccccaagccatcctcctgcctgagcctcccaaagtgctgggattacaggcgtgagccaccatgcctggccagaagtcactgttttattcagttcagttagtgtattcacaaagttgtgcacctgtcaccactgtaattccagaacattttcatcaccctaaaaaaggaactcatacccattagcagtcacttcccattcccctcgcctgccccggtaaccaccagtccactttttgtctgtttggatttgtgtatcttccgatgttactcttttactgcatatcttttataaatctgcctctcatccctgcatgcaccccccatccccaccccagttctcgcccctggaggcaaccagtgttgccaggttttgtttatccttctaaagggagacttcgctcgcaaacatgcatgtaaatacacgcatgcacatacagagcatgcacacacacacacatcctttgcttaccactggtgg

SEQ ID NO: 11650 - DNA, 1064 bp, Homo sapiens
ctccacctcccgcgttcaagcgattctcctgcctcagcctccagagtagctgggattacaggcatgcacccccacacccggctaactttttatttttagtagcgacagggtttctccatgttggtcaggctggtcttgaactcccaacctcaggtgatccgcccgcctcggcctcccaaagtgctgggattataggcgtgagccactgcgcctaggctgagaaagctattttttttttttaagaaaactgggaaagtacatatttgaagagagtatttcttaacattttatttgtgaagcttatctatgtctgaatccaacagcccacttgactcatttgtggtattgcctggcccctcatggggcttttgagttcatagtcaccgctgtgatggacacagttaaaaagggattggaggggcctccaggaatgcttcttggaggagttgctgtcttgacctggtattagaaaggaggcaggctggccgggtgcagtggctcatggctgtaatcctagcactttgggaggtcgaggtgggtgaatcgcttgagctcaggagctcgagaccagcctgagcaacgtggtgaaaccctgtctttacaaaaaattttaaaattagctggatgtggtagtacatgcctgtggtcccagctacttgggaggctgaggcgaagatcacttgagcccaggagtttgagaccagcctgggcaacatggtgaaatcccatctctacaaaaaatacaaaaattaggccgggcacagtgggtcacacctgtaatcccagcactttgggaggctgaggtgggcagatcacctgaggtcaggagttcgagaccagcctgcccagcatggcaaaacactgtttctactaaaaatacaaaaaattagctgggtgtggtggcgagcacctgtaatcccagctactcgggaagctgaggcaggagaattgcttgaacccaggaggcggaggttttagtgagccgagatcatgccactgcactccagcctgggcaatgagagtgaaacgtgtaaaaaaaaaaaaaaaaaaatatatatatatat

SEQ ID NO: 11651 - DNA, 1047 bp, Homo sapiens
ggaggcctcacaatcatggtggaaggtgaaagacacatctcacatggccgcagacaagagaagagagcttgtgcagggaaactcccctttttaaaaatcatcagatctcatgagacttattcactatcactagaacagcacaggaaaggcctgccccccatgattcaattacctccaccgggtccctcccacaacacatgggaattcaagatgagatttgggtggggacacccaaatcatatcatcatctcaccccagttaaaccatatcatcatctcactccagttaatgcagctcttggctgggcacagtggcttgtgtctgtaatcccggcactttgggaggccaaggtaagcagacaatttaagttcaggagttccagagcagcctggtgaacatagtgaaaccctgtctttactaaaaatacaaaatttagctgggcatggtggcgggcccctgtaatcccagctactctggaggatgaggcaggagaattgcttgaactgagaggaggttcataaaataaaaataaaggctgtgtttgtatcgctgggaaattttcttttattgctgctttggttatttcctctcttgtttacttctttctttctgtaactatctagatggatcctccatgtcacaacttctcttttccttttggcagttttctgggagaaaccctcagtttgtttatttattttgagatggagttcgctcttgttgcccaggctggagtgcaatggcgtgatctcggctcaccaaaacctctgcctcttgggttcaagtgattctcctgcctcagcttcctgagtagctgggattacaggcatgcgccaccatgcctggctaattttgcatttttagtagagacggggtttcaccatgttggccaggctggtctgaaactcccgacctcaggtgatctgcccacctcagcctcccaaagtgctgggattacaggcatgagctaccgtgcctggcctgtgtatttttggagacagagtcttgctctgttgcccaggctggagggcagtggtgcaaactctg

SEQ ID NO: 11652 - DNA, 1027 bp, Homo sapiens
gtgtctgcctccaaggggctgttgtggggatggagtgagataggtaaattgcttattccagtgcttggccagagttaggtgtccctgcacctggaggctggcccccttacaacctcatcgggaggcccgcccccatctcgggagggctttgggtgcctcctaagaagacttttggtgccacagctgttggaggtgcagtctgtccttctggcaagttggagggttttctggccggtcctgaaacattatatgagggagatgtcattgttgagggcagacatcccagacaccgttctgacatgtggattcggctctgggcagagattcctcttttccaagtcacagaaaatgcctggccctcaaagattaaagcgctttttcactctctctccctttcccactatgaatattaggtatttgctgcaggtaacttttttgtctgcgcaacagaacttctttggactggcagcagcggccttgagcagcttggccctgcagaaagctcatgatgggatctctgctgagttaagcttattgcattaggaactggactagcgggggctgtcttaggtctgctctggaggcatcgcgggagaagtttcctaggagactccataaacagcgtaataaaagagcaggaatatcttgccccctctcacctcacctttttaagagagctgtgagccccaagcatatccaggtttaaatgttatgcttttacctgaagttaaaatattagatacttagccctggatggcacccccctcaccgccgcggtccctggaataaacgattagtcaacttgttctttgttatgttcctgaaacacccctatttcctctcttgaaggtttccctgatgatctgttcccgtagctcctcctcccatcccccttacccggcacattggtcagtctctgctgattctctggtcttgccagtttgagctggcactgagcctgtaaagatgttctgctttttaaaaaacaaatggtgttgaggctgcagccctgtgcgccctccagtct

SEQ ID NO: 11653 - DNA, 1033 bp, Homo sapiens
ttttaatataaacttctacatatacagggagagaatggatgagtcacggggggcatggactggaaaggtctcacctaagtaagctctgctaaatgaaaactaaatcagtctcccctttgcactcttgtttggataacctaaaggcttattaaacaacaccaaataattttagtaatggcattttttttttcatttctctcaaaaatattttggcagctggccgttgctcagttaactttcttgattgcaaaatgcaccatcagtttggtgcaagaagcttatcttgctctcttggctctctcactttcgctgcttttccctgtgcctaaggtctcctgctgcctaaggtcggccacctaaggtctaccaccacaggccctcggatgggatctgtccagtcatttctcatgaagatgccctttgtctgtctgtgtgaggctggtttgtccagtgctgagtttagttggcagtgtagaactttggtatggatgacagacaaatgactcaaaaccagttgtctgggctgtagtctgtggcacagaaagaaactagaggaaggtgagtttctgaccccagctctcctagtgagaactgctacctggctttcagggaaggaaggttgagatcggaggcaacgcggggcgtggtggctcatgcctgtagtcccagcactttgggaggccgaggtgggggattgcttgagcccaggagttcaagatcagcctgggcaatgtagcaagatccccatctctaaaaaagaaaaagaaagaaagaaaaaaagggattgggggcagggcagaaagaagacttaacctcagagcctgtctggcttccatcctggtggggttcatgccttccctgccggctgtctgggtcctcccctcctgcccgagctgagaaaggccagctgggtctcctcttctgtgtgactgtttctggcctaggttctttctaacttcaacttcctgtctgtcctctggcctcttcgttctagctgtctaactctccgtggtacactctgctttttgttgtt

SEQ ID NO: 11654 - DNA, 1048 bp, Homo sapiens
gaacggtgatcccagttgggagttctggtctctgtgttgctgctgaagtctgactgtgtttgacgtaaacacccaaagaaaagggaaacatttcagctcacggagaggaagaagaggggaccctcaaactaaactttgaggtttctagcctgtaaggctaaatttccctgcgtcttgccgctcccctcattgtgtgtgattaaagctgttggtatgacaccctctgccctccagctttgtctgctgtaccccctgccttcagactcccttttttggttggttatttttgtttgtttgttttctgagacggtcttgctctttcacttaggctggagtgcattggtgccatcatggctcactgcaacctcaaacacctgggctcaagcgaccttcctgcctcagtctccccagtagctaggactacagacgcatgccaccatgccctgttcacacattgagggcttttcactgcctcgatcaggctgagttctgctcactggggccaccacaggccaggcagaaggaactgtgtgggctttgtcgagctggctttccctatccactaggcctttgcttaaacgccacttcctccagaaagcctcccctcactgctctggtcaggttggctatccaccttgtgcccacagccatctgcccttcaggacgctgagcacagaggcatgacgtgtgctcccacccaaggcgtgctgcatgaggggaacctccccgcctcagctgtcccccaccctcagccgtcccccgccccagccgtcccccgccctcagctgtccccctcctcagccgtccccccaccctcagccgtcccccacctcagccgcccccccgccctcagccgtcccccacctcagccgtccccctgccctcagccgtccccctcctcagccgtccccccaccctcagccgtccccctcctcagccgtcccccgtcctcagccgtcccccacctcagccgcccccccgccctcagccgtcccccacctcagccgtccccctcctcagccgtcccccgccctcagtcctcggctct

SEQ ID NO: 11655 - DNA, 1030 bp, Homo sapiens
gtctgctcctgggacctggtgtttctaacagaagttcagtctgtgcagacaggaaacccaagccatcaggcccagcagaggggtggcatctgaagagtcagggagcaggtctaggaagactcaggcatgggccttctctctccagcccgagtgtcatggatccggtagcttctccgggagatgagtgtgctagggcaggcttgtgttgggctggtctttctctgagaagccacactgcctctctgactgaggcgttcgttattgacagattcctctcctttcacctggactcctttatttccctgaaatctccttttcctagggaaggagaaggaaagggtacctgggaatgtggtctgccctaggggaggggtgcagcagacaggctggggctccctcaggggtctggatcatggtgctgactctcaccctctctctgctcagatctggagaagcgcaagaatcctgtgtgccactttgtgacacccctggacggctctgtggacgtagacgagcaccgccggccggaggtacttggcagtgaccaagggtggctgagagtggaaacataccagcacctcaccgggagtggctcaccgcgggctggtcctgtaggagaggctgccgagggtagtgcagcgcctgccctgcgccatccatgccctgggggccaggcctgggagctggtggcctctggcaaccccaggctgcagagcctcccccttctcagagggactggcccagggactgagggggttaatatctttctgttaatttttaaagtgtgtgtctatgtgtgattatacatgcacaggaagtgtctagaggaatatatagaagtgtctttattaagagacttcaggaacctctggggagtaggattagggctgccagatgagggggagatgctttcttcactgcatactcttctgtgtggctttaattttgtctaggcatgtctcactgttaacgataaagggggaatttagaaggtaagctaatgaaagacagttttgagacaggtataatc

SEQ ID NO: 11656 - DNA, 1938 bp, Homo sapiens
ctccttatctctggagctcgaaggctgtcatgcaaggcatccacactggcatcacgcgaaggttggatgagaggcccctggagggcacattccacctgaaacttcctggaattggctgttcatttttgccctttgaatgtggcagaggctgtggggaaggggcatttatgggggggcttgggaattgctgcagcgttcccctgcttcttcctctgtggagcattctgctctcaccctgtcctcctggacagagcctcaggaccgtgcccccaaggcctttggctaccttaggtcttgaaatgacagcgcattgttagctagagggtctgctatagcatggaagaagtgggacgtactttctgagtgatgtggtagccactgtggggtttcccgctggattgcctaaggcctgattatagtgccggatactcagtacaccagttgagctttgctaatcaagcagagccccctcttcactctgctctctgtccctgtcctaggccatcaccacggaagggaagtactggaagagccgcatcgagattgtgatccgggagtatcacaagtggagaacctacttcaagaaaagggtatctggctggagtgttcaggcagcccgcctagggagggagtgggcagagtccctggttcagggccctggccgaggcggtaggctccacagccgccccacctgaacgtggagcgtcaagcagtaaatctggggcccagcgtgccagactagcctgggcaatggcctgcctcggtcaggttgtctttgctctcagtttccccatctgtgcactgggtggaagtctcctttgtgcaggcatcggcctggggatggtgtgagcaggacccctacctgcctccctgagagttctgtatattctagagcccttgggccctcctagggccattggtgaccgccgtgtcctgtccctttgcccacagctacagcagcacaaggatgaggacctctccagcctggtccaggtgggtgagcctgggagctctgaggacccccactttgacatgagacagcagggacttcggtggcccaccagggagccctgcaaaaggcggcaggccatgggccctccctggagtctcaggaatggctcaagaagcagtccagctctctctcctgggtgggctggagggagccgctctccaaatgcctccaccctgctgcctcacttccactgagcacccctttgacgaatttccccaggtgacaggcgtgggaattcttcgtcccactgttactctttgatgcttcctcccctgtgttggtgttgtgttaggacgatgacatgctgtattggcacaagcacggggatggatggaagacccccgtccccatggaggaggatcccctgctggacacagacatgctcatgtcggaattcagcgacaccctcttctccacactttcttcacaccagccggtggcctggcccaatccccgggaaataggtaacccaaaccagggccttgggctttgaacagccagccgcttccttctctgccaggccccctctgggccagggttccttcagggccatctctgagctgctgcacgtcacggttgggggcaggcagtaaggaagggaaggatggctggcctcatttgacatccaggccgcacgtaccgagtgggtggggtctgcagagtgggcccactgggcagctgccattcccgtagtgccatggtgggaggacagcagcagggtctagtctgagtcattggcacatttcagataccgttctcttcacggggtacgtgtgccgtgcctaagccgaggcggccgggccgtgactcatgctaaagaaaatcagaagcactcccgggtgtgaccgctcaccttggtggcattcagtcttccagttaacctctcagggaagagcccaaagattgaaaattagaacagtgttcgg

SEQ ID NO: 11657 - DNA, 1100 bp, Homo sapiens
acctgcacaggtagaggaagctgggggatgggtgggggaaggggctggcaggcacagggctgctcatcaaaggtttgctgccagagcaaggctaatggcatagccacacagtcaccagcaaagcgccaagcagtgctagaccagcactaatgtgcagaggcacgattccatccctcttttacagcatccttcagcacccatggggtgggagactcttggtccaggtgtgcttctgcctgagtgccaggtaacctatgtgcagctagctctgctccgactaattaacacagaattagctagacagagaagaaaaacatggattactaataaaaataacttctgtatatttctttcacgttttactaagcaatccaaaaagttgcttacaggtgcttggggctacagagctgagtgaggtaccattctttgtccttacggagccctcatgcttatgcccatgaccagttagacactggtaacctggcaccatcttcaaacgggctccgggaagaattgctactgcagagactgggatctgaaccattgattcctcgtagcttttcttatttaggaagaggtggcctgatgaccagttgacacgtgaaattgtcctcggggattcccgagcagctgcaatccaggctgcctctgctcagtaatagaagatggcagagactttggggagactctgctggactccagaaacaagatattcccaggctgctagccagctgtgtgagggccgttgccttatctgagctctgagttatttagtttttaatggaaacaagacccccgcagacacgcagggaaacacaaatccctatcagatcagcagccatggacgtggagacgtggcctttgtccctctgtcccagcgcccggcctgtgtagttggacttggcagtgtgcagcgctagaaaggaattgtctgaccccagcattgcttcctggctcctttcttcctttttcaggagagcatcctgccgaccacagccctccccactgtgagccttcctgacagcctcatcgcgccccctaccgccccatccctggctcacatggatgagcagggctgtgaacacacctcccggactgag

SEQ ID NO: 11658 - DNA, 1066 bp, Homo sapiens
ccaactctgccggcccaccgtggcatcgggaggccatgctcaggtctgaagcaggtttggggcctgctgacagcaatagcccgcctttgggaaccccttgctgtgaactctctcactcagtgacctcagtcaccaacctcctctgccctcggggcagcccacacaaaagggaagtgctggccgtgctggtcctgccctgctggtggcctgccgggcctggcgccggtgagcggaatcgatgggatgagggtgacagggcctgctcctgtcctgaggcccagccttgtccctcctgccacgtcctgtccacatgcatgcctctgcctgatgccctgctccactctctggtctgcccgtggggcagttggaaggcgtctttctttctcccctcaactctgacagcacccagcccttgtggatggacttgggcttctattcaggcttatgcatggcaggctgccagggggaagtgccttcttcagaggtcctccaggacacatgtgtgcagaaacggtggatgtggaacacacaggaccagaatggaagcgtgtgatgcacggtggctgctctggctgagaggccctgctgggcatgtttcatctgtccccttttagctccacctgacattgcaggatccatggggactcagcccagggccttctcggatgtcacctcaccgctgtggcccttctgccgttcttctccacttggctccagctgcagctgttgacagatcaagcatgtcctgtgggagcttagaaccctgaagttctagtgtctgaaagatcagactccacgtcctgctgtcagccttgtcatcttgtctgatgtctttcagctgggagccccaaaccaggacagttctcggaccaaagatgcccccacactcaaaagtctgtcccgtcttgtgtttggagaaggaaacaatgttggcaggcagcactctgtggtggtcagccctcagagctgtttctaggcatctctcagatcagacagcaaagaatctacccagatctgggctgggtggaggtgtggctgggctgggggccattctgagcctgcagtg

SEQ ID NO: 11659 - DNA, 1191 bp, Homo sapiens
acgcctgggctgtcccacagtttagatccagttggaggttctccctggctcctgcaggcctgcggggatctctccccacttcaggcctccggccagctgcctgccctcttgtctgtgcttcagccctgcacaaaagcagcttggtgacaccactcagccacccagagtacgtgtttacaggctttccagatcaccttcctgtggggtgaacgtaatgaggcggggctggtccttggaatttcccctggaaaatggtaacagactccatccttgacccggggatgagcatgaaggcattgtcccaaaggcagaggccaccgtggtaggaattccaccaaggccagaagggaaaaaggaagaacccaccgtgtctggctgtgcgggccctggggagggtcgtgagtgcagcccctctctacttctgtgcctttgtaaaacgtgtagataaccgcagtggttggctgagccaagaactctcctaaatcagtggctttctccccaccccttgctggggagtcatttttaaaaaaatctgtgggatataaaattggcctcctgctgcttcagcctacctctccctctgctgacttaatgtcgtgattctgtttcttcagatatttaaggctgttaggttgtgtgagccttgaagtgtgtgtgtgtgtcccagcgactgtccactgtccaggagatgcatgtctttgtattggagatatttctgtaactcattctcttggtgctcacgattgccatggccatagggccacagtgccgtatctgctgcagacatgattgtttcttgttctagaggttttcttgttttcgaatcttgcctgatgaatccagccagaccaaggggcctagatttgacctctgtcctgggctcctgggccaggtgcaggaacatctgaggccactctgctggccacctccagtgggtgctgaccacaggatgggctttgtttacactcattttcaccctgattcttgcccccactttcataaaagaaacttcaaaatgctgacgctttggagagtaagaaaatcaatcttggctgggcacggtggctcctgcctgtgatcctagcactttgggaggctgaagctgaaggatcacttgagctcaggagttggagaccaaccctggcaacataacaagaccctgtctctacaaaaaaaaaaaaaaaaaaaaaa

SEQ ID NO: 11660 - DNA, 1021 bp, Homo sapiens
gctgtacagagtggggtgaaatgttaaacagggtgcagtgcccaagggctaagaaccaggtccagcgcaagcctgagaccacaggaggcactcacagctcacaaaggcgtctcgcctgattggccagggcaggatctgccgcctcttctcggtgcacagacagtcatgccaaccctgggcagggtggcatctgcccctgctttccccactgagtggggagacagggcagtgtgctcaggccctcaatcctcacgcaggtaggcctcctgctccgactcagcccgctcctccccttcctcctgtgttttctgacggagctcttctatctgtgcttctgccagcttggtttctgctttccgggagagctggtgcacctcttccacctgcagtttcaccagctgaatgtgattcctggcggttatagaggcctgatctgcgcctgccaaaagatgggacaatcgggttgagcagccgtgcagggcgcggaaggctcatgtggacgttggcctgggggtgctgtggctgtcatctgaacccctcttggggtcactttccttgacctccctgtcttctctctctgcaaagaaacttccacctctatgttcaggtctggatttaactgacactctgtcaaaaacagcatttttcttcagctgtcagcggccaacatcacaattattaaatgcaactctcacaatcatctttatagctacagagcttttagtacagacctttgattaatttttttaactacacatcttccatttctttttgacaaagagatcatgaataaaattgtcaaagatccctttcatcaccttgactaatctttaaaggtaaaggaatgcatagaaaaatatttttttactataaatttatgtaacagcataaaaggtattaaatatgttttataattttttcacttaaacatgttttgaaggccgggcgcagtggctcacgcctctaatctcagaactttgggaagccaaggcaggcagatcacctgagggtcagaagttcg

SEQ ID NO: 11661 - DNA, 1085 bp, Homo sapiens
gtttctctatttcacagatgtgggaaattgagacccataaaggtattcattccaacctgtccctccttcttcatctcctcactcccacccaaacaccagccactgaaacttctctattctccaaacatgttttgtttctgttcccttgcttatgctcttaggaagaactctttaaacatttataaaactatgatcttcaattctcagcccaataacaaattagctaacacctaaaattgaatgtttgccatcaaccaagcattgttctgtgaacatttaaaactcaaaacatttggaggctgaagcagaaggattgcttgagcccaggagatcaaggccagccagggcaaaatagtgagaccctcgtctctcaaaaaaccagaagtgaaaaatagaaaactccttcaggtgggtacaactaaattagtcccttggtattggtatccatgggagattggttccaggacctcccacagataccaaaaccctaggatgcttaagtccctgtcattaaatggcatagtatttgcatgtagcctaggaacatctgcctgtatactttaaatcatctcttgatttcttatcttgcgtaacagtgtaaatgtgctatgcctgtaggtgcaatctagggatgtggaacacatggatattgacggcaaactgtatatatatattttttttccaagacggagtttcactcttgttgcccaagctggagtgcaagtggcacgatctcgacttactgcaacctccgcctcccgggttcaagcaattctacagcctcagcctcctgagtagctgggattacaggcgcacaccaccacgcccggctaattttttgtgtttttagtagagagggggtttcgtcatgttggccaggctggtctcaaactcctgacctcagataatccacctgcctaagcctcccaaagttctgggattacaggtgtgagccaccgcgccggcctggtctgtatattcctattttataaattagagaattgaggaacagaaagattaagtgatcacccaaggacagctgcctagtcattgtgaaagagcaccaagtcagaaattgtttctac

SEQ ID NO: 11662 - DNA, 1083 bp, Homo sapiens
tggtcaggtgcttagcaggactgctagaatcctgatttagtaaccttggaagatggtcaggtttttattaggaatgctagagtcccactttaacaactttgggagaagtaactccaggagacaaatggttaggttcttgtatggttgggaattcagcttggtcagctaactcaggagcaggcagctttctgctgtttgattccagtcagcttgttaagggaggcaggaaggtagaggagggaatgcccagacatatgaagcctttggggtcttggttaccatgtctcttgcctgccaggattgagtttcttccctatactgaatggtattttaaattaaaaaaatgtttttttgaaaaattaagctttgaaggtgttaccacagcttggatcccgaattcttggctctcacataaatagaaattagcaccaggtcaaacaaaaattttcttaggccaggtttagtaggcttgtggctcaaggaatcgcaagggagcagtcttgaaggtatttagtacacttgtccaaaatagttttccattttaaaagtaagatgtttagaatataggcagaattattgctaatgataattgataactctagagtttaaagaataaaatccttgattgtatttttctatgtttaattttattatttgaaattaatttgcatttaggcatttgttcagaaagctaacgatgaaaatcggcggacttaccagaatcttgtcattgagaaggatggttcaaatgaaggtaagttttcctgaatttttttttgaatgacttttttttttttttttaatggagtctccctttgtcgcccaggctggagtgcagtggcgcaatctcaggtcactggaaccaccagctcccaggttcaggcgtctcctgcctcagcctcctgagtagctgggattacaggtgtgtgccaccacgcccggctaatttttgtatttttaatagagatggagtttcaccatgttggccaggctggtctcaagctcctgacctcaagtgagtgatccacctgcctcggcctcccaaagtgctgggattacaggcgtgagccactgcgcccagcc

SEQ ID NO: 11663 - DNA, 1056 bp, Homo sapiens
attttttccttaacagctttatagctcctgagttaggtgattgaatcaatgttggagactaacaaggtgcaagtctgactgggtgatgggatgttttttgattggttcttaaaatatgacttgcttttgtttgtaaagggcaaggggataaaaaagactttccccatgggctgggcgcgatggctcacgcctataatcccagcactttgggaggccgaggcgggctgatcactggaggttgggagttcgagaccagcctggtcaacatggtgaatccgtgtctctaccaaaaataaaaaagtagccgggcatggtggcacgttcctgtagacccagctactcaggaggctgaggcaggggaatttctttaacccagaaggtggaggttgcagtgagccgagatcacgccactgcactccagcctgggtgacagagtgagactccgtcccaaaaaaaagaaaaaaaaaaattacttttcccggagaaaattgtcttctgataatattaaatcagaagaagtacagtgaatgtacagtagaaccttattttatccaatcattaagaatctagcttcttgggagctaaatgatgagaacacgtggatgcatggagggaaacacacaccggggcctttcagaaggtggagggtgaaagtatcaggaaaaataactaatgattaataggcttaatagctgggtgatgaaataatctgtacaacaaacccccttgacaaaagtttacctacacttataccactgaacttaaaagttaaccaaaaaaagagtctaactcctaatcttagctctaaaggcaacatgttatctggtttattagtgggctttgtaatgtagcattggtgaagaagatgttgctactgcagctcaaattgtggtaaaagattgccccttaaaattgcttgtctcgatccctttaaggttggccaaagttggtatagaacattagatccataaagtcataacttgccgtgatgcccttaatggctgcattgcttgtttgaattcctagtatcacccccagttaagttttccttagaat

SEQ ID NO: 11664 - DNA, 1019 bp, Homo sapiens
gttaattcttattttatctgaaataattctgattctatttttctctcatacttttattttatatcgttaacaactttaacacttttgttttagaaagattatcagaacacagaggaagtatgtcagctaaggactttggtaaataacttgcgagagttgatcacgttgcataggaagtacaactgcaaattagccctctctgattttgagaaggtaaagtccagggtcataagaattattttgtatatcaagttatgggtagagtctgtatttattccatctttcttttggcatccaggaaaatacaaccaccatagtgttccgaatgtttgataaagtgctggccccagagcttattccctccatcttagagaagtttataagagtttacatgagagaacatgacttgcaagaggaggaacttctcttgctgtacatagaggtaacttttcctttacatctagtcttatttcttggatctatgcagtgtagcactgtagtaaatatttaactctttaaggaatgtcatatgctttctcagtaggactcatgcagcatattgaattggttaaaaatgtgggttaattctgctactaaccatcttgagcaaaggggggatacatgaggactgtgaacccggaaaatctgagacagttctcagttaatttagggagtttattttgccaaagttgaggatacacccatgacacagcctcaggaagtcctgacgacatgtacccaaggtggtccgggcacagcttggttttatatattttagggagagacacgaggcatcagtcagcatatgtaagaagtacattggttcgatctggaaaggtgggacaacttgaagcaaaggcaggaagactccaagcgagagggagcttccaggtcacagataggtgatacaaaacattaaaattcttttgagtttctgattagcctttccaaaggaggcaatcagataatgcagctgtctcagtgagcagaggggtaactttgatagaatgggaggcaag

SEQ ID NO: 11665 - DNA, 1956 bp, Homo sapiens
tttctgttcataaaagcgacatatatttgtttttgtttgagatgggtctggctgtgtcgcccaggctggaatgcagtgacatgatcatggttcactgcagcctcaatctccctggctcaagcaatccccacctcagcctcctgagtagttaggaccataggcgtgtgccactacgcccagctaatttttgtattttttgtagagacagggtttcccaggctggtcttgaacacctgggctcaagtgatctgcctgcttcattctcctaaagtgtctgttttctttaattacagaaaataaaaagtgaatgtttactcatttccacccccaggggaacctccatggacagttgtatgcatatctttgcaggcttttctgtggttatgcaaacatggagacttttctttttcagttattcgctgcaatgtgagacatttgttaatatattgtaatatgcctttattttaacttcacactgttattgccactataaaatagaaataaaataatgaaaactgtttttaaaccagagactgaggctggacacagtggctcatgcctgtaatcccagcacttttggaagccaaggcagacagatcacctgagctcaggaatttgagacctgcctgggcaacatggtggaaccgcatctctacagaaaatacaaaaattagccaggtgtggtggtgcttgcctgtagtccaagctacttgggagcctgaggtgggagaatcgcttgaacccaggaggtggaggttgcagtgagctgagatcgcgccactgcactccagcctgggcaatgggaacatgaccctgcctcaaaaaaacaaaaaaaacccagggattgtagagaccgtagaaagcaataacgctgtatgtcttagcttacagcagaaaaaatactcttctgaatttttctgaatagtcaaattgttctctatatgtgaaaactgaagaaataaatggttttccagtgagtggatgaaatattctcaaactaccatgtggttgatgtaagacctgctgattagactgtgctgttcacttgcatgcatcgtaaacctgagggctgttccttgtccatgcgtgcatcttttgtagctcatatttgatgccgtgctcaagatcatgtatgcggcagtggttccttggagtgcagctgtggagcaactggtgaaacagcacctggaaatggaccatcccaagtaagatgactgtctacgaaacaatgttgttatgctctggagaaacattgtgttttgagttgacgttcatttatgtttctatattgtttgctgtgtcccatagtacttcataaaaaagacaatccatgttaatatgggtaaatttgctttcagagtcaagttattacaggaaagttacaaactaatggagatgaaaaaacttttacgaggctatggaataagagaggtaaatctcttaaacaaggaaataatggtaagtacactcttcgaagagtcttttttctctttcatttctggggcaatatggaaagcttaatgaggaatttatattctaggaggctaatagagctaggtttttccactacatttcttttgttagatatgatgttaataaggtgttcagttatttatgagagtatttattctttttgacatggagtttcgctcttgccgcccaggctggagtgcaatggcgcgatctcggctcaccacaacctccgccttctgggttcaagtgattttcctgcctcagcctcctgagtagctgggattacaggcatgcactaccacgcttggctaattttttttttgtatttttagtagagatggggtttctccatgttggtcaggctggttggtcttgagctcccgacctcaggtgatctgcctgcctcggcctcccatagtgttgggattacaggcgtgagctaccgctcctgggctttttatgagagtattaaagacaccaaat

SEQ ID NO: 11666 - DNA, 1049 bp, Homo sapiens
taactaatctgatggggacgtggagaacctttgtatctagctcagggattgtaaacgcaccaatcagcgtcctgtcaaaacaggccactcggctctaccaatcagcaggatgtgggtggggccagataagagaataaaagcaggctgcccgagtcagcactggcaacccgctcgggtccccttccacactgtgctttgttctttagctgtttgcaataatcttgctactgctcactctttgggtccacgctgtttttatgagctgtgagactcacatgaagatctgcagcttctttcctgagtggagaccacgagcccaccgagaggaaggaacaactccagacgctctgccttaagagctgtaacactcactgcgaaggtctgcagcttcactcctgagccagcgagaccacgaacccaccagaaggaagaaactcccaacacatctgaacatcagaaggaacaaactccagacgcgccaccttaagagctgtaacactcacctcgggggtccgcggcttcattcttgaagtcagtgagaccaagaacccaccaattccggacacactagcagaggggacgtaaatggcctttatttttctttctttttttcttttttttttttttttgagacagagtcttgctcttttgccaggctggagtgcagtgggacgatctcggctcactgcaacatccgcctcccaggctcaggcaattcccctgcctcagcctcccaagtagctgggactacaggcatgcaccaccacgcccggctaattttttgtattttagtagagacagggtttcactgtattggccaggatggtctcccatctcttgacctcgtgatccgcccacgtcggcctcccaaagtgctgggattacagacatgagctaccgcgcccagccttgagctttatttttgacattgtaaaagaacagacaagcaggcagggcgcaatcttgtctttgacaggatctcattctgtcacccaggctggagtgcagtggcattatcatggctcactgcagccttgacctctagggcc

SEQ ID NO: 11667 - DNA, 1035 bp, Homo sapiens
tctgttgacattaacaatcaaacttttcagatgaagaggcaatggttaggatgactaagaggagtttcggacccatgtacacctcaaatctcagaatgatggctgggttgggtagtgtgaggttggaggagctatagacaaatgtttctttttgaaaaaggatactaagaaggcaagtcatgatgttgcccttactctgatacatttcagtgtagagggtttttttgctttgtttttttctttttatttctagatttcttttcaaccagttttcaggcaacattttctcaccaagaaagacctcattaaagctcttgtggagaatatagatatggacacaagcctcattttggaatattgcaggtaattctttaaacattaacggtatttttgctgttaacaaactggtaattcttttgcaagaacacagtaataacgatgattattttatgaggtccatagaccactattttcttttgctcattcccaaactgagtaaatatgaaatcagattagagtctcttatgataccaccatttaaattcaccatttagtgtttcccaaacttgtctcctgataagcactgcttagggcacttgatttcaaatgcaggtttctgggcctctctggcagttctgactcagtgggtctggaccaaggcctagaaatcgctggtctctaataggagctcaggtgattcctatgatcagaaaagttggagaatattcttctgagtaataaacttctaaatcaggttaactagggagcaaagtaatcttaaaaattaatgaaaagtatgatttagggagaatttctaatttcctattaaaaatgtttataaaagaatttttatttttatttaacttctttctttatttgagacggagtctccctctgtcacccaggctggagtgcagtggcgtaatctcagctcaccgcagcctccaccttcaagccattctctggcctcaacctcccaagtagctggaattacaggcatgcaccaccacgcctggctaatttttatatttttaa

SEQ ID NO: 11668 - DNA, 1053 bp, Homo sapiens
tttcaggcagaacttgaggtagattctataattcctatatccacctaggcagatattcttgggggaacaaaatctatttgtaaacaaatagtgtaatatgacattagggttttgtttgtttgtttgagatagggtctcattcagccacccaggctagagcagtggcatgatctcagttcactacagcctccgcctccccggctcaagtgattgtcatgcctcagtctccagagtagctgggactgcaggtgtcccagctacttttaaaaaattacctgtgcccggctaatttttttagtatttttactagagatgggttttcgccatgttgcccaggctgatctcgaactcctgagcttaggtgattcacccacctcggcctcccaaagtgctgggattacaggtgtgaaccactgcacctggccaccattaggtttttaattagcaatttttatatcatttggcatttgattcaacaaggatttttaaagtatttaccaagagcatggactgtgcttcagtggaaacaggagttagaaacatcttggccacgtagaatatgtggttgacttttagaaaccagcctttacagatgttttaacttacatgtaagttcaaggtacacactaaaagttccttgaggccagaaactgcatgtatacatagcacctagtacagtactttgtaaatcccaacagatatatactgaattaacaaatggctcatttaaaattcatggagtcttttccttttacaaattatctaatacggggctgggcaaggtagctcatgactgtaatctcagcactttgggaggctgaggtgggaggattgtttgaggcgaggggtttgagaccagcctgagcagcatagtgagacccccatctctacaaaaatttaaaaaattagccaggtgccatggtgtgcacctgtggtcccagctacttaggaggctgaggcaagaggattgcttgagcacaggaggttgaggctgcactgagccgtggttgtgccactgtactccagcctgagtgacagagcaagatcctgtct

SEQ ID NO: 11669 - DNA, 1050 bp, Homo sapiens
tggccaacgtggtgaaaccccgtctctactaaaaatataaaaatgagctgggcatggtggcgcatgcctgtaatcccagctactcaggaagctgaggagggagaatcacttgaacccgggaggtgttggttgcagtgagctaagatcatgccatcgtactccagcctgggtgacagagctagactgtttctcaaaaaaaaaaaaaaaaaaggttttgagtcttctgagaatttagaagcctatctttaggcatctgtaggctttcagacataatcatgatagcaaacagtagtccgtgttcccatgggtaaattcttttattctgtgtagagtgctgtcaaagacttgtgttactcattcctaagcatatgtcatgcaccagcactttagtgtttaaaattattgaaaacttggacaggcagatgactatggaaagctagaaaggccaatataatctagtgaatctgccagattattaactaattaatgttctctctcgaagatgtccagtctcaggtgatcttgacctgatcggagtcgccaggcagtatatccagttagaacttccggcttttgcattagcttgtctgatgctcatgccccactcagagaaaagacaccagcaaattaaggtatcgtgcacatgattcctctgggctgccaaggaaatagaaggtttcatcttgcatgtcccttgcaaaaggtcgcattttcatttcagcaaacctgtaaagcatgaatacatcagatatgtgtgaagcttgtatgggggcttagtgggaggtaagactgaaagatagattaaggtccagctgagggctgtcttacaaggggtttgggccttattgtctatcagtggggaaacaagtgattattttagaacagcaaactgaaatgatgaaggaattattttaaaaggaataacccattaacccatgtaggcttggacagaggagaggacaagaagtgaaacagttgggaagatgttgcatttgagtagaattttatcccacttgatctcttcatagcaaccttgtgcataggcaggga

SEQ ID NO: 11670 - DNA, 1050 bp, Homo sapiens
tcaataaataaacagcataactcaatttgggctagcgacatttcaagtatctaatggccatatgtggctagtggccaccgtattggccagtgcagtagagaccaggatgacccatagttgtacatccactttcccttcttgagcccattgctacccttcctgggtcgttgttaattccagtgttctttaaacacgcagtgcccccaggcaaccacaaatctctaccaatcgattggaattgtgtgtcagaagaaactggcttaccctcctggtgtagacggcttagcaagaagtcagggaagtgcaaaatcagattggactcttggtcgagggattttccctggaggatgtggttggaacactctaaaagggagaagagcaagaaaaggcgcaaagctggaactgtggggcagggtgagaggagggagaaaagcacgttggcaccttgacaccataaacaggtggtatttttaggcagggaaataacagagtgaacttgatgtttttaggaagatgaacttgacagctgcgggtaggatgaattggctagaaggattggaggcactcccagatgaagaactatttaaattgcccaggaaaaattacatgcatttatttctacttttttttggtgcttatcgcccatcattccttctttttgagatttaagtgtaaagggctgttttgagcagctctggatgttggttactcattaatctactcattaatcagcagagatttgtccatgatgctagttgttccatttcctttaggggataataaccttgtgttatgaattgcacctttatcaaattaagagaaaatgagaaagcagctttgtgataacaactttgagaccaactaaaagaaaatagctgactgggcgcagtgcctcacgcctgtaatcccagcactttgggaggccaaggtgggtggatcgctaagtcaggagattgagtccatcctggctaacacggtgaaaccccgtccctacgaaaaaaaaagaaattagccgggtgtggtggcaggcgcctatagtctcagctactc

SEQ ID NO: 11671 - DNA, 1145 bp, Homo sapiens
tagtaaagctttaaccttttatagagaactttgatttagagtaattttttggtcttatatattctttcctaaatttagaccttaaatcatacatgtgcatcttttgcacatggctgtgcagtttggatttttgcatgggacttatgaatagtcagctaataaaataagagtaaccttaatgccaaaatctatacaaatgagcagaggaaagaaagggcagtataaattatgtgtaagactttctaagtccagctctatgagcaagtcatgaaaatgaggcacttatgtgctcaaagcaagaaatagagggagaagaaataaattggtactgtgaagaggtacctaatccttcttaatatctaattttttatgggacatatcgtggttgaatacagatttcctgtggataagaagtcagatgggagtggtttgttttattctttgtattaacaagtatagggggtgatttttaattacgacatattgtttgactgaaaatgttttgttgtgactcagttctttttttttctcctagtactgtgaatatatgcctgatgttgctaaatgtagacaatggttagagaagaattttccaaatgaatttgcaaaacttactgtaggtatgaacattttttttcttgcattaaacttctgtacctgagacaaatgcatgtatggcattattctaaagataggaaagtcctcctttagtaggatattacagaattaacatttatctgttagctgtttaagttctctctgagataggataggtctgaatatcaactttcttacataaaaaagtaaatgggccgggcgcagtggctcacacctataatcctagcagtttgggaggctgaggcaggcggatcacaaggtcaggagatcaagatcatcttggctaacacagtgaaaccccatctctactaaaaatgaaaaaaaaaaaaggcgtggtggcaggcacctgtagtcccagctactcaggagggtgaggcaggagaacggcgtgaacctgggaggcagagcttgccgtgagccgagatcgtgccactgcactccagcctgggtgacagagcaagactccgtctcaaaaaaaaaaagtaagtaaatgattggctgggcgcagtggttcacgcctgtagtcc

SEQ ID NO: 11672 - DNA, 1027 bp, Homo sapiens
cagatgtgagccaccgcacccagcctgagtttctctttctctctttttaactttattttttgaaaaacccggtagactttttgtggggagcatttttgttgataattttactgatctaaagctgagtgattttttaaaagaatttgaatttggcttcctcaccagtaatatgtctccttgcttctttgatgtgatagttttgagatgggtgagaatctaatagatctgtggttgaatttgctgtgttgttatgaagtccaccctgtgggcacaataacataactgttggtaggagttgtttgagctattctggagattatttggtaaagtatactaaaagccttaaaaccatgtatgtgcgctgtttgaacccgtaagccacttctttgacattagaagacattagaagaaataatcagccttgcataaaacttatggatgaaagtattcatcacaatattatttataataaaaaattgcaaatgttataaatgaacaattgggaaatggttaaagaagtgatggtgcattgtgtggtagaatattatgcatatgtttaaagaatcatattttctaagattatttggaagcatgtttggtaatgtcaagtggagtaccccagatacattttagacatttatcgtcatcatctgctctgagtggaaggccgttcagagaggctagaggttcttattctggctataaattatgtgagtaaaattgtgctaaccagttaaaagtactgtacacccatgctcaatatatagtcctggaaatagcaattgaaacatgtcttctcacaagagaaaatgacagttttaatgatgtatttgatgaatttaaactttaagtcaggtgctgcaaattggaaagaagacttgtggtgttttaagttgctgtggacacttttaagaaacttagaacccatggaacccttgtttatcgccatgcaaattacaatcttgaatgagtgttttttaaaaataaagtattagaaaaatgtgtagtaaagatgtaaaattaaaaa

SEQ ID NO: 11673 - DNA, 1105 bp, Homo sapiens
ttccaggtggagcaggtgaagcgggagtcggagttgaaggtatgtcccttgtggcacagggccctgccccggcatccccagcccactgccccagtgacacgctgtcctgtcccagctagaggagaagagcgaccagctggagaagctcaagagggagctggaggccaaggccggagagctggcccgcgcgcaggaggccctgagccacacagagcaggtgcatctggctttgatgactggaggtggggttctggggccagtcctgggtggaagtcaggtcctctttcccgtgaacaggccccacctgggtgccactcggtgatcctgggatgcagccctgacccagacccaggggctacatgggagacaggacctaccgctggtcctcagggagccctgagtctaatggaagtgatcactaacccccagggcccagtttataagcgtgggggcagggtgggtggggcctgggagctctgttcacatgcctggtgtccatgtctgtccacagagcaagtcggagctgagctcacggctggacacgctgagtgcggagaaggatgctctgagtggagctgtgcggcagcgggaggcagacctgctggcggcgcagagcctggtgcgcgagacagaggcggcgctgagccgggagcagcagcgcagctcccaggagcagggcgagttgcagggccggctggcagagagggtatggcctccccagatgcagcagcaccactgagttcactgccgtctggcaaccatcgatctgtctccgtgatctgcctgttctagagatttcatgtaaaggggatcatacacgatgcatccttttgtgtccggcttcttcactcagcatcacgttgtcaagggtcaccacatcatagcctgtgtcattacctcattccttttatggctgagtcgtactctgccgtgtggacagaccacattgtgtttatctgttcatcacttggtggacattgggtttgttgcaactttctggctgttgtaaatagtgctgctgtgggcctttgagcacaagtttctgtgtaaacatctgccatcacttatcttggatagatagctgatgtgtgtggaacacagtaga

SEQ ID NO: 11674 - DNA, 1052 bp, Homo sapiens
tgggccaccatatgtctgcaggtggcagagcactgaagggcccggggccacacacactgtggtgtggttcccactgcctcctggacgttgtcttgccgagccctcctttcctcttcctcctcctcctgggatagctggccaccgacggtggtcccagtgctagtgtctcagtgtcatcctcccccaaccttggccccacccacccgcacagacgcctccgccctggtggcagctctgacccgcttctcccacctggctgcggataccatcatcaatggcggtgccacctcgcacctggctcccaccgaccctgccgaccgtaagtgggtcctgggatggcaggttctgtccacctcactggcttgtctcccctgggggtccttatggagcctgtcggtggggggggctccactcacggtcctttctcaccccaggcctcatagacacctgcagggagtgcggggcccgggctctggagctcatggggcagctgcaggaccagcaggctctgcggcacatgcaggccagcctggtgcggacacccctgcagggcatccttcagctgggccaggtgaggcacagctgagtgtgggtttgggaggcttgggcctgcctctgacctctgcacccacctctgggttggctgaacaggtgtttgtgcgtggagcctgcagcctcaggacacagggtggggaccatgcaccctcctcgatccctgtggtccccaacctctttcccaggctgcccgtgggacggggggggacggaggctacccctgtctgactcccatcctcaccaggaactgaaacccaagagcctagatgtgcggcaggaggagctgggggccgtggtcgacaaggagatggcggccacatccgcagccattgaagatgctgtgcggaggattgaggtgagcacgggatctggggactcccctcattcctgtggagctttgggggccggaggccccaactgggctgggtacaggctgcacccactcctgctctcagcctccagacagaggacagatggcgttttccaggggcctgtga

SEQ ID NO: 11675 - DNA, 1030 bp, Homo sapiens
cggtctgtgcctgccccaggccagagcaggggacgaaggtttacctcttcccctcctggccttccagcctcaccttctccctgcatcacagagagaagcaagcagaaggcccggaggagaacaagatccagctcctcctcctcttcttccagttcttctagctcctcttcttcctcctcgtcctcctcctcttcctccagtgatggccggaagaagcgggggaagtacaaggacaagaggaggaagaagaagaagaagaggaagaagctgaagaagaagggcaaggagaaggcggaagcacagcaggtggaggctctgccgggcccctcgctggaccagtggcaccgatcagctggggaggaagaggatggcccaggtactgtgctgcccagcacctgagagggagaaggtcgcttcccaaggcctggccaccacctccgtcttcccttccagtcctgacggatgagcagaagtcccgaatccaggccatgaagcccatgaccaaggaggagtgggatgcccggcagagcatcatccgcaaggtggtggaccctgagacggggcgcaccaggtggggagctttcggcctgacttacaccacaggatctgggagtgttggctgaagatgtgtgctctcgggaggagtggggccgggcggggttcctggtgcctgaaaaaggccaaatgtgggcaaaaatacggtcacttggagtaagtagttgcaggggctggaagggcctggaggaggctcttgaaagggctgttgttggccgggctgaggctggcaaggcagagcccagctccactgccttcatcagggagagtgggtgaggccccagggtctgtccactcaaggctgcggggtgggagccctgggacccctctgccggctgcttgtggttctgctcctctggcattaggggacctgcctattccttgctgaacggagaccctcccacccccaggcttattaagggagatggcgaggtcctagaggaaatcgtaaccaaagaacgacacagagagatca

SEQ ID NO: 11676 - DNA, 1034 bp, Homo sapiens
gtggaatttgtagattgcttttggcagtatggtcattttcacaatattgattctacccatccatgagcatgggatgtgtttccatttgtttgtgtcatctatgattcctttcagcagttttgtagttttccttgtagaggtctttcgactcctgtgttaggtatattcctaagttttgtttttgttttttgttgttgttgttgttcgtttttgcagctattgtaaagggggttgagttcttgatttgattctccacttggtcgctgttggtgtatagaaaagctactgatttgtgtatgttaatcttgtatccagaaactttgtgaattcttttatcagttctaggagctttctggaggagtccttagggttttcaaggtaaacgatcacatcattagcaaacagtgacagcttgacttcctctttatggatgtggatgccctttatttcgttatcttgtatgattgctctagctaggacttccatactgtgttgaagagaagtggtgagagtaggaattcttgtcttgttccaattctcagggggaacagtttcaacttttccccattgagtattatgttggctgtgggtttgtcatagatttttttttgctggttttgttttgttgtgagacagtctcgctctgtcacccaggctggagtgcagtggggcgatctcagctcactgcaacctccgcctcccaggttcaagcggttctcctgcctcagcctcccgagtagctggattacaggcatgcgccaccacgcccggctaattttgtattttcagtagagacggggtttcaccatggttaggctggtcttgaactcccaatctcaggtgatccacactcctcggcctcccaaagtgctgagccactgcacccagcctcagtttgaagaattttttaatttccatcttgattttgtttttgacccactgctcattcaggagcaggttatttaatttgcatgtatttgcattttttgtttgtggggtttttttggtgttttgtttgttttgaaacggagttt

SEQ ID NO: 11677 - DNA, 1047 bp, Homo sapiens
agtgttaagcatctaaaagtatatttaacattatctgactaatttatctgacaaattttaataaaactatgcttcctgggttcatttttctcatcacagcaaaatcatttaaactacttgttttaaaagtagtgcattaattaatatatgaagaaaactaaccatctatcattgaaatacttaaaatatgactaaataataattatggccaggcatggtggctcacacctgtaatcctagcactttgggaggccaaggcgggcagatcacctgaggtcgggagttcgagaccagtctgaccaacatggagaaatcccgtctctactaaaaatacaaaattagccgggcatggcagcgcatgcctgtaatcccagctacttgggaggctgaggcagggagaattgcctgaacctgggaggtggagcttgcagtgagccgagattacgtcaccgcactccagcatgggcaacagagcaagactccatctcaaaaaaacaaacaagaacaataacaaaataataataattaccactgagggccaggcactttattaactcaattgatctttacaaattgttattctcattttttggaagaggaagcgtgaagtccaaacttgctgtccagactctagcttggctgggtctttgcttgtgccacccaacctcccttacttacccaaagcgaagataatgtttgtcagctcctcccatggcagcttacaaatcacctatgtaattattagttattgattctcactgtctcacttgacccccaaattagtagttacctgtttcttaggctttactgcccttgcaagctattaaattggatatttagatttagatttttttttttttttttttttttgagacagagtctctctctgtcacccaggctggagtacagtggagtgatttcagcccgcttcaccctccctctcctgtgttcaagtgattcttgtgcctcagcttcccaagtagctgggattacaggcacctgtcaccacacccagctaatttttgtatttttagtagagacggggtt

SEQ ID NO: 11678 - DNA, 1222 bp, Homo sapiens
tttgggagacagagtctcactctgtcacccaggatagagtgcagtggcacaatcttggctcactgcaaactccacccccctgggttcaagtgactctcctgcctcagcctcccaagtagctgggattacaggcatgcgcaaccacgccaagctaatttttgtatttttagtagagacggggtttcgccatgttggccaggctggtctcaaactcctgatttcaggtgatttgccctcctctgcctcccaaggtgctgggattacaggtgtgagccactgcgcccagctggtgtatttgttatatacgtataaacttgcggagaaaggactgttttgaaacttacattgaatgatctgtatttacatcttctaggtactggagctgcagaattgagaggaataggtgctagacttgtaatgtgtcccctgcaattgggggctcaaatgcagagaaagctatgaccatgagtggggcgtggggtgtggctcggtatactagaatgtgaaatggataagatgatctatgtgggtgcttcctgctccaaaaccatgattctcatggcagttaagctgcaaaacttctctgccttgcagaaatagaagacgctttcaaatggctcaacctggttatcagagtgtcactttcgaatcctctttcaccctctgggtaatcttttggatattcaactgtagtaggctctgcagagggcataggcagagtacctagcccactggagttagtggttgggctggagaccctgccttgaaggatgctaaagcatgagctgatttgggagggattgtctgagcagtgacctgtcaccacctaatcctactcagtcttatccgttccaatgggagtcgagggaggctaggtgggaggatggctacaaacagccatttgcttatctgtggatgttggaaggtgctctggtggattatggaattcaaggttcttggtttttacccatgaggacactgaggcccagactggggaagtgacttggcgatggtcacaaaacacctctgggcagatgcagggaaataagtccagcccctgactcccaggccatgggccaggctgcaggagctggatgccttgaagtgtcttgtttgcatctatgactttgcacaaatacagtgaatctggctgtgggccctcaagccttaatggccacagagtagtggtgcagggcagtgagctatgctgaaacagccacca

SEQ ID NO: 11679 - DNA, 1038 bp, Homo sapiens
ttcaaggttcatccgcggtgtaataagtatcagtgcttcattccttttttttatttttgagaaggagtctctctctctcacccaggctggagtacaatggtgcaatcttggctcactgcaacctctgcctcccaggttcaagctattctcctgcctcagcctcccaaatagctgggattataggcgcacaccaccacgcctggctaatgtttttatatttttagtagagatggggttttaccatcttggccaggctggtctcgaactcttgacctcaggggagccaccctgcccagcccttcattcctttttatggctggataatactcccttttgtggataggccacattttgtttattcatctgttgatggacatttgggttgtttccactttttggctattacaaataaactgttacgttcctgcatagatttttttggggacatatgtttttaattctctggaatagatgcctaggagtgaaattgctgggtcatatggtaactctgtgtttaactttttgggaaaatgtcaaactgtttctaaagtggctgcaccattttatatctgtgagcagcgtactatttacttaatttttttttctttttttttttttttttgagacagagtctcactctttcgcccaggttggagtgcaatggcatgatcttagctcactgcaacctccgcctcccaggttcaagcagttctcctgcctcagcctcctgagtagctgggattacaagtgtccgccagtacacttggctaatttttgtatttttagtagagatggggtttaccatgttggccaggctggtcttgaactcccgacctcaggtgatccgccagcctcggcttcccaaagtgctgggattacaggcaggagccactgtgtccagcctatttacttagttatttaaaagtaaaacattttttaaaaaggtaagcagttttccaacactgtcactccacaagtgttttaagtgacagatcattgcagtgtgtctcccgatacccaggccagtctgctggggca

SEQ ID NO: 11680 - DNA, 1052 bp, Homo sapiens
gtgcttggcgtgtgcgtatgtgtgtgtcctcagccttgttttcgtcatcttggagcaagtctcttggcccctctggacttggttttctcctggatctatcggggatcctcacaaagcttgtcctgcctttctgctggggtcactgcagggcttggttaagacacttgtgtgaaggaaccttgtgacttgtagcatgtggcagggaaagccaggtgtgactctgaaggtggattttccaggacttgttggcagagccattgggagcctgggactgtgggaaaggctgcctgttctttcagaggcttttcttgtctgttttctggaagtttccatgttgtggcccagggtgttaaacagcagtggcttggggccacttgctggttgcgtagccttgggccagtcacttaccctgtccatgccttggctctccagtctgtaaaatggtacaataatgtagtacctgctagagctgtggtgagcattcaataaatgtggtcatgcaagaggaacccttagaaccatgcttggcactcagtaagtgccagctaactgttactatcgccacctctgcttcctcagtgttgtcactcccgtctgctctttcccacgctgctgccatactaggagcctgcagaccagtgagcagcaccggctggaaggccagctggcctatgcgggcctccgctgccatgtttgcagagggttgagctatgcggcaggcagtcaatatttgctgcagtgaggtgtggttattgcctttctgtgaaggaaacgcagggcatggcaggtccctctgctcttccccctcagggacacctggggctgcccctctgctctccctcacccccacagtgaccaccgggttgggagaggtgctcaggattgcatcctacacagagaggtggggaccccggctttggcagtttcagcatttcagccctcatgcggactccttcagcgttcttgatgttaaatgcgcagatacacagtggtctagtattctttctctttttcttttaattgatgaagcttcatttaaaaaaaatttttaa

SEQ ID NO: 11681 - DNA, 1755 bp, Homo sapiens
gggcacagcctctgatctgctgtacccgattttcttttttctttttaaggtggagtcttgctgtgtcgcccaggctggagtgcagtagcacaatcttggctcactgcaacctccacctcccaggttcaagcgattctcctgcctcagcctcccgagtagctgggactacaggctcctaccacacctggctaatttttgtatctttaatagagacagggttttacctatttgccaggctggtctcgaactcgtgaccttacgatccgcccgcctcggcctcccgaagtgttgcgattacaggcgtgagccaccgcgcctggcccactgtacctgattttctgtgaagtcagaggcctgattttcaggtgtgggcaagttggacattttttaacgtgctgcatgggcaacagaacatatctacgagccccattctgttcttgggtccccactgtttccctcctgatccagttgaaccccaggtgacagatcttccacaacagatgggtgatgagaaaaggagggatacttgggggctttgccatcactggggacccatcatccccagtgatgccaaatgaggccgattgtggcccggtgggcatggcctgggcaatcagggctcaagaccatcaagctacgcacgatgggcctaggagaagatactgatgctgtttttctttctctctgcccagtctgaagaaaggaaaagaatagatgaattgattgaaagtgggaaggaagaaggaatgaaggtaaggggctgctgtgcttgctgcatcatagctaaagctggaagagctcaccttccctggtcccgtggctgagagtggccaccatgtggctttcaccctctaatggccatggtgaccaggcagactctattaggttgtcaaagagccaaataccaaaagttgttaaggaaatgtcttatgaaggaaacataaatgggctttgtatataaatgttatccaggggaagcttttcttagaaattgtggttaaacaattcagtggctttttgtacattcacaatgcaatgcaaccattatccctgtctaatttcagaattttttcatcctcccaaatggaaacccttacccattacttaccactgcccaccatccccacctctcccctgcccagcccctggcagccactcagctgctttctgtctcagtggagttgctcttctgggcacttcatataaatcggattatacaatatgtagctgatgcccagggaaacttttaaaaggagaaactaatacatttttaaactgttttcctagataatgacaatgcccaagaaatgtgcttttctcttactgtatttcaaccacactcagtttgggcgagaggagaagtactctctacagtggggttcagatgggcctagactagggctccgggttcagaaagcttccacttccacccaccacctagggggattccggcttaagtcctgggcccctccagcaaccccattcaactccatgtagaatagagtgaggagacacaggagagaaatcgtggaatgaggtagagacccagaacactgggcctgctgtttgcctaggaaggcatagcgcatagcccctagacagagaaaccaggtgtgtggatttgagctgtgtcactgtctagctgtgtggcctcagacacgtggttgtgcctctttaagcctcagtttcctcatctacaaaatggggcagtctccacctagcagatctctcacgagctctgatgtaactgctttg

SEQ ID NO: 11682 - DNA, 1035 bp, Homo sapiens
tggttactggatcctacactcactttctaccaggaataaactgatctttcattgcaaagccacggcaagccaagtttatctgatgaaactctccctagcgactaagatgccttttctctgtgacaggtaagtgtgctggtgaatgaaggcacaattctcacactgggttatttgtgagctccttccatagagtaatccaggcaattaactggcgaaaaatacagcagcaacacctcacggttacgcttcacctctctctgactcaggtaaacaggaaggccacttagcacttctgacacagacagaatcaaaacactggtcccctcctctgcctttctttttaaaacaagatcaaatggctgacttgaagatggcttggaaaacaaagcagtttagaaagctacagggtgaacatcaaaaacatagggttagtgtcactcggggaccgcagtgggcgttgattactgacccgtcacttaaaggaccttctttactggatcatgggcaaggtggttttaaaacagaaacagaagagacaaaaagaattatcggtgacagagccgagaattctgaggcttcgctcgagtagaccgagcgcagccagtggcacagctgaaatcacactcaacatccacgtcaaatggagcacacaggtggcggccatgcagcttaagtggccagggggagacaggtcagccccagcagtagccgaagcagacattccaagggggcagctcaaacaaaacccaaaacacacacagtgcctacaagggaaacaagtcgtcggacaggctgcagtgtggggtcatctattatcagtcccgctgctaccataggcattatggctgtaaagatcctggttagagaagtacagatagacacagagaagataaaaacgggaggcatgaaaaagaaacaaactccacagacaccagtggaagggtttgattagggtctaagttagcggttgaattgtgtcacctgcctctaaattcacttaaaattttttttttttttttttttttttgagacaga

SEQ ID NO: 11683 - DNA, 1020 bp, Homo sapiens
gactcactgcaacctctgcctcccgggttcaagcgattttcctgcctcagcctcctgagtagctgggaatacaggcgtgcgccaccatgcccggctaatttcgtgtttttagtagagacggagttttaccatgttggccaggctggtcttgaactcctgacctcaagtgatctgcctgccttggcctcccaaagtgctgtgattacaggcgtgagccaccatgcccagccatattcttggtgaatttcttactgccattagacattacttataaagtctatgacttaatcttttgtgacattttatgcatttctctcttgcctccagattacaggaccagataacaaaggaatttacaaaggagacagagaatccagtgggaaatacacatttgctgctcacatggatggaacatacaaattttgttttagtaaccggatgtccaccatgactccaaaaatagtgatgttcaccattgatattggggaggctccaaaaggacaagatatggaaacagaaggtgagatgaacattcagaagatttacatcacattccaagagctaattttagttctatacatttttacctgtctgagtggagtacttattttttttaaatttcttaaccaaaacctttttgtgaaatacgctttttattttttgcaagtctcctaattaataaaaaagtttcttgaggctagtgtttgtttttttgttgttcttttttcttttatttatttattttaagattgtgtctcgctctttcgcccaggctggagttcagtagcgtgatcttggcttactgcaatctccgcctcctgggttcaagcgattctcccaagtagcgtcaggcgtatgccaccatgcccggctaatttttgtatttttggtagagacggggtttcaccatgttggccagggtggtctcaaactcctgacttcaggtgatccacctgcctcggccttctgaagtgctgggatttttttgttctttacatttgtcccttctaacagattttc

SEQ ID NO: 11684 - DNA, 1024 bp, Homo sapiens
aaataaaatggtagtcaggcatagtgacgcacccctcaggaggctgaggcaggggattgcttgagcccaggaattttaggttacagtgagctataattgcaccactgtacttgagcctgggtgatagagtgagatcctgtcttgaaaaaaaaaaaagatggctgggtgcagtggctcacgcatgtaattccagcattttgggaggctcaagcaggtggatcacctgaggtcaggagttcaagaccagcctgaccaacatggtgaaaccccgtctctactaaaaatacaaaaattagctgggtgtggcagcgtgtgcctgtaatcccagctactctggaggctgaggcaggagaatcgcttcagcctgggaggcagaggttgcagtgagctgagattgagcaccactgcactccagcctgggcaacagagcgagactctgtctcaaaaaaaaaaaaaaaaagacattgacaaatgtgttttgttttcaaatccttctatagctcaccagaacaagctagaagaaatgatcaatgagctagcagtggcgatgacagctgtaaagcacgaacaggaatacatggaagtccgggagagaatacacagagccagtaagtgaatgccgtcactttgcagcagtgtctgatggtgaaggttgttttactcaacagcttgctcgtattttcctcatttggaaactttgcaaattttatgtgaaagcattgactttaaaagtgtacctacacgagatattttttgagcatacacatgtgtggagctttgtagtttattattgggacattcattgtaaactagaaaatgctattaagatttagtacaagtttttaagagtttagttttctggccgggcatggtggctcacgcctgtaatcccagcactttgggaggctgaggcaggcggatcacctgaggttgggagttcgagaccagcctggccaacatggtgaaacctcgtctctacaaaaaataaaaaaattagctgggtgtggtggcgtgcacctatagt

SEQ ID NO: 11685 - DNA, 1102 bp, Homo sapiens
ctgtacattcacaacttatgtttctttgagattaatagatattgggggaaaaacgcctttttaggaaaattatagtgaaaatttgacagttgattggcataatttcttgtttgaatgctgcctccattatataggtccttccaggaactcaaacactgtaagtgaaatatgggagtatagtttttattatttcttcttttccttttgttttcataatataatgcagtttgttcaggaaatcagcacaaagcctgatagtactttactaaaatgactgcattctttggattccttcagtctatggttcaagtcactaaagattcatttttgttgagtccttatgagaaacagcagtatgaatcttgacggtttctgcccgtcctaatggcagagctctctgacttgggtgtatgctgccaggctgggtactttcatactttgttttcttgttttgctttaaaactacgactcagcatacattttcccacatacatttttacattgtaccttaggactcagtcatctccacttaaattgatgacacaagcagctaataaccatttctgggtttctgcctaaccccctaattgtctgttaaagccaattctctgggtgtcccagtgagtggtggctttttttctttccacattggcacattcacttctcccactcttggcatgtaagaaataagcatttacataattggaaaaatctggatttctgatgccaaagggttaaagcttcttggatttcatttcattgatatacagccactattttatttttgatcagtggcctttgggccactgttcagggtactgaccatcagtgtcagcattagggttttggtttttgtttcttttgggtctttcttttttggcacatgtgaatcttgttttgtgtaaaatgaaattactttctcttgttctctgatgatgggtttaaaattaaaagagcatccggttttggtatggggatgatccaggattatgttgtgactgatacatattagttacttgtgcttttttttttttttttggatctttgcaagggcaaaactacaagtaacgagttttatataattaatttaaatttgttacag

SEQ ID NO: 11686 - DNA, 1028 bp, Homo sapiens
taaatgtgaagggacaatatttttgatatattgggttaaataaaatattaaaatttatttcacccatttctttttacttttcttactatggctattagaaaatttaaaattgtttatgtggttcacattttatttctattggacagcaatggcctgaagcagggtcctcactgttggcactattgacattttgtgctggaaaattttttgttatggggctgtcctgggcattgtaggatgtttaacaacatcactggaatctgtccatcagaggacatcacctcccaaccctggttgtattttatttatttatttatttattgaggcagggttttgctctgttacccgggctggagtgcagtggcacagtcacagctcacagtagcctcgacctccctgggcctaggtgatcctcttaccttagcctcctgagtagctgggactgcaggcatgcaccaccacacccacataattaaaaaaattttctttgtagagacagagtctccctgtgttgcctggctggtctggaattcctggccttaagggatctacccacctgggcctcccaaagtgctgtgattatagatgtgagccaccacgcctggcccaccctgggttttgacaaccaaaaatgtctccttacattgtcaaatgttccctcaggggttgagcagggggatagcaatcactgtgtagaggcagttagaataatattacacctgctgtgatttaagtgagctcaggccctggggaccagggctgaatcctggagggagcagcctccaggccaaggcctgaatctaattgaggttttttttgattgctaaaaccaggtttcttttaaagtctggcaacctctacagtgcttaaaatgagagggtttatttgaatcatgattctgtgatactagagctggaagggaccctaaaacccaatgtcttcaacgccttcctggttcagagaggaaagtaggagcgacagggctagaattcaggactcccacctcccagctcagctcactgtcccca

SEQ ID NO: 11687 - DNA, 1719 bp, Homo sapiens
ctcatcagaagtgggagttgtagttgccattgatgtttctgacaagctggactgggtgagggaggaggctagctcttcccaagcagagggaaggactctgcatagggtagtgtggagagcatgggcgctagagcaggactgcctggtgcatatcttggctttggcccctaccagatttaaccgatgaacttagaggtccttacttgtcaaatgggggccacagtagtatacagcttcgtagggttgctgcaggattaattaattaatccatgcaaaaatgttcatgatagtgcttagtacacaataagtatgggttgagcattcctaacttgaaattccaaaatccaaaatcctccaaaatctgaagcttttttgagtgccaacatgatgctgagaggaaatactcggagcattttggatttcggatttccagattagggatgctcagctggtaagtatagtgcagctattccaaaatctgaaaaaattcaaaagccaaaaaacacttcgggtcctaaggaccttggatgagggatacttgtactactgttagctttggacacactgtggctactgttgcattctgttattttgcattcgttttgcatttagagatggctgagtacatgagaaaaaattccaaactggggatttggttttggtaaaaataggatgaatgcattcaggtgaatttaatgtctctaatttgggagtttgaatggaggacttgattgcattatgaagaaaagcagtggggtctgcgtccatggaggccttttaaataatgatgtacattgctttctggaaatcagtattcaccttagagcagtgacttctgaacttggcatcagaatttcctgggggaactcttaaataatagggattcttaggttcaatctcagacctactgaatcagaatctgtatgtcgtacccaagaatctgcatttaaaaaaaaaaaatctatcctttggctgggcgaggtggctcacgcctgtaatcccagcactttagagttgaggtgggaggatcgccggatgccaggccaggagttcgataccagtctgggcaacatattgagagtctgtctcttgaaaaaaaaaaaagaagaaaaaaaaaggtaaataaataaaaatctaccctggagatggtgtaatggctggcatgtatattgggattgggagttgggaactgttgcctgttggatgactgtgtttctctgagctatatgattttgtgacatacaaattaacttttacaggcagcagcacatgttgatatttattctgagctaggtagaccagttaacattccgactaaagtctgtcctacccatgggggaaatgacattccttaaaatttaatgctgaaactgaaaatagccatggggattattattgccaaatatgttttttattagtttccctttttattttgcaggtatgcaaggcagatgagaaatttaatcagctggtccattttcttcgcaatcataagcaggagaaacacctggtcttcttcaggtactcctctggtctctgtggtagaggcatcagggattcagccagaatgtgcaggtgcatgcggcctttgggttttggattccatctagcatggttctctccggaatgcttttggctgcaaataactgaaaacccaacttttgttgtccgaacaaggttggctttatttttctcccgtaaaaagtcgtccaaaggcag

SEQ ID NO: 11688 - DNA, 1044 bp, Homo sapiens
cactgccattttccttgtcattcccctagggagggcttgtagttaggttgcgtctgctgcagctattgctcactgttcccctctcccggttgtagaaggaccaaagtggccaatgactctaagccctctgtccctcttgcagcacctgtgcctgtgtggaatactatgggaaggctctggaagtgctggtgaagggcgtgaagattatgtgcattcacggaaagatgaaatataaacgcaataagatcttcatggagttccgcaaattgcaaaggtgggtgggcttcattgaaggtagcagctctcctgccacactgctctttcaggtccccaaatgccccattctctagtagcctgtgctgtccgcatgtgttgtctttcctgcctggaaccctcttccctctctaatctggttatcacatctctgtaaacaccccgagcctccattgccctgttccaattgctttgccttttgctatgtcatttccctagttactgaacttctgtgctagacagcaggctccgtgacacaggagtcctgtgtattgtcttcactcccagattgccctgtgcccggtccagggaaaggttgtgatgactgtcaagcagcaaggagcaaatccatttgtcctgtctgggtagaaactgtctgtggcttaaggccggacacggtggctcacgcctgtaatcccagcactttgggaggccgaggcgggtggatcacgaggtcaggagatcaagaccatcctggctaacgtggtgaaaccctgtctctactaaaaacaaaaaattagtcgggcatggtggctggcgcctgtagtcccagctactccagaggctgaggcaggagaatggtgtgaacccaggaggcggagcttgcagtgagccgagactgcgccagtgcactccagcctgggtgacagagtgagactccatctcaaaaacaaacaaacaaagaaacaaaaaaacaaaaaactgtctgtggcttattaggcttgtgactatacagcaggcaacttgtgtctaccaatgaccataacttgt

SEQ ID NO: 11689 - DNA, 1065 bp, Homo sapiens
gtgtgtgtgtattttgggggtgcatgtgtgtattttgggtgggtaggtgtgtgtattttgggggcgtgtgtgtattttgggtatatgtgcgtatgtgtttattttgtgtatgtgtgtgtttgtgttttgggtgtgcatgtatatacctgcccatgtaggtgctctccagaatgagttcatcaaaccgttacgtggagcgggatttcgggggaaatgttactgtcatctttatactttaggtatcatttaacaatgataaatgggaagacaaactggaataatgttggttgtggttcgcagtatattgtgtgacattggtgtgagaggactggcatgtgcctgggtggaattaacatgactgtgatttttaggtgattaaggctgcagaagacagtgcgttgcagtatatgaacttcatgaatgtcatctttgcagcacagaaacaggtgaactgagagcctgccgtttaaagtatttgtttcataacgaaggagtcaatttcattttttgaatgctctactctgaggtattctgactacgtaggcttatgaatgggcaaggaatccagaatctgtattatgttctagtcttttctctattttgggtcctggaccacttgagaatctgatgcattcccaaaacaatatgcactcaaccacagttttgcatagagtttcatggtattcaggtaacctttagcccatccttggaccccatgccaagaatccctggtttgacagtttgctgtataaaccttgcatcagtttctttatcttgttgctgtggcgaagctgtaaaaattcagtatttttactttgcaaagagctgaaatgttcagatgaagtataatacattttcttctttggtgtgtttatgaagaaagaaaacctccttaaaatttcagttttaatgtaaaatgctgctatagccatgcataatgttctctgttgtggagtggcagcatgatgtagtgaaaagagcctggactttggagacatgccgagtggggtgacagctttctcacccgctggctctgtgaccacagcccagccatgtcctgggtgc

SEQ ID NO: 11690 - DNA, 1080 bp, Homo sapiens
tggtcaggcgcggtggctcacgcctgtaatcctagcactttgggaggccgaggagggcggatcatctgaggtcaggagttcaagaccagtctggccaacatggtgaaacccatctctactaaaaatacaaaaattagctgggcgtgatggcgggtgcctgtaatctcagctactttggaggctgaggcaggagaatcacttgaacccgggaggcagagattgcagtgagccgagatcacgccactgcactccagcttgggtgatgagcgagactccgtctcaaaaaaaaaagcttcataaccactgatcttgcccaactctgagcttatgtgtaaggatactcaaacctggagagattaagcatcttctatttaataagtgtttattggatacctagtatatgcaacatcaattctggagagaaaaggacaggaaagacaagctctgcttgtaccccaggagtgaacatgtacatgtctaaagtcattctgggataaactgaggattgttttcattgactttttttgtgtatttactcttccactgataggatgataaagaaactaaaaaggtgtacaataaactgagtttatttatcagatctgtgtttagctttctctaagtatcccgaagttgtttgcttttatgttaaggaagaagaatcagggcttgcatgttaccataggtttatgggggggaactgaagataactgtgtcatctctgtatacatttcccttttataaaatgaacggaggctgatgtgtacttttattgtgttttccattatgtattcttatagaccctgttttgagtcactttaaaaatacagcaatgttttcctttcagaaggtgttggaagtgacagtgaggtggaagagaggtctggactggtgttcctccaatgagacagattccttctcagagtccccctgtatcctccagacccttctggtttcagcatctcataattcatcctgttcagcacatctactcattcaagtggaaatttatgccaactcttctctgacccataatgcctcaggcaagtgaagtctttgactgtcaaaactttcatgttg

SEQ ID NO: 11691 - DNA, 1047 bp, Homo sapiens
ctggaccagaatatgcaaagcctatagttagacaaccacctggcttttatttttttgagatggagttttgctcttgttgcccaggctgaagtgatctcggctcaccacaacctcctcctcttgggttcaagcgattctcctgcctcagcctccggagaactgggattacaggcatgcaccaccacgcccggctaattttgtatttttagtagagacagggttccaccgtattggccaggctgctctcgaactcctgacctcatgatccgcccatcttggcctcccaaagtgctgagattacaggcatgagccaccgcacccggcctttttttttttttttttttttttgaggcggggtctctgtcacccaggctggagtgcagtgcacaatctcggctcactgcaatctctgcctcccaagcaatcctcccacctcagcctctggtgtagctgggaccacagatgctccaccatgcctggctgtatttttggtaaagacggggtttcgccttgttgcccagggtggtctgtaactcctgagctcagatgatctgcccacctcggcctcccaaagtgctgggatcacagacgtgagccactgcgtccggtccatctgacttctcaaagactttagaccttgacttcagtgatttgttgtagtcttgtatgcttctctataaaattttaataaatgaaatgtcttatttttgtagaaaatttttattaagtgccctgtgactttaattcatatatgtagctatccaatgcagaatgaatattctcatcgctggcctgaactgagtaaaatgcatgagaagaactcaaaaatgttagaaattttagcttatcacaaattagttaaagtcataggagttttatttataccagagagaatcagtcttttctttagtttttaatacattcgtgttgattgatgtttcccatattccgtagaaaggattaagaaatccttaaaaatgcatgtaatacaaaaacacaaaatcactgatggggaaagatatgggggctgcgggaggaaaataataa

SEQ ID NO: 11692 - DNA, 1041 bp, Homo sapiens
tctcttgatgacagtgagggttcttgttggcatgaagtgtccttctgactcagttaagcgagaggatttcttggtaggatgggatgggcgttggtggctcacagggttgacaggggtgaggccaagcttgggaatgggtaggaacccagggagcttgctggatcctggtaggccatcacgctgccgcagtgacaatgacgtctaaccatttcctgtgccctagggtcatgttctccagaggcaacctcccaaaagagggcatctgattgattgggcttagatttttctgcccacctccgagtggtactaggggcagggagaaggaaggaatggctcccttagctgccaccaggataggcaggtgcctggaatgatcctctgtcaatggggagaaagtcctctaagggaagtcgggtgccaggtggacagaaacaaaaacatgcccactccactgaaagcccctgttgttcttccccaggtactgcacaaaaccgaggactatttgaggcaagtgctatgtaaagccgccgagtctgtctacagccgtgtgatccaggtgaagaaaatgaaggccatctatcacatgctgaacatgtgcagctttgacgtgaccaacaagtgcctcattgctgaggtctggtgtcccgaggcggatctgcaggacctgcgccgggcactggaggagggctcggtaaggctgccttcctctcctctgccaggaacagaagagagactgatggaactgataaattcagagaaaaaaaggaagtgagaatttcatagagtaatgagaatgcagtgtgttgactcttcttttgtttttttaaaatattaattaacaaaattaaaatagagatggggttttgctgtgttgcccaggctggtctcaaactcctggccccgagcgatcctcctgcctcagcctcccaaagtgctgggattacaggtgtgagccactgtgcccagccttggctctgtttttgaactgaaattatggtgagctggtcattcaaagctgtatgtgagtacatgtgtttttaa

SEQ ID NO: 11693 - DNA, 1030 bp, Homo sapiens
ctgagcaacagagccagaccttgtctcaaaaacaaacaaacaaacaaacaaacaaacagtgattttacagaatgtctctctctctctctttttttttttttttggagatagagtctggctctttcgcccacgctggagtacagtggcatgatactggctcactgtgcaacctctgcctcccaggttcaagtgattctcatgcctcagcctcccaagtagctgggactagaggtctgcactaccatgcctggctaatttttgtgtgtgtatttttagtagcgatggggtttcataatgttggccaggctggtctggaactcctgacctcaagtgatccacctgcctttacctcccaaaatgctgggattacaggcgtgagccatcgcgcctggcccagaatgtgtctcttaacgtggtctttctgtatgttctttcaatatatagtctttggtggtggttttgttaatttcataaacgttctcctgaattatagtttttggtatttgctctactgtcttgctttggttttcttcttttaggacctcctgtcatctttcagtggaaccttctttgcttatcttcagtatctgtcactttcctttgaatcctttttgtctttcgttacttctttttgatttgtaagatttctcctcttcgcgccttctgtttctcttacggcagtatgaggaagggttcttcacttttgtgttccttctagttttgtcttacttctgaaataatttctttctttttttcctaattccttcttgagttctgttacctcatttctgagtcttttaaaatctgattcctggtgctttttcctgtcctgtattttttttttaattcttttaactccttttgaaacagtaagttacaatggttttatttgttttgtggacattctttctggcatcttctcactgtctgtggggatggtattctactccttggcttttttcttcttatgaccttatgtaagattgggcttctccctcctcttgctcacttttaaatgaaattagacttt

SEQ ID NO: 11694 - DNA, 1032 bp, Homo sapiens
gtaacacaaggctgggcacggtgctcacacctgtaatcccagcacattgggaggctgagacaggtggatcacctgaggtcgggagttcgagaccagcctgacctacatggagaaaccccgtctctactaaaaatacaaaattagacgggcatggttgcatatgcctgtaatcccagctactagggaggctgaggcaggggaatcgcttgagcctgggaggcagaggttgcggtgagccgagatcacaccattgcactccagcctgggcaacaagagtgaaactccgtctcaaaaaaaaacaaaacaaaacaacaccaccaaaaaaaaccaaaaaacaaagcagtaacccagattcgttgaatatggatagttattttcttcttggatagtaattttttatctttccttgtttatgtggaagagagagagtggtgctacaatcccctcattcatgaatataatccccacaaaagaaacaccccccactcggatccgcaccaacaaattcaccgagggatttcagaacatcgtggatgcttatggagtcggaagctacagagaagtcaatccaggttggaagtctgatttgtaaatacccgtatttccaatggcattgttgcattcttgctctaagaatggaatagatatttggaaagagaggctgaccattacttttttgctatcttatttaaaagtataaggttttaaatgtaaccacacaatcctatcttgtgaattctggagaaagtcaagattgttatgtatcattgtgtttgaatgaactcaggttttccatatttgctgtgaatcagaaatctctttcccttttttctgcagctctctttaccatcatcaccttcccgtttttatttgctgtgatgtttggagacttcggacatggctttgtgatgtttttatttgccctcttgttggtgttaaatgaaaatcatcccagactaaatcagtcacaagaggtaaaaatataaacactccagctcatatatctggttaggtggcattagcagtgaccga

SEQ ID NO: 11695 - DNA, 1047 bp, Homo sapiens
actgggaggctagaaattttaaaattagctgggagtggtggtgcgtgcctgtggtcccagcttctcggaaggctgaggtgggaagattgcttgagccaggtcaaggctgcagtgagccctgattgctccactgtactctagcccctgggcagcagtgagaccccttaccttaaaaaaaaaaaaaaaaaaaaaaaaaggttgggcgcggtggctcacacctataatctcagcactttgggaggccgaggcaggcggatcacctgaggtcaggagtttgagaccagtttggccaacatggcgaaaccctttctctactaaaaatacaaaaatcagccaggcatgctggtccagctactcaggaggctgaggcaggagaatcgcttgaacccaggaggtggaggttgcagtgaaccaagattgcgccactgcactccagcctggttgacagagcgagactcctcaaaaaaaaaaaaattatcttaatagaccctgtttcccttttcctaacccacctgaagggcaggctgtaggaattaattttcagacagtaagagaagcagtcaatgagtggggaagttacggggactcagactggccggggcaccgtggggaggtcagccatggtctggagtccctcttggcacatcttgggttggccacttgcaccatttctgatttcattgtattcacagctaaactttatgacaaaatagacatacaggagcatgtatggcacatgtatgtaaatgtgtgataacacatgtatgtctcctgcccaggtagaggggacataacccaggaccttgagagcatcctgacccttccagtctctgagctgtgtgtgactctcccttgccttgccttttgtcaagacttcctaggcacatctccctaaacgctatgtggttccatctggcaccctttgacgttaacaccgataaaattgttttgtaattgtctgtggccctggtttaaggaaatcaatggttctcagattgaaagcatcaaaagaaaagcctgaatattgtttccttcttaaacttagag

SEQ ID NO: 11696 - DNA, 1036 bp, Homo sapiens
cactcatgggtagccttgatcacaggagtcctccctttgcacaattccagtaatgcacacatgttagtttccacagtgtagttaacacctgttccccagcagcatggttcccatttcagtcaccacagtacctagccgtgcagttaggtgcaggtgcatttaccagcctacgtgcggcaggtgtcgtgatgaagatgctgataacccaccagtggtgctcggcaatgtttcaggacgttgaaggtttgtgcaaagggtgcaatgttgcaagtgggttcagacgtagaaaagaataggacaggccaggcacagtggctcacacctgtaatcccagcactttggggggcccgaggcaggtggatcacctgaggtcaggagtttgacaccagtctgaccagcatggcaaaaccatctctactaaaaatacaaaaattagctggttgtggtggcgggcgcctgtagtcccagctactcaggaggctgaggcaggagaattgattgaacttaggaggcggaggttgcagtgagccaagatcacatcactgcattccagcctgggtgacagaccgagactctgtctcaaaaaaaaaaaaaagctaaaaaaaaaaaaaaataggacaatttggcaagtattaggaaagatgcttgctctgcatcaggtcacccagcttgccaatttacacagcaggaaccaagcactgttcaaactaccctaataaacttttttttttttttaaataacagacaaaagactttaatactcagtgcttctaatgtttcaaagatagatttaccattttttcatttccctatattttttgttaaaacattaataactctcttattagctgggtgctgtggctcacgcctgtaatcccagcactttgggaggcctaggcgggcggatcatgaggtcaggagatcgagaccatcctggctaacacgtgaaaccctgtctctactaaaaatacaaaaaattagccgggcgtggtggcgggcgcctgtagtcccagctactcaggaggctgaggcagga

SEQ ID NO: 11697 - DNA, 1029 bp, Homo sapiens
tatttttgtaacaaaatataaatgaagatattttaccatgaagagattgcacttatccttgagaacagtctaaatataaatgaagatattttaccatgaagagattgcacttatccttgagaacagtctaatgatactttttttactttcagactgtttctagctaaagttctgataaaagtattgagttaatttaaactttcaaacactgtttagatcagttgaaaactaattcttaatagccattgttttataatctttagtttaaattcatctgtttgacatttggttttttgtgaacttgagtcagtcctattgaacattttgacctatattcttgcaaattatgttaatttttcatattttagtttgattttagacaattattttcaaaaagaaacctgactttttttcaccttcttgacattgtgagtgatacacgttaaaaggctatttgcccgcatcctcctctatcctgtttcgaggtagagagcttggcacttctgttacaagctgagagtctggaggtgctgagtttaacgtggctgtgcagctgatttcaaggcatgagctgaacagcgttgacacagccgtgacttacaattaaaccctttcaattacagtacagattctgtgtgctacttgatgagatgttacccaaggccagtttggacttactgctttttgtccctcatattaaattatcaaatgatgccgatgaaatgcttgaaaatgattctgctctcaaagttatgcttccctagaaaggtgtcatgtcgggcacttgtgttgggtgactatgacatcccagcagtgctggtcaggtctcagagttgctttcacctagagctgatgcttccacaaggggacatttgtgttactttgctccaggggtctgtcataaaaacaatggtaactacttcatccctaggaagcccaagacttcagggcactgttagctgattggtaaataagggacacgatattcacgggaattgtttactgctccccactagtaattctcatggg

SEQ ID NO: 11698 - DNA, 1045 bp, Homo sapiens
cattttttaacaactgctgcaccatgttccatagtttcagtatatcatggtttagccatttcccaaattgatagcagtttaagttttaactttaaaacagcttttttgctggtggtggttctctgatgagatgaaatttcggtgataggagcacagatctacgctaattatcgagattcggcatttatgatgaagttctcttttggttaagaaattgatatgtggaagcagccacccctcccctatggtagttctgactctagcagttagaagttgtgtgaccttggggaggacattgaatcacaccaaacctcggttttcttttctgtaaatggcctgctctgtctgctccatagagttcagtgatacagtgcgtatgtgttgtggaatgtaaagtagtatatataaaggttggttttattagcctttgtgatccaaaaattatttgcaatatcatttatattttttgaccagatgtgtgtgtatcatatcacagagcactacagatagtcaactttgaatgctttttaatttgtgactttttaaattaatttttatcaagtactgacaatacattagtcttcttaacaatattttgcaaagcattttttcctagggctttcttttcttcctcttcattaaaaaaaaaaaaaaagagagagagatagggtctctttctgttgccgtggctggagtgtagtggcatgattctagttcactgcagcctgggactcctgggctcaagtgatccttgtgcctcagcctccccagtagttaggaatgactacaaccatgtgccaccacacctggctgatttattttatttttgtaatgacaggctcttactatcttgccccaactggtctcaaactcctggcctaaagcagtcctcccaaagtgttgggattacaggtgtgagccactgtgcccagcccctagtggttttacataccttaaaaaataaggcatataaattagttgactgtgaataaacatattagcaaactgaacactagacaatactcgcactataatatttaagctt

SEQ ID NO: 11699 - DNA, 1045 bp, Homo sapiens; identical to SEQ ID NO: 11698

SEQ ID NO: 11700 - DNA, 1045 bp, Homo sapiens; identical to SEQ ID NO: 11698

SEQ ID NO: 11701 - DNA, 1024 bp, Homo sapiens
cattctcattttaacatattacaaaacacatgaacaaatccagagatcccaaggctgtgtgtgtgtttatgccagtaagaacttgtcataaatatcggtggaaaatgacactttataccaaagcaattttattgctcagatttaggcatatgtaaataaactgcatttctagagtaaagtagcacatacagattttgtgtatttttaggcggatgtatgcattttatagactctgtaccttcctaaatactgtgtctaaatatggcttcgctgagagaccgactttccctccccctcttaattctttgctggccctgatccaggtcttctctgcatcatgaattatggtgggggtgttgtatttacagaattttaaaacctaagacctgcagacggcttttggggaggtctagaacctttttaagttatgtgcagaattttgtgtacctgtaggtctatgcatttttctaggaaagggggctttccttatgtttgtgactctaagagataaagaacactggctggcatatggttactcgttgtttggggatcttgggaggcaaaaggggtgcctaagagttccagttagtggaatggataggaaatgatgggtataataaacggaggaaaaaacacaacgctgtgttgtgaggaaagagggaaaaggacgttggcataaaatggaaggatacatgtgcatgtgttgttatgctgggcccaggaggtaggctgtgtggcagtttcgatgtcatacgcttaagacaacagttctgcgaacagtgtattaaaagaatataggtgaggacaattgagtattcagaggggactggctggacgtggacggaattggctacctgaatggaaaacactagatctcaactgaatctgtcttggttacagaggaggcagttcttgctgtaaaatgggtgagggccccagtactggtgtgggttgtatttaggttctcaaatagacctattcatattgctcaatgccatgttctctcatgtctaatttttatgtc

SEQ ID NO: 11702 - DNA, 1155 bp, Homo sapiens
tcagcatttgtgaattcagtgttcgcagggacctcataaaacataactcctgcgaatagcaaggactgctttatctcttttctgaccccaaactggattcaagtaggtgctctgcaagcctgttctgcagcttctttcacttctgaattccccgcaccctccatgttgggtgcccattgctgtctgtgcagtggagttttgccaaccacgggtgcccacagatatccacggcctttgggcaaacctgtcaagagtgtgtgccatggcttctggaatgcactggaatattccctggctgcatgctgtgcttctttctgcggggctgtgtgttacccactccataagagggaaacagctcagtaacatccctacagcccatcctgggctattcagagccccaccgagccaaggtgctggcactggttgtaccctacgcctgagttattctttgccatgttgattgcaggccactttatacaaagatcgcgactaggacaatttctaaaaagattgaggccaggcgcagtgctcacacctgtaatcccagcactttgggaggccgaggcgggtggatcacctgaggtcaggagttcaagaccagcttgaccaccatggagaaaccccatctctcctaaaaaaatacaaaaattagccagggttggtgtcacatgcctgtaatcccagctacgcgggaggctgcagcaggagaatcgcttgaacctgggaggcagaggttgcagtgagccgagatcatgccattgcactccagcctggtcaacaagagcgaaattccatctcaaaaaaaaaaaaaagaaaaaagattgagacttaaaatgggaccctactgttttgaatcaaattccctttaaaaacatagactcaatttctttcccttcgtcctccctgcccctgccccaggtctggaaccattctcccccatccctccccggaccccagcctgcttcatcacacatcgggattggccgttcaaattctccttttacaggacgtgtgctgcaccgaagggcttaacattccctccttgttttcagtgggctggggtgtgcaggggtccccgggtgggagcaggaggctgaggagagcctgctgcggcaatgaaagcaccaggttcctcctctttctcaggcgcggccc

SEQ ID NO: 11703 - DNA, 1043 bp, Homo sapiens
tttttttttttttttttttttgatttttttgagacagagtctcgctctgtcgcccaggctggagtgcagtggcgcgatctcggctcactgcaagctccgcctcccgggttcacaccattctccttcttcagcctcctgtgtagctgggactacaggcgcccaccaccacgcatggctaattttttgtatttttagtagagacggggtttcaccgtgttagccaggatggtctagatctcctgaccttgtgatccgcccgcctcggcctcccaagtgctgggattacaggcatgagccaccacgcctggccaccctcctcttctttctaatgcagcggtcctcaacctttttggcagcgggaccagttttgtggaagacagtttttccatggactgggtcgggggatggtttcgggatgattcaggcgcattacgtttattgtgtactttatttctattatcattacattgtaatatagaatgaaataattatacaactcaccataatgtagaatcagtgggagcactgagcttgttttcctgcaactagacagttgcatctgttccttctgggggtgacgcggacagtggcagatcatcaggcattaggatctcacaaggaacatgtaacctagatccctcgcatgcagttcacaatagggttcacactcctatgaaaattttttttttttttgagacagagtctcgctctgttgcccaggttggagtgcaatggcgtgatcttgactcagtgtaacctccacctcccaggttcaagcgattctcctgcctcagtctctcccaagtagctggaattacaggcgcacaacactacactcagctaattttttttgtatttttagtagagatggggtttcagcatgttagtcaggctggtctcaaactcctgacctcaggtgatccacctgccttggcctcccaaagtgctgggattacaggtgtgggccaccgcacccagccatcttttttttttttttttttttttttgagatgctgtctccctctatcacccaggctggagtg

SEQ ID NO: 11704 - DNA, 1180 bp, Homo sapiens
gcagtctccaacctgtcccagtatttcagcccagcctcggtgtccagcagcccggcccgcgcgctcctgctggtcggcgtcgtcctcctggcctactggttcttgtccctgaccctgggcttcactttcagcgtcctgcacgtggtgttcggccgcttcttctggatcgtgcgggtcgtcctgttttccatgtcctgcgtgtacatcctgcacaagtacgagggcgagccggagaacgcggtgctgccgctgtgcttcgtggtggccgtctacttcatgaccgggcccatgggcttctactggcgaagcagtcccagcggccccagcaaccccagcaaccccagcgtggaggagaagctggagcacctggagaagcaggtcagactgctcaacatccgtctcaaccgggtgctcgagagcctggaccgctccaaggacaagtgaaggtcagccggccgggcgggtccacagttaccagcacgctgtctcagaaaacgaaaacggaggaaaaaaaccccaaaccccaaacaatcttaataaacacgactgagcaagaaagtggcgctgtgtagggctatttccacccacccggcagctcttaggacacattcccagaagagcggaaagatcattgacgtggaactacacacgaagtgtaattagtgggggaaaaaatattttttaaacaaaggatataaccatatttagttgtacagtaagagaaatttatctgtgcatagagcataaagttaattttttcaagcatttaaatacatcttttgtaaggttttttaataaaggcagattgagtcaagtttattaaaactttacatggaggggaagaatatgctaatttgacatttgagaaaagtttaaatgcgagcgtttgttttcacagcttagggattggtgggtgaggtctgtgtgcgttattttcatgttcccaaactgtgagctttatttcatgttatttttggtggatgttgacttagttcatgaatgttgtcacttctaaatgtggacagttgggctgcaggatgcaactcaacctcttttggatcctagagacccctgccaagcccccatcagtcctatttttaaatgaagacatcgccatttctagaagacctgagattttcttccctctgtgcttcgatgtattttaacctcaacattttga

SEQ ID NO: 11705 - DNA, 1065 bp, Homo sapiens
agaacgcaaaggtttgggtcagtgattaggaagactataatatgactttgtgcatgcccgggagggctgccttgtagagaggatgtgagcagcttagtcgctcatctggccctgtgattcaggcttatggagcgttaagaataacagctgtcaaatggcctagacatggttaatgcaatttgttgctagtggaaatcctgaattgcttcctttctgtgatcactgctacttcttaagatgcttttgatgaatgtcatctgccttacaagttgacacctgataacttctccctgatgggtttccgaactggctgacttaaccaaaaagccagctcttgccatctatcttgcattaaaaggaattcctgaggctcctaaggggtcagctgccccactcctgacttttttatttttaatggtctataccttctgcaacatttttgtttatggccatttgaatagttggactttgactcctcacttgtgaataataggaatatattttgcagaatctaacataatacccttaaaattcatactggacaaccatcagtgtgatgtatagtatctggtgtaaacaaattttattcagcatattaaattattctgtgttttgcttttccttgatatgtaggaggtgcaccagtaccagtttttctcttgtggtggcttaaaacgctgattgccatttgcattgtctactgaaaagctgtggcagcgagtggtattattgaccatgtgttctcatgtctttttgcagatttaaaggttttattgtagtgtccatttaatatctgcatgtgtgtttaatctctgaataccatgtaattaaactgattaacttgtgatggtgatggtgattagcacacactaaaaacccaatgaagcaattgtctccctcttcttaactggaaatcacacttgtgaggtatggtatccattatcaacagtggattcatgattgacttcatattttgtgtatctggttataaattttgtatagcatttaatttggcacttaatataaatccatttgatttgaatagtgtgtgtgtgtacatggtgt

SEQ ID NO: 11706 - DNA, 1123 bp, Homo sapiens
ctttgggcaagtcactcaccccgttcctgccttatcagggttagggagtggatactattgcccctctttttttctgagacggagtctcactctgtctcccaagctggagtgcagtggcgcgatctcggctcactgcaagctccacctcctgggttcacaccattctcctgccttagcctcccaagtagctgggactacaggcgcctgccaccatatccagctaattttttgtatttttagtagagacggggtttcaccatgttagccaggctggtctcgatctcctgacctcgtgatgcaaagtgctgggattacaggcatgagccactgtgcccagccttattgcccctctcttaaggctgtgaagggcagtaagtgcttctaatgagctcagactggggcctggcacatagtaagcattcagtaaatgctcaatatgttttaactggcaatcatttcttccccactaaaccaagaactctcggtccatcttagaatcccgggcacagagagggcaccagtgtagacatgccatttgtggtttgtgtgttcgccacagccaaggtctggacaggccccttacctgtgggtgagggagcttgggtgtcaggagtgttgggactcactttgcataaggggtggctggggctggagggagccaggtgcagggataccttgtccagggccatgtggccaggaaagggaggagtaaggaccatggccttagagtaggttgaatgtgttaccttgatatttgcatagagagcgtcagaagtaaacagagggacacccaagtcccagcaggacatgaaagagtctgagaaatcgctgtgcatgcacttagttaagtggacgtggtgtctttccaggaagggcaggcacttgctctcggggggtgcatctgggcactgagaatggggaagaggggcttgcctggctgggggtgagcttctgtttagatgccttgttccagtgccagtgcccaggcgctggtctagggggtgaagacttctctcctggatgcttctgtcccagtctcctgcccatcagaagtggctggggaggaggaaggggtggcattctcagtccaggagggtttggtgccaggaagggccatttctgg

SEQ ID NO: 11707 - DNA, 1047 bp, Homo sapiens
ccaagtccctgttacctgtatgtcccatgcacttttttaaactgatgctgaagttggccaatgttttacttaaaaaaaaaaaaaaaaagtgcgttggggcagctccaagggcgtctctgtaataatgtcacagtcattcccttgtcccccacccgcccgccgtgaactttgctgaggggcagaggaagtggcgggagtagagagaagcttggcttggtctgcgcctcctcccgtgccttccgcagtggccaaggtgttcagctggaggaagacccctccttcctgtcatgactgtgcatcctgagagcacttcagccttccttccccctgtccagtcagcactggcggggctgccagaagttctcaagactcagtgagccccagaggagctcacaagtccccagggggagccccatctcagtaacccccgccactacaaccctgccaaaccaggagctcgggctgtgcgccacaccctttcactcccttccctaccgttggctgttcttgccgcctctccactgtcctccttcatacgtttgattgagcggttcctcggttcctctgtgaccccggctaggcactgccatctctcacgcgtgccgtcgtagtagcttccgaccagtctcatttctgcttctctctactgtacacctttttatctttttcttttctttcttttttaactttcatcacctttctactatccagtacacaccctttaacaagtggatccgaaccagtgtttgtttctgtctctctcccagattaaatattctttagagggctgggctgggtagcttacacctgtaatcccagcactttgggaggcagaggcggatggatcacttgaatcccggagtttgagagcagcctgggcaacatggcaaaactccatctctacaaaaaagaaataacttagctgggtgtggtggcacacagcctgatcctgagcccgggaggttgagtctgagtgagctgtgatctgtctactgtactctagcctgggtgacagggcagaaccctgtctaaaaaaaaaaaaatcct

SEQ ID NO: 11708 - DNA, 1035 bp, Homo sapiens
ggggccccaggtgaggctgactggctgcctgggggaccacactttgagctgcccagcctccctcccacaacactctgccccttagactcccccagagtcagcgtttctgcttccctgctaagagtcaccagggagctctgaaaacaaatgcccgccgctcctgacccgttaattagttatcctaatgagcttaattaacttaatagtcccactgcaggcggtgctaccaggcagccagggtggagagcctgtgctgtgaagtccttactcacaggttctggggccactgtatgtgccctgggggtagccctaggtgttggtcttgaactgcttgcatcaggctcatgtgcgagggaatagcagccatctgggcgatggctacccatgtttgcagatggcagtctcttaacacagtgtaaccttgaggatggccaggagggaagtgaatagaagccttgtctgagagtgctttaatctgttactaacattaataatctgttaataattaataatctggactaacactcagggagtgtcagtgaatgttatgagttccaagaacaagcccatgcctgcatggaaggaatcccctgtttcaggaaagcagtgcccttggctggactgcagactccacgtgcagtacagaccagagacatgggtgtggtgatcctgccttttaagatggggctcattaactagtgtatgcacgtgtaggcttatgccattggttggcataaatgcactgcttggaggattcaggttcctctttaattgaagattccgagaaccaaaatatggggccactttgctttgctgttgtggcctctttggaagatgaatcttcttttgtatacactagcagagctgtgctaacaggctctttctgtaaggtggggaatctttttggtagtgtaaacacacactctatactcttcatatttcagtatatgtctgtaaatacttctggtatttcttgatattgatgccttccttggcatagtggttgttctcagatataagttgtgctttgatcaa

SEQ ID NO: 11709 - DNA, 1044 bp, Homo sapiens
gaattattttggatgccctttttaaaccaccatgtcttccccaggagaaacctttatatttaaggatgccttctcatgcaagacagcaaaattcttcattttagtctgtatggcatttgtatttcagagtaattatccctagcaaatggctgcaggctgcgtttaactgattcccacctccttccctgagagaaagtccatttgtcagttgagtatagggccaatgttttgagatggatgttgctgctgaattcaaaatagaaaaccaccttttcccaagatggcttgtggcttctgcggctgtttctagtgcagaaaacaaatctcctgtttgtgtcgcccctttggtggttcttggccacctacaacaatgctgcctgtcagctttgggggtaagcctaggcacacttcctgggtgacagtcaatagctgggattaattttatttgttcttgcacagatatttgtatcttgctattgtaaacctcaggatctagtaagttagtgacaacacatgatatttgctgagcggttctctgtcattgagctgtagtttaggaaattgaccccacatctgtaggaagggctcattaatctagcatctcctcctctcccttctccccacgggggaagcatcttacttcagacccacttggtgagtgcttccttttgggcaatcattggaaacaaagcgtttgctaatcaggtgatcaatagcaaacaaaggacatgggctcagaagacttcaaggccatttccaaagcctccttcagccgtgttggtacacacatggcttgttcattgtaagtgatccttctccgtggtggttatgaaaacacttaaaatattctctaaaagacagcccttggccctgtcagcagtgctgattaagcaacttgaaaccttcactcgttcgatgagttttccttcaattagcttgaatctctgagatctaactgcctcccctggtcccaggaagtttccaaatctggccaccgtccccctggaatcctggcttttctgggggtagaaacagagggaagtg

SEQ ID NO: 11710 - DNA, 1035 bp, Homo sapiens
ctgtgcattcatcttatttctctagttgtggcatttcccagcaaaaggaggaaaaccgagggtcgcctagagtcctgtttcacacaggttctgcagattcaggagtgagattgtattcatccattttcctactgctatgaagaaatgtctaacagtgggtaatttataaagaaaaagaggttgaatggactcagagtttcacatgactggggaggcctcacaatcatgatggaaagtgaatgaggagcaaaggcatgtcttacatggcaacaggcaagagagcgtgtgcaggagaactgtcctttataaaaccatcagatcttgtgagacttattcactatcgagagaacaactcgggaaaaacctgcctccatgattcaattacctcccactgggtccctcgtacgacacatggggattataggagctacagttaaagatgagatttgggtggagacagctaaaacatatcagagatgaagtgaggtgaaggctgaacgcacaggggaggtatgtggataagttcatgaggggtgggtgcagaacctgtgactggggggctgcgtggtgtttggatttcctgccacctttctcctgagcccattggcaggaggagaaccctgtttgttcctagccgtcccttggggctggcagccacctgtcttctagggtcttcctcacctcatcataactgcactgagtgcttcctggggcccctggaggtggtcatttatttcctgtggccctggctggatggtagacaggaatcccatgagcacaggcgagagccagttgggtacccttctggtgcctgagaattatgcaaatggggataggtgtagtggtccctgctcccccccgaccccaactccttctcatcatcatcattagaaaggcctcatgagatccagtctcgtcagcactttgctgatgaattaatcacaactggctggcgtgttctggccactgtggtcttggtcacccttggcctaatgacagtgtttccagagataagaatatagaagttgccagagc

SEQ ID NO: 11711 - DNA, 1034 bp, Homo sapiens
aagtgaatgaattttaattacatctcaggttaaaaaaaaaaaaaggcgccagtgatcgaggactcgtcactgggctctgttgctcctgaagtttcctagcccacaacacaccaacactgccaagggctcttctggattcaaggtgaaacacatgtgccataaatcttggagctctgaatgtttggaaagggcccgactgtgagaagaagtaacacaccgtcccgtgcagatggctggctctgaggaggagttcatgggagcttggggacactcttgcctctagttctaggaagctgggccacttctgaagtaatggcaatatcaataaagtaatggtctttatcatagaataacgtgataaaatatatagagaagtaaaaaagtataaataaaagtaaaatcatcataaaacatagtagctaggcacttctgaagctgtgtgtgcactgattcattcacccagtgactcacagccttatagcctaggtgctggcacccctactttcattcgaggaagtgaactcaggttcaggaatttacccagcatcccccagatggggtggcaggagccacatcttccctgaaaactttcttgcccagggtgtctgctgggatttaggaatggtctatgcctgcatttttatcctggtcaggctgaccctgaaccctgagagatactcttttttatattcccatctggaatatgcactgccggggtcagtggggtgtctggagggccctctcgaggccagcttggatgtgacacgtgtcgtgggtcccaacggggcccagtagagtgtgcagcgttagaaaaatgaacatgctcggctgggcgcggtggctcacgcctgtgatcctagcactttgggaggccaagatgggtggatcatgaggtcaggagatcaagaccatcctggctaacatgagaccatcctggtgaaaccccatctctactaaaaatacaaaaaattagctgggcgtggtggcaggtgcctatggtcccagctactcaggaggctgaggtaggagaatgg

SEQ ID NO: 11712 - DNA, 1050 bp, Homo sapiens
agctcatcaggggcaaagttgcatgaatatttttttatttccttccctgctttacttccagtgcctagaatgctgtgagacacagagtggaagccatctgccagtaattactggtacaagaggcccttccttgtccccatcccttcccctgctatcaaaaatgtttcaaaaattatctctatcgactgcacctggcttatggttggaaagctgaatgtcaaagacaaaaatattgttgatgctaccccctagaggcagtgcacagctgcacacagaaatctcagtgaaagtgtgaatttcacagctttgagaggatcttcttcatagaaatgacacatcacaagcaacagagctgatcagaggtagagcttaccaatatctttaacattttatatgttaattggttacttctgtgaccatcttgacatatacaaacatttacctgacaccagcatattcatttttactgataggattttataattttttttctagagttagtagaattttactgcctatccagaactcatgatctattggctgccaatatataaaaaatgttttctccataaagcactttaaaatatttttcattaatacatgatgtaaagtataattttttcctcttcccttgtaaaattgggatgtatcatatatactagaatttctcataggttggcagacatggatggagtatacactatctatagggcaaaaccctggtgcatgctgtagccatatctgctgacctgtgagaaattccagtatatatgctgacctccacagagtactttgaacagggaaactttaatataaagaactatcaactcctgtgtataacaggggattggaataaaaagggctgagaagtatagagaaccttaaaggaataacagatgcccaaagcagcctacctagggctgagatggagcggttaggtcagtggacttgctggattcactaaatggcagtaatcattatcactgcagccatctttcaatgagggctccctgtgccaggcactgtgctcagccccttatgtagagtatc

SEQ ID NO: 11713 - DNA, 1092 bp, Homo sapiens
tgctctgctgcccaggctggagtgcagtggcacaatctcagttcattgcagccttgaccttccaggcttaggcgatcctcccgcctcagcctcccgagtagctgggactacaggcaggcaccaccatgcttggctaattaaaacaatgtttttttatgtagagatgggggtctcaccatgttgcccaggccggtctcaaactcctggcctcaagtgatcttccctccttggcctcccaaagtgctggaattacaggtgtgagctaccacgcctggccttccttcctttaattctaaatgcactgacaggcattatgtatcaaaattaaaacgtccatgccttgaacccagcaattgcgcactgagatgtttatcacacagataaatttccacgtgtgcaaaatgtcttaataatgactgcagcagttgttcgtaagaggagagatttgaggatagcctaaactgattaagcaaattatgacatatccatgcagggaaatattttgcagctgttaaaaaatgaggcgggccaattttaagggagatggaactgtaagatgtgcttttaatgcataaagcaagatgtagggagttagtactgccaagtgtggacaagagaacaatacacatgtatatgtttgcaaataggtggagcaacaccctaaggagtcctataagactgggggagttgggtaccttctgggagggtaatggattgcctgggggacaagggatgggaggtgataatgttgtatggtgtgcttttgtattcttcgaatttcatgccatgtgcattttttaacttaaattatataataaaaatattttaaaagaaaaaaaggcaagctctcaatcgtcctttccccttaaaatgagaaaaaagggcctattttagtattttccatagatttttgtctctttgtccttgtgaccgagagcttccagagctatttttctttgctgtgaaattgtaatgttttgtatctggcttctagatttccagtgcagaaatgaaatctaaaaatctcaaacgcccacgacatggcattctggggtaggagggaagaaacccccaccctggctgtattctgca

SEQ ID NO: 11714 - DNA, 1030 bp, Homo sapiens
cagagaggttggcagagtataacctatgggccaaattgagcttgtgagctaagaatagtttttaagcttaaaggattatatattaaaaaaaaccccaggccaggcgtggtggctcacgcctgtaatcccagcactttgggtggccgaggcaggtggatcacctgaggtcaggagttcaagactagcctggacaacatggtgaaaccctgtctctactaaaaatacaaaaattagccaggtgtggtggcgggcatctgtgatcccagctactagggagactgaggcaggagaattactcgaaccctggaggtggaggtctgggtgagctgagatcgcgccactgcactccagccggggtgacaaagagagaccctaaaaagaaaaacccaaaattaaaaaattaaaccccagacaaagaagaatatgcagcaaagactaaacggccagtacaaccttaaatatttactctctggccctttatggaaaacatttgccaaggtctgctgttgagcattgacttatgtgaatctatcactgctttcccattctatcgccagtgggcactgggtattaccttccctttaaaatcaatttattataactgagcataattataattaaaatcttaagagtaatatatgtacatggtcaaaatggaaacacacagaatggcatggaagcaagtctagttgctcaggccaggcctgctcacagagatcaagtaattgctcacagcattttctgctttggagatttttctgttttggcatggttggggctgagggtcaggtttgggttgggttaggccttctccacaccacacttgtaaaaaatgttacccaagttttcttttgatacttcaatgatttcttttgaaagtattagatatttggaatttattttagcatcagggtgattttgggcttcttatccaagtcccagtagctcatgagattgtctggctgtgagttatcagtcaagtctgtgttttctgactgccttgaagtcatttaatttgaaagcgaatgtg

SEQ ID NO: 11715 - DNA, 1047 bp, Homo sapiens
ttgaacccaggaggcagaggttgcagtgagctgagatcgcaccactgcactccagcctggggacagagcgagactctgcatattaaaaaaaaaacagaagggaattctgtatctattaagcaaaaactcctcatttctcccctcctgccagcctctgataacctcaaatctactttttgtctctataactttgcctattctagatatttcatatgtaagtggagtcacacaatatttgtcctttagtgtccggcttcctatatttaacataatgttttccaggctcatgcgtgttacagcatctatcagaacttcattcctttttataatattccattgtgtggatagatcacatttgtttattctttcatctgttgatagacatttgggctgtttccactttttggatactatgagtgatgctgctgtgagcattcatggccaagtatctttgaatatctgttttcagatctttagggtctatagctgtgagtggaattgctggatcgtatggtaattctatgcttaactttttgatcaactgccaaactgtttcctacagcagctgcaccattttatattttcgccagcaatctgtaagggttccaatttctccatgtattttcccagacattattttccctttaaaaaattgtagctatcctagtgagtgtgaagtggtatctcattgtggctttgatttgcatttccttaatgaataatgacgttgagaattttttatgtgcttatttgccatttgtatatcttctgtggagaaatgtctattcaagtcttttgctcattttttaattgggttgtttgtctttttgttgctaagttgtagaagtttctattctctggatagtaaacccttatcacataggaatttgaagatattttctcccattctgtgagctgtcttttcactctcttggtatagtgtcctccaatgtagcagtccccaacatttttggcaccagggactggtttcatggaagataatttttccatagacagtgatgggggattgttttgggataaaactgt

SEQ ID NO: 11716 - DNA, 1051 bp, Homo sapiens
gtcttccttttggtagagccattgttgatagatgttaagcttatgttattctcttagctgaagttaaggagattgagtgggaactgaacagtctgaagacctcaaggaatgtatgcagacctgagtagcattgttctctttcacattactggattgttgttcttgtaaaatttgttccgaaaccataaggaacctgaaatctgctacctttgactgtggaagctctcatctgcttgagaacagaaggtctcagtctgttctgcactttttactttgaaatactatttagcacatccttcatgaacccattattcgatagccttgatagatgtttgtttattataacaggtacatctcctttcacaggaaatgcaaaaaggttatttcttccttagctcccaaaatgaaggctgtcttggaaaatgggaagcagaatgccagaattccagtccaatgggtataacacagtgtggcttgtcactaagaaatttactaggatactattgaactctttgacctctactattatagctcgttgtactagttagggtaattaatgttagctgctgtaacaaataaccctctatctcagtggtttaacacagtgtaatgaggcttggatggagtttctgagccacatccaagtagctacaaacaagtccaagtagtaatcagcgatgctagccacttctgtcctatgtctatgtcatctggaaactatgcttgttgctatgccatccttgaagtttccatggaaaccctggaagatctcacaagatgttttcaaaggccaggactggatgtggcttatatcacctccacccacatttcatccgtcaggctgcagatacatggctttaagagaggcttggaaatgtatccttcctatgtacccaggaagcagaaatggcgaggtgaacatcgaggagtgtcaaacatgtttttgccattttctacacgtctgctatttgtctcttgctgtgctgtcatcaaaatgcttttcacctactacatttttttcaaggccagtctcacattctcctctgaactt

SEQ ID NO: 11717 - DNA, 1033 bp, Homo sapiens
atatggccttaaatattcagagtttagaaagagctgagccaagtcacaggagattatatgcaccaatgacaaatatggatgatgaactgctgttggttgctattgacaatgcgcaagttttacactatttttactattcccatgtcattctagaaaggagacactgataagagatggtatctgtatgcttacgtcataatgggctcaaacaaatgattcagtctgtagtttcctaagccttttgttctgacctaagagcctgctatgaagccccatggggtggaatcctccttctcttgccctgaagagctctactctagaggggcaggtccaagttcacagatcccgttattgccatatacctggttttctccactccacacaaatgtactaaaagtatcctctgctcatcctcatagacgttgttttggaagatgatacctttttgctcagctgtcacctatatagcctcaggaggatggggattcgtctaacaaattattgcccagtcttcagaggaacaaagtgaaacctgcagatcgcaagctcagagctgtattcacactttttaaggggattccaggactgttgcaagtttgggggcttgtgtcaattgaggcgatttaattaaatggctgtgatgcatttactatggcttcagtgtcaatgtttgtagtaaattttactataactccaagttgaatggagttgtccacagagctatgaccttggcatcatcccagggacatcctcaaatacatggcacattcattagcaccctttggagagatcctctgagtctgtggagttgtcacacagtcatacttcagagtacagaaaacactgaatgatttttagggagagtcttgcagggctcaccaaagatctttgtgccttggaaccatgagttagataagggaaaaatgtgaatttagaaagatgtaagttatggtaatatccaaacaaatgaacttgtttggcctgtgattgtatgacttttgcgggacagaatcagaggacatacatgattttg

SEQ ID NO: 11718 - DNA, 1030 bp, Homo sapiens
tttgtcttgaagtcaatttgtcggatataagcacagctactcctgttcttttttggcttctgttggcatggaatatctttttccatccgtttattttcagtctatatgtgtctttataggtgaaatgtgtttcttgtaggcaacacatcaatgggtctttttaaaaaatccatttagccactctgtttttttattgaagagtttaatcagtttacattcactgttattattaagtaaggacttactccttccattttgttactagttttctggttgttttgtactcttctcttccttcttgctttccttcttattttctttcttgtgaaggtgatttttttggtgatacaatttactttcttgcttttttatattttatatgtttgttacatgttttttagtttgagattaccgtgcggcttgtgaatactatcttataacccattattttaaactgataacaacttaacatggtttgcataaacaaataagcaaaaagaaaactaataaaaactctacacattaacatcatccccccacttttaaactttttgttgtttctgtttatatttttttgtactatgtcctgaagagttgttacagttattatttttgattggttcatcattaagtctctctacttaggataagagtagtttacccatcccacttatagtgttataatattctgtatttttctgtgtccttactattactagtgagttttgcaccttcaggtgattacttattgctcattaatgtccttttctttctgattgaaatactccctttagcatttcttacaggacaggcctgatgatgaaatccctcagcttttgcttgtctgggaaagtctttatttttcctttatgtttgaaggatattttggccaagatgtactattctagtgtcaaagtttttttttcctccttcagcactttaaatatgtcatgccactctcttctggcctttaaggtttttactgaaaattctgttgctagatgtattgaggctccattgtatgttattt

SEQ ID NO: 11719 - DNA, 1023 bp, Homo sapiens
tcctttcaccccaaagactgaggctaacatgttctgggaggaaaaaaacacagaaaacaagacccatcataaggaagatggctagcatctgttgaatgcttgctctgcagatacaaatgtggattatctcgtttaacctgcacaatgacaaatgtgctcttatcagccccatttcctagatgagcaaactaggcacagaggagttaacttcctcaaggcccagaacctggtaaaaggtgcagctgaggttcatactctgctttccagctttattaaggtctgcttgacaaatttaaagattgtatacatgtatggtgtatcacttagtgtttcgctgtgtgcatccattgtgcaatgatgaaatcgagctaattaacatttccatccccacacataccttttctttgtaatgagaatatttaagatccactgacttagcaactttcaagtatactagagtcaccaggctgccccataggtctccagaatgtgaccctcctaactgaaacttcggaaccattgaccagtgtttccttatttcctctcctgcagcctgccagcccctggtaaccaacctcctactctgtttctatgaacttgactttttaagaatccacatataggtaaaattatgaagtatttgtcttttctgttttgtttgtttgcttggtttttttttttttttttttttttttttgagactcgctctgttgcccgggctggagtccagtgacacgatattggctcattgtaacctccgcctcctgggttcaagcaattctcctgcctcagcctccccagtagctgggattacaggcatgtgccaccacacctggctatttttttttttttttttgtatttttgtagagacggggtttcactgtgttggccaggctggtcttgaactcctgacctcaagtgatccacccacctcggcctcccagagtgttgggatgacaagcgtgagccaccaccccagcctgcttgtgtttctttcctctcccccaggcataaccagaacg

SEQ ID NO: 11720 - DNA, 1051 bp, Homo sapiens
cccggtcccagtcccgttcccatccctacacctccggccgccgttccccgggccccgccgccccggatgccggccccgcccgccgccttcccgctcccaggcctggccgccatggcgccgcgggcgggaggcctttgtggggcgggcacgtggggcgctgggggcgcgggagcggggccgccatgggctgcggggccgcgcgagcgctcgcctccgtcctctgcctccgcaggaacgccgcgatggctgcgcagggagagccccaggtccagttcaaagtaggtaaccctgcggggcgggaggcggccgagcccgaccgcgtgcgactcgcgggtccctcctcctggggccacgatggctgtaatggggccccgcatccacattctttgttttaagtgagcctgtggtggttaaagttccgtgactctgggatcttgagaggtgaagtgtttagggtttacttccaaaatgtgtttttcaacagcttgtattggttggtgatggtggtactggaaaaacgaccttcgtgaaacgtcatttgactggtgaatttgagaagaagtatgtaggtatgtgctggaaaaccttgcttgtggaaatatgtgagaaatgggtaagttcatccactcaatcgcatcgtttccgtttcagccaccttgggtgttgaggttcatcccctagtgttccacaccaacagaggacctattaagttcaatgtatgggacacagccggccaggagaaattcggtggactgagagatggctattatatccaaggtaggcatttgtaacttgctgaacggtttttgagaggttttgtgtacttcagtcttcaaggttatagaaaatcaggtctgttccaacaaatagtgtcatttttgggttaaaaaaagacaagtggacttcggggagttgaccaccattttggtggcagagaaaattttattaaagttgtgtcatttgcatgctgtgtcatgctaggcatgctttagaaaaaactatgacttacactgggacttataagtcatatttaaaacaataataggctgtt

SEQ ID NO: 11721 - DNA, 1010 bp, Homo sapiens
gcctgctctcgccccaccagaagttgtcatggacccagctttggcagcacagtatgagcacgacttagaggtattgtggccactttgctgttcagattgttcggtttggcttgtttattcctggcagttttgatctggagtgttaacgtttttccatctcttcgtctaggttgctcagacaactgctctcccggatgaggatgatgacctgtgagaatgaagctggagcccagcgtcagaagtctagttttataggcagctgtcctgtgatgtcagcggtgcagcgtgtgtgccacctcattattatctagctaagcggaacatgtgcttcatctgtgggatgctgaaggagatgagtgggcttcggagtgaatgtggcagtttaaaaaataacttcattgtttggacctgcatatttagctgttttggaacgcagttgattccttgagtttcatatataagactgctgcagtcacatcacaatattcagtggtgaaatcttgtttgttactgtcattcccattccttttcgtttagaatcagaataaagttgtatttcaaatatctaagcaagtgaactcatcccttgtttataaatagcatttggaaaccactaaagtagggaagttttatgccatgttaatatttgaattgccttgcttttatcacttaatttgaaatctattgggttaatttctccctatgtttatttttgtacatttgagccatgtcacacaaactgatgatgacaggtcagcagtattctatttggttagaagggttacatggtgtaaatattagtgcagttaagctaaagcagtgtttgctccaccttcatattggctaggtagggtcacctagggaagcacttgctcaaaatctgtgacctgtcagaataaaaatgtggtttgtacatatcaaatagatattttaagggtaatattttcttttatggcaaaagtaatcatgttttaatgtagaacctcaaacaggatggaacatcagtggat

SEQ ID NO: 11722 - DNA, 1704 bp, Homo sapiens
tggatgggggaccacaagatcctcatcgacaggtcggttcctctccccacccgtcgatccttcccttccctcacccgcttgatctcgtctgatgttgacttgactgcaaggactgcagagagttttctggagccagcggggatctgggggacaccccctcccctgtccccacctcctcctggtgttctggtggggagggggacggtgaaacctgccctaaggcactggctggaattgcgtgccgcgtccgtctccggagggatcgtctctggtcccgcagcccctctcgacccctcaccctgtcgctgggctgcagttggcgattccgcgcggtgaaagcagccagtgcccagggtcttttcctgagtgcacctgggcctgccgcccggcgatgccatggggtcgtgcgctgcttttctacttgccgcgctctcactgctcggtgtactgggagggtaccctgggaggcgtgcctttattcttccgaaccgccgctcactgagacagtggctagaagtgtctcttggacctgtgagttagccttaacctgttatgcccccagagccctcagtggagcgcccgtactttgccggcatgacgtttgatttcccggtgataatccgacgagtttgacagattgaggtagtgagcaaagttgcccgtcagttggtggccacttgacttcgtgcggaccctggccttgctcttggaagagatagtgttcttagggctggtttcactgtctcttaagactgaagggtggagctgggatatagatgtgttgtttcttttcaaatcaaacctgctttaggtcgtcactcgagggtgtctagcgattatgggcagtgggggcctgggattagggatttctaaaggcgtttgatttgaaaaggataacattacatgatgtaggtggtttgctcccctctttcttcccattttttcaatcccccttcccctcgtctctgggttttggggttgttgtggggtggttttttttcttttttgcctgttcggctacttctggggcccggactgaaaagctaaccatgaccaaccattaaactgtggaatagtctctccacgtgaagaaagcccatcgtttgagaccattaaaactggattcttcatagccctggagcatgactgtagggatgacctctgagctggccagaatggacacattaatgaccaaataggcctttttccatccctgacgtttccttttggaattagagctcgaaaacgagaactggtgaagggagggccgcggaatcagatcatgtctggatctgatggctccgtgctgtgctcaagcgtgctgtgccttcacaccatggtttatattgaatgtgtcgcctgagttgtcaggcttgcttttccaaagtgtcacttgtgttatttatcattaaagtttggtaagcaatgaagtctgagctctttgtacagttttcctatcattctgtacatgatttgagttaggtcttccaaaactggtggggagcaaacgccgcacatgtacatgtataatatttttaataataatctacatttgtaagttaaggaggtttacatcaaaatccaattaattttgaaatttaatgaaatgcagtaacttgactaccttggaattttgggcctttttcctgtaaatgtcttttttggtctacattaatatttttggttcccattacaaaagtcagc

SEQ ID NO: 11723 - DNA, 1246 bp, Homo sapiens
atcttgatagttatgcccaggtggtttacaattcaaagatgaaaatcagttatctaggaattgactaccttatgtagtgtcatgctgtcaggaatccacagaaatagttggagagaaatcttagcgataccaattaaatacatacatacctgaaagagcagcggaggggaaaaggaacatggattgagcacctgctaagtgtggaggattatggtagagatgttcacatgggctatctcacctaagccccacttggccctgggagtggatgtgatgacttcacaaccagtgaggaaacagagaacagcagaatcccggagctaacaagcggcagggcaggagtttaactacagttaacccttgaacaacacaggtttgaattgcgtaggtccgcttgtatgaggatttttttcagccaaacactgatcagattgagggatgtgagacccgcatatatggagggtcagcttctttatatatgtgggttcaaatggaccaaatgcagaattcgagcacgtgtggatattggtgtctgcaagggtcctagaaccagtcccctgcgtataccaagggaataccgtgcagtctgaccctatacacactccttctgctgcaccccacctccccccaccaccccacctcatttggaattttgtaaagtgagtttcacttgcgttgtgggtagaagagaaagctgaagatggcttctaggagtaacaacagaaggtaaagaagcagggacagccagtcacatgcttccatcttgctgcctgctgttagcaggtgccttcctccctgcattgttctgaattttttaattttctttttatgcagaaaaaaatgaggccgaaaatttagaggaaaatgaagagcccttcgttgcccccttaggattgagcgtcccgtctgacgtggagttggtatgtgtcctgcatgagcactagttgtcgtcattattatttatcataattcactcctgcttgtgggaaagctcaataatgattatagctgctttttaggcatataatgctttaaaatggtttgtgagttaatggagaaaaagatcacaccctatttattttccccaaaggaaaagggaagaattatagcaaaagagctagactggagcatcagggacttgaggagttgggtgtgattcagcggccatgtagttgaatccccagattttactagcttagaaaaactaaatcaggatcagtggcgagtgggctgctccccacacata

SEQ ID NO: 11724 - DNA, 1043 bp, Homo sapiens
tggaaaacatcacataagagcctcactttcacccagtatcagaatcacttccagatgtaaatgccagttgtggaaattcttaggaaagtaaggatgcttcagcagaatgaagaatcatctattttcagccagcagttatattcaattaattttttaaaaaatgaggggaaaaaaaaagcctgtatgtctaaacagcttttacaatcaaataggaaaaaattctgatagtctagtagaaaaaagatctgcagtgcgaataattcagaggcaaaaatgcccatacggtttttaaagactcaccctcactgcctgctcacaggcatcgtgtccgccgaccgtagaacctgaaatccgtagtaaacacccctccagcgctttggttcagctcagctccagcgaatgttaggatgtgaggcttcgtgttacagtagaaaggagcgcactcataggcatacagaacactgtgcaggtctaagacttaggagaagacggagatttctaggctgttggaatgttattttgtatatgcgagtttgggtagcttaataatagagattaaataaaagaaatgcagacaaaacctacaatggagtgccatttttcagctgtcactcaagcagagaaaaggtgacagacgtttattgtcggtgggggtgtagatttgtgccagcgatgtggtacttgtggagggccagcgggcagtctatcagtctaaaacacacgtgcctccaacccaggatgtctgctctcatttactagtatatgggtgaacatagccacatagatactcatcatagtacagttttagtagtagcaaaagactgaggcgacgcacatcctcggtggaggactaatggagtccctctggtgtgctctcgcggtgggctgcagagctctgggggtgggccagggcccgagcgctgcagggccacccaccggaatggctcttcctgagggtggaggcgaggtgactcaaggggagggcagcacgaggcagtctgttcacgtcagaaggggagggaagtgtctgtagtgcttctgta

SEQ ID NO: 11725 - DNA, 1438 bp, Homo sapiens
tgccaccagtgtttttgccaaaacataagaagtcacctttgcctcagttcccaacaagttcctcatctccatctaagaccacctcagcctggaccttattgttcctgtcactatcagcattttgggcaaagccattcagcaaatctctgggaagttccaaactttccctaattttcctgtcttcttttgagccctccaaactgttctaacctctgcctgttacccagttccaaagtcacttccacattctggggttatcttttcagcagtaccccaattctggtaccaaattactggattagtccattttcacactgctgataaagacatacctgagactggagagaaaaagaggtttaatggacttaacagttccacatggctggggaggcctcacaatcatggcagaaggcaaggaggagcaaagtcatgtcttacatggatggcagcaggcaaagagaggctgtacagagaagctcctgtttttgaaactatcagatcttgtgggactcattcattaacatgagaacagcgcaggaaagacccacccccataattctgtcacctcctaccaggctcctcccacaacacatgggaattgtgctagttactaatcaagatgagatgtgggtggggacacagccaaaccataccagttttatctcagttggaaaatacttggacacaatgtgtgatgagccaaataataaatgcttttaagtatttgggaggatgggaaggaagatcatattttcttaaaaactttgggcttacatcttaaggagtttttggtttgttttaccatttttattcttgcaatatgagatttatgttatagagagctagtagataaccaccctgcctaaaacgaacaattgccagaagggatcttttaggaattcttgaaaattatctgagttcaggagatgaagtcagaagtcatgagaatggagataattgagtggaaaagagaaacttgcagaaggagaaagagtttctccgccctgatttctctcattcacttctagaggaccttgaaggtttctaacatcccctgggtgtattaggcactttcctcattcttgagaatgcagaattcagtaataaaaacaattattcttgaatcgtgttgtcagtgcctgacatttacatgcatagaatgtggacctctcctggggtgcaggtcttcactgtgaataaggcagcactctaactataggcagagtaagattctcaaatcaggcaggctggcacagtctgaaggacctaaaaatacctgtttcagggatctgcatcttcagatggtaatgaaacttttagtaaggctttttttttttttggcaaaaaaaaaaaggtagtattgtagaattttacattaaatagtggaattgccatgaaaacaatttattctgacattgatccagcagccgaataagcc

SEQ ID NO: 11726 - DNA, 1032 bp, Homo sapiens
caccaatctcctctctaagaaccttctcagcacaggagttctgttctgtgtgttaaattcacacgagattaagatcatgcagagatacgagagaactggctctgatttttgcaagaagccagttgaatagagggccttgggagataattaggcagatttctctgacctatgttaagtagctctgcacgtttcagaggaggcagtattggagaaggacttacaaatgtgcttcctgcttttaagcagcttggttctcgtcatacaactatacttgcctttagggactgtgtaggtacctattggaatttctttcttggatttatttggagtaggctttcgtagtactcatagcgtttattagagtaacattacgtcagcatttaacttagtttaaaacgtagtcccctttgggaaattcaatataaaatcctaagaacagcaacaaacctaacaagatatatgtggtcccagcttactgagggttcaactcgatgatggtgcacatgcaatttgcattcagtagaacatcagtaaaatgcttgagatactaaaaactttattataaaataggcttcgtgttagatgatgtcatccagccgtcagctactgtaggtgccctgagcacatttaaggcaggtgaggctgtgccatggtgttcggtgggttataggtggattctgtgcattttccacttcacggtgttgtcagtgtatggtggggttgtcgggaagtagcctcgctataagcccaggagaatcccggcatgtcgtggcagcctgaggacagcaggagccccttggcacactgtgccctcccccgttcatgactagtaatggcacagttattgtaaagctgatgtggcttttgccagcccagacttcagtttgtagactacagcccagcttgtagattttatttctgttgtcaccctgtactagtccagaaattcttaaaatttagtgttcacgagaattgctgtgtacaacatacaaggggctgtatacaaaatccctgtgtcctatagttggtagt

SEQ ID NO: 11727 - DNA, 1046 bp, Homo sapiens
atgcagtgaagctgcagttgtttgcaaaacatgcaggttcataaagttgacgcaggtgatgttggggtgcttcatgagtctctcccaagctgttggccaccaggggaccctggcagctactttagttaacctgtgaagccatcggcagagccctagcttctccagcagcgagggcccccagtgttcaggggacgagtatgagacaggcgctttaccagtgggcctggaatgccctgccttgaaaggagactcctgggaaatggaatgaaacacgcgagtttctgtgaaaacgactctttctggtcatgctgagcaagtcagacaggaaatgaaggaggttgaaccatgcttgccgacttgttttcaatataacaacaacaacaacaaactgcttattctttgttatttctaagaattagcttgtgattggggggaaatgttaattagtaggaaaaatgcaccttttatcactaaaatccccatttttcactcttgacaacaatcctgtctagttgactttagtttctgtcgtgtgcatcaccttcaacaagagcctcccctaacacactgtttataactcacatgtctctccgggcatctgaggcggtgaggacccccgagcagccaggactgagcttggcgagcccctgaagcccaggggtctcacagactcttctcctgcagtgcacttgcccccgtggccgccatcatccccccgccccccgacgtccagcccgtgattgacaagctggccgagtatgtcgccaggaacggcctgaagttcgagaccagtgttcgtgccaagaatgatcaaaggtcagaagaagaattttatatgttaggtatatggcatttgggggtttcgtttagcctttttttaaaaaaatgtaggtacagaattaatttttttatatatttttaagccttttcttggctcaaatgtcttttttttttttttttttttttttgagatggagtcttgctctgtcacccaggctggagtgcagtggcgcgatcttgattgactgtaacctctacctcctggg

SEQ ID NO: 11728 - DNA, 1034 bp, Homo sapiens
ttttaaaatttctgtataatttcctgctgacagtttatagtgacatttaatctctaggctgtgtctgcaccagaagaggctcccacagactctgctcccgagaagccaagtgatgctggggaggatggcgcgcctgaagacgcagccgaggtgggagcacgggcaggctcaggcgggaagaaggaggcatcgtccagtaagaccgtcccggacgggaagctggtgaaaggtatgctgccacttgcatgttggccttgcacattccaccataagttggcaagcgtaggatcctcggtgacctcagactcagcgccctcacctgcaggctggggtggggttggcggccccctggaggttgctgtggtgaaacctctgccttccatgctgtgtcatgcttgcctcgcgtggcattggaggtaacgtgagtgtgagcagcccttaggtatgtgtctgtttaacagtctgttcagtgtactggacatttgtacagaaagtttcaaataatcctttgtactccctgggacttctgaaactatttatatgcaaactgttgtaccagtgaaattcatttattaatttgtcaaagcagattccttgagaatctctaccaggcaatacttcactcactcgatttcagttactttgttatgttcttggagcaagactttgatgtcacaggacagacaggcatgtaaaaatacaaagtcagtgtaattaaaaagcagacagaagcaaaggccagagcaggcccttagccaggaacctcgtggagcagcagtgggctccccccgcgggagggaggttctgtggagtagaggcgttcagctggtgttgcgagaggaacgggaagctctgaggcaggggtgcagccctaggcaggagccccgtggtgcgagctgcccggccccgtgttgagatgcggtaggtggtcagcagtgacttcgggggtggctggtgaaggagccttggccagcttgccccggtgcaccctgtcggggaggggccagcacatctgacaggctttaggtcagcgg

SEQ ID NO: 11729 - DNA, 1072 bp, Homo sapiens
ttaattatattgacgtttctaagagtccagggccattattgaaaactgattttctgcttgaagtcacttcgcttatttttctgtggaaaacaacattctaagctcagacttttcaaatgatgctgaaggctgaatcagctttcttgttttgggagtcagtctgaaatcctctcacatctggcaggaggcctcagaaataataactgacgggcaaggaggggagaattagaagagcagagaagatgagtttgtgtgagaccctgtcgagtccccgagtgccgcagggtgggctcctgccctgagtcccgagtgctctggccacccgctgtagcctcagctcctctgagccatttgacatgccagccccagaaacgaacattttcaggcaaggtgggaacccccagcagccccccgggacgccgtctcacagcctttccacagctcttcagagtcggggctgcctcctggctcctcacttcagccagttatggccgaaggatctgtggtcattccttagctttaataggatttcttggctggacgtggtggctcatacctgtaatccgaacactttgggaggccaaggcgggtggatcgcttgaggccaggagttcgagatcagtctggggtcaacatggtgaaacctcgtctctactaaaaatacaaaaaattagccgagcgtggtggagcatgcctgtaatcccagctactcgggaggctgaggcaggagaatctcttgaacctggcaggcagaggttgcagtgagccaagactgcaccactgtactccagcctgggcgacagagcgagactccttctcaaaaaaaaaaaggatgttctgcagcaataaggggatgaaatacacaacaacaaaaatgatcatgaggacgcttgtagccacacagaaaatgcttctgatgtaataagcaggagaagcacagtataaaatatatccacttctgtggttacagccatgaaaatatgcatgtagcaaggagggaagggaatttaagaaagtaagggacctgttacagtggcgtacgggttctcatgttttgatatcgtttgtgcag

SEQ ID NO: 11730 - DNA, 1039 bp, Homo sapiens
gctgctgtgtgacggtgactacggcccaggctggagctcccaggagaggccacagagtcctgttggggcctagagggcagggagcatccatcgcttacctcttgaccactaaggagagcctgtcttggttggagcaggagatggagggaggttagcattcatgttcatcaagtagaagccccagccgtggtgcctggcagggcctctgacagcccagggtgccacgggctcacccctcactcagtgcctggcactcagtagaggttccacctttcacttcaggaaataggtccaccatctgtccgctcaccccggcttccagtagctgtggacggccacctccattggtgccgccagtgagcactaccctctcggccgtgggggtgccatctcacgagcgcctcctctggttctcacccactgatgtcaccacccagtgccttgcgtggggcagccgtgcatttccactctttccaagcacaaggagcttgttttgtgtccccatgtggagttcgtgcagcctcctggctgtgtgggtggaccgtgtctgcgtctggagctacacagagaaggatggagcattgcacatcgtagccttgagcttcataacacggcactgctaagtgcatgggggtcaggacactcagggtcccagagccttccagaggacgagccttacattgccaggatcacccacacactgggaccctcctgctcctgggacggatggtcccagccatcacccacactgcctagccacaaggcacacactaggcagagagccacagcaggtcctccccacagcaccctgggcaagaagaccgtgctgcggttggcctagtaccacggttccctccgttgacaagatgtgatttttttcttaaaacagaaaaattagcaaaggaactataaagcggatagataccagcaatgtttcatgtacacctggctctgtttataaattacattttgttccttagtaatcctacactgagcattcatgtctgctctcatacaatctgatgaaaattaaaatgtt

SEQ ID NO: 11731 - DNA, 1711 bp, Homo sapiens
caggggccaggaacttccaggcccgccgtctccactgggacgggaccttgatgcccacagcgtggtgagactttggggggtgtcacttctggaggtcttgaaatgacagcattatgcacccccagcctcctgcaggcgctcgcagctcggctgggtgcatccttgattgtacgggtgccgtggcccatgtgcatcctgcctcgccccgactcagtttccccaattgtaaaatgagagacttggtcttcaggcctcgtagtcaggtgtcagcctccagaagcagcacctggtcccggacaacctgcctggaagtgtggtgcactcaggtggtaccacgggcaaagactccctgcttgggctctgaagagctccctctgcctctgaggtggtgcccccttttcgtttattttttgttgtttttttttaagagagggtcttgcactgttgcccaggctgaagtgtagtgtagccgctaactcctgggctgaaatgatcctcttgcctcagcttcccaagatgctgggtattacaggcaaaaactcatgagtgcctgagtctccttttttaagaaaatttaagcatgtagtaaaaatccagtctgaacaaacatgggaaaagtcagcctccctcctgccccccttcccgcccaggcaggccaggcagcagcagtaatgacactgactgagcggcgggcactctgttgtcctggggccgggctgagagcgctggccagggtcatctggttccaggcagtgtctccccttggccctgtgaccatcccctctgcacagcaggctgcaccagcacttatgtctccacgtcactgccctgagcgcctatctgccacccctgggccgctgccgtgggtgcagggcagcccttgctgggagggagtggggtgagctggccctgtccagcctctgtcctcgcccccaggtgcagtcggctgccctggacgagatgttccagcaccgtgagggctgcgtcccacgctaccacaaggccctgctgctcctggaggggctgcagcacatgctctcggaccaggccgacatcgagaacgtcaccaagtgtgagtgcccggctgggctgggggctggggactctgggcgtctccctcacactcccctctccctccacaggcaagctgtgcattgagcggagactctcggcgctgctgactggcatctgtgcctgacctttctggcctggctgggccccccgtcctgccgagccctgcagagtgggctctgtgtgctggctggactcctcgggacaagcccatggcgctgatcgctggtgctgagccctgccctgggccccacggacagtcagcctgccggcctccctgcagctcacggggcagaaccagcacatctggagccacacagcttggggggtgtctcccatcttttacaggtggggatcacagaatttctgcccctccagctgcctggctcagcaggcgtgggtgccaccaccctctagccccagggcagccccggaggacaggcaagggcctgagaccactgccgactcaaagccaaagcgagctcctgcttagggaaggtcagcaggcactgtgcccaggaagagcctgcggcctcggcgtcccccagtctccaggagcctctccctccgagatacccacccagctttgtcaatcacccaagcactttatgcatatagagacagaacctggacctcacca

SEQ ID NO: 11732 - DNA, 1033 bp, Homo sapiens
gggacgttcaggatgagacctaccgcctgagcgccgagacgctgcagcaggtcaacaggctcctggcctgctacaagggcacgcacaacttccacaatttcacctcgcagaaggggccgcaggatcccagtgcctgccgctacatcctggagatgtactgcgaggaaccctttgtgcgggagggcctggagtttgcggtgatcagggtgaagggccagagcttcatgatgcatcagatccggaagatggtcggcctggtggtggccattgtgaagggttatgcccctgagagcgtgctggagcgcagctggggcacagagaaggtggacgtgcccaaggcgcccggactcggcctggtcctggagagggtgcacttcgagaagtacaaccagcgctttggcaacgatgggctgcatgagccgctggactgggcgcaggaggaaggaaaggtcgcagccttcaaggaggagcacatctaccccaccatcatcggcaccgagcgggacgaacgctccatggcccagtggctgagcaccttgcccatccacaacttcagtgccaccgctctcacggcaggtggcacgggcgccaaggtaggggcacagtcccagcagtgctcagcagaacacaggcccacattgttcccattgtacagaggagtgagctgaggcacagagaagtgtgtcacttccccgcaaggccacacagctgctgcaggagcaggggcaggcggtcttgagatgttccttgtctgcatgcctgcgccacccacttgctcccccacggggtgcttttcgaccctgggagggctgtcccagggtcaggcttgctgccagcacacctactatggacctggcatggagcataatcagcagctagacagctgcggaatgtagcttagaaccggaacatacaggattgtaggtgcagaagctaaaagctaagtgaatgaaaatgtcattctcagttcttcgctctggggtgagagatgtccccaaagcccgagtttgttctttcttttttttttgttgtt

SEQ ID NO: 11733 - DNA, 1056 bp, Homo sapiens
cttggcctcccaaagtgctgggattacagtcgtgagccactgcgtccggccagcctgagttctttcatggtggcccagtgaggtttcaaagggtgacattcccaggcagggctcagggagattcttcctgtcatctagatatctgtgaaaagagagtccttcctgcatacctgggtggcagattcaactgtgtgcaggccccagggaggtaaggtgggcaggcgaggggccaggcacctggcgagccgtcctatagatggggcgatgagaggcccccagcccagggacggcagggagttggggggccagcggtggccaggagcctcgtttcatctgaagggggtactcgtggctcagtggcagctggtggtggccatgttggaatgtgacagtgaccgtatgcttaaatgttatcaagggaaaccagcgttgcatactggtatgggaaatctcttttttaagtgctggtagttaatttttcccaagcccggtgcaggctaaatacagcgcaggtgctgatttggcctgggccagactggactgctgtggactccactgatgagaggcatatatacttccgaggcacctgcatttgttgagtttccaaatggccccattttattttcccctgtggtcagtgcgacctgtgaggatgtgaaggagcccaacaaaggcccctctagtgtccccagcccttggctttccctgcacaggttcctgacctggttaagagaatgaccgagaacaaacaccagactctgctcctgatgagggagtggtgggggcaaggctcctgtgccaagcctgtcatgggcccctgtgggcatccaggagcagtggagagagtgcttgcctcttattctccatgtggtcttcttctgcaggtgcccagtcccctggaaggcagtgaaggggacggagacactgactgaggcgatgggagctgcccaccagagtgcctctgagcagctcacagtgtgtgcccagatgtgccacccctgtgggcagcaagaagctgggatcgctgcagccatgttttcccggccatgccggcgt

SEQ ID NO: 11734 - DNA, 1040 bp, Homo sapiens
gaggggcatgctcttgggtgtctctgtggccttgctcttcccttaagatctgtttgttgcagcctgcgtgctgtcttctgactccatcttcagaaactaaccatctgatcaaagcatgcctttctgctgctagtttaaatatgcactttttaaatgtttgttaggaatatgcttgtgcatttataaattctgtagtctttgatttcatatatacatgtatttcagccaggtacccaagacttagaagagccttatacgttttgtaacttctttttttggagatggaatcttgttcttcattgcagcatcgatttcctgggctcaggcggtctcctttggcctcctgagtagctgagactaaggctgctacattgccaccatggctggctaatttttgtatttttcttgtagagatggggtctcactatgttgcctaggctggtcttgtacacctgacctcaagtgatcctcctgtctcagcctccccaggtgctggcattacaggtgtgagccaccatgcctggccattttttatcttctgtagattcatggtttttaaaaatccgttgtccattttctcacagagataagcagtgatgtccttgcgatgaacaaggggtcttgtttgtcttggagtaagcaagaagaagctccctgatagctgtccagccagggttgaggtgaaggcacctcaagaagacaggggcacctgggtgtgtccagcaggactggagaagtctgaatggtggcacccaggtcaagctggcttctgtggcaggcctaagtgtgaactggaacattgcggagtggtgtggctcctcacccactggctcagtgctaaactgtgccaccaagagtccatctgcttcccttgaaaacttgaatgagatttttgctcctttatgacagaagttagctattaaatagattgaagcagcagctgcccccttgatgtgggacagtgtccaacctctcctcttggaacgctggcactgatttgggtgccaggtgccactcaccattgcgtttgcacccttgct

SEQ ID NO: 11735 - DNA, 1033 bp, Homo sapiens
ccatttgaggttctgttggtgggtatgtgaagtgtctaaacttttggaaagcagtttgacaatttaaagcaaaagctttaaaaatgtgaattatcgcagcccaataatttctataactggtgcagcattcatgaaatgagatgccgacccatgtttattgaatggagagatgttaatcatctattaaatgggaaaagaagattatagcacaatgtggtattctagttttgaggaaaataatgtgtatttggtgaaaagtataaaaacactttctagaaaagtcaagctaaatattgatggtggtttttgcttatagtcatgtttctcctaatccaccctaagagcatacgaggatgtatatgacagtgaattgtatgtaattttagtctgagaagatttaaaaaaagttacatatccttttttttccagcatgacatagagtacaacatacaattcttgcacttttattcaccagctcgttagaactgtggtgcgccatcacgaggagaagcagctccgtgaagaaagggggaagaaggaagagcagagcagactgaggcggatagccgcctccacggcccgggagatagagtgcttttggtcgaatattgaacaggcgagtgctgccgttgtcatggggtcgtaagaatcagtctgtcggagctggtgaggccacttcccgagaccagagctcgggcaccttgcttaggaagctttcgagcaccagagtcagcaacgtgtgcactctcctgggctgttgcttgttggcctttgaatgagctgctcgtgcctccgtctgtcttgcacaggggatgcacctcagctgtggctgccctctgaggtgcttcatgccgtggaggggctctgggcattgtttcagggttagcgtgagtcaccaccacggttacttctagagcggtcgctcgctcacttgctttccttttttgaaattttaattcttacctcaccacctaatagaacctgggcaggatgtagttagtatgaaataaatgaaaaagcaccaaactgacga

SEQ ID NO: 11736 - DNA, 1077 bp, Homo sapiens
acagcattccgtatgttggcctgaagaaggtctgccatgtgtggaaaaaccagggctgtcattcacagcctgaagtggaaggggaaatacacttccagtttcctgcccatttaattaaatttaacctgagaagtttaaaagctcagtttcaatttctgtaatagctatgcaaaataatttcgaagccttatagtgtgtaatgagtaacagacactcaagtggtgttgcctctcagtgacacttgctgataaccattttagtggacgatgaagaggaaacaattgaagaggaggaagcaaatgaaggcgttgtggaccaccaaacagaactttctaatttagccaaggaaggtaggctgttgctaccttattaaacattcagtaagtaaaaagaaacatttaaaacatgtgagatgtgaataataatatattgagtaacaacagcagcagtgcctgttttatggaaaacagtccctgtgtgcctcctgctgctctctctcctgacctggaggtcctggccctcctgggttgtgtgtcggacactgccctgactgtctttcttccctgccacctgcgtgtgtctccctgaatgtaccgttcatcttgagtgtgtgagaacttcatatgaatgaatccaccacagcttgactgaatgtgccgttcatcctgagtgtgtgagaacttcatgtgaatgaatcccaccacagcttgactgaatgtaccgttcatcttgagtgtgtgagaacttcataccaacgaatcccaccacagcttgactgaatgtaccgttcatcctgagtgtgtgagaacttcatgtgaatgaatccaccacagcttgactgaatgtaccgttcatcttgagtgtgtgagaacttcatgtgaatgaatcccaccacagcttgactgaatgtaccgttcatcttgagtgtgtgagaacttcatgtgaatgaatcccaccacagcttgactgaatgtaccgttcatcctgagtgtgtgagaacttcacgtgaatgaatccaccacagcttgactgaatgtgccgttcatcctgagtgtgtgagaacttcacgtgaatgaa

SEQ ID NO: 11737 - DNA, 1068 bp, Homo sapiens
gggattataggcaccagccaccatgcctggctattttttatatttttagtagagatagggttttaccgtgttgcccaggctggtctccaactcctgacctcaggtgatctgcccacctgagcctcccaaagtgctggggttacaggctgagccaccgtgcctggccctcatacattaaattgaggaatatgactttttcttttcttcatagtcaattatgatagtcaaattttctaggaatttctttatttcatctacattttaaaatttattggcatacattgtcaataatttctccttacagtgtttccgatcttggctgtgtttgtatgtatgtcccttctttctcctaatactgtgtatttatgcctgttttcttgatagtcttgtcaaaagtttgtcagattctttttttttttttttaatctggcgcctgtatattgttttctgttttgtttctgctcgtagtatttcttttttaaaaacatctttttctgagtttttaacttggatgactagcttcctaattttcatcagctcattaatataaacatttaagggtctgaatttttccgtaatactgctttagctgaatatcatatttattattcagttttaaatattttctgatttcccctgtatatatattttattgacccatgagttatttagaaggatgtttcttaatttccaaacaatacagggttttcaatatatatttttattattattctacattaattgcattttgatcagacagaagatgtatgggattctcactgacctggattttgttgaggtaggttttgaatggaccagtttataaacattccatacatgctttaaaacaacatgcattcatcaggttatggtacaattctctctctcagtccaccaggtagaacttgttgattgcattatccagttcttatccttactgatttttgtcttcttgctctatcaattactgagagaagtatgttaaaatgttccattatgataatgagtacctatttctccttaagtttctgtcagttttcattttatgtattttgagactatgttagt

SEQ ID NO: 11738 - DNA, 1135 bp, Homo sapiens
agcctctcattgggtcaaggcttcttcatggtcttcaggaacctcttagagctttcttcacagagatgtggaatttttgaaagtttaattctaagtatatttagctcttcatgtccatgggtttcaaatccatgaatttgatcaactacagatagaaaatatttaccaaaaacaaaacaaagcaaaacagtaaaaaataagaacacagctgggtgtggtggctcacacctgtaatcctggctgcttgggagactgaggcaggatggtcacttgagcccaggagttcaagttcagcctgggcaacatagcaagaccccatctctaaaagaaatattaaaaaaaaaaaaaacagccaaccaaaaaaaccccccaaaccaaataagccaaaataacagtacaacaattacaaaaaagataccaaaaaaatgtgtaacaactatttacatagcattcacattgtattaggtattataagtaacctagagattatttaaaatatatgagaggatgtgtataggttacgtgcaaatatacattactttatataagggacttgagcatccttggattttggtatcgaaaggggccttggaaccaccttctcagggatactgagggacgactgtatttaattttctgtctaaacaggtttttttttcttcgatttcattttctaactcatttccatatgtggaggctgatttctgtgtattgtttgttctgagacaccttacagaattatcttcttactggaagtttccagtggtttggcttgtttttcctacttacatatagcatcatatgctgtagtggtgcatcccagcatttcgctctggaagcatcagacagacaggaaaggtgaagaaccttgttaggaacatcatggacacaccacctgaattccacagccaacacttactttcactgggctccattaggtctatgtccatcaagccagtgtggcaaatatttaacatcctgagcaaatgaattcaaaaagtgttttgctagtcccaagtggacagtgcctttaacatggtccttgtagggtgcttgtccatggcatttgttgttttggctcaacagtctttgacataaaatacagatgcaaacaagctcacatatcacaagtaca

SEQ ID NO: 11739 - DNA, 1127 bp, Homo sapiens
cagaaaggtatttctctattcgtgacacatttgttactgtttggaaggatttcattccagtgtcatctaagttcagtgagttcagcaaatcgttgtgcacttagcgtgttcaggcatcagctggacgtggcagtgcgcagaacctgcaggagagaggtgcttttcctgccgtgggctagggtatgcataggacggcccctgccctgtctctgtgttacagggattgtccttgctggccctcagtggggaaagacgctgacagatgtgatgagtgtgccagggccatgtggccaaccacaaggggctttcttcctcacaccccacctctcaggcactgattttgttcgccatatcttaagaacacaccacatttaggggtgtgtgtacctgccctgaagttatacaggggaaaagaggaatgaatgaatggatgggtacagaagtgggtagatgcaagaaagtaaatggggtaatggatggtggaaccccagtgtggaaccttactgccaggcacatgggtgtctgtagcgtttctgactgtcggactctttccataaaatgttggaaaggaggtctgctgggatgaaatgatgtgcatctggtttaggcactgttgtctgtaggctccaaccctacagggtcggtgggtttctccccgtgtgcggagacgagagagcgtagaaataaagacacaagacagagataaaagacagctgggactgggggaccactactaccaagacatggagaccagtagtggccccaaatgccaggctgcactgatatttattggatacaagactcaggcaggacaaggagtgtgagccatctccagtgataggtaaggccacgtggatcacatggccactggacagggggcccttccctgcctggcagccgaggtagagagagaaggagagaaacatcttacattattatttctgcttatcggagacttttagtactttcactaatttgctgctgctaactaaacggcagagccaggtgtacaagatggaacatgaaggcagactaggagtgtgaccactgaagcacagcatcacagggagacggttaggcctccggataactgcgggcgggcctgactaatgtcaggccctccacaa

SEQ ID NO: 11740 - DNA, 1032 bp, Homo sapiens
tgggtcgggggtgtgggggtgtggatgtcttctgcagagccctgctgcccacggctcctggcctgtgcacccctctgcacttgctcctctgcacctgtgcccctaccagcgctgctcacagtctcccttcctgctcagcttttctgctctctgtttctgtattatcaccttcaacaaatactataagtactttgttcaggtgattttgtctcctccaataaagcaagccccatgagtacaggtgtgtccgagggctgttagtacagtggacagatggactgttgtagtgggttatagtcattgaatcttgtgatgttcaatcattgtgttctggggtgactcactgggtcctgtggtagttgtcattgtgcatggatgagttcaattactgctcttgtgtgtgtgacctcacggcatcggggcagctcagcctcgttcgtgcgctctgcctgccttgtcaggtctgtttctgagacgcgctcctgcttgtgttgcccagggtggcctcgaactcctgaactcaagcagttctccctcctcagcctccggagggcccgggaccgcaggtgtgtgccacgatgccgggcttttgccagggtttttacttcctttcctttcttttattttgctattcattttctaacttgttaagatggagtaccacctgagcttatttcacaaattttattatttggttttccttcagtcctaaatgtttttgaatttccattttgatttcttatttactgcctgggttctttttagaagtgtttcttaatttccaggtgaggttttccagttactttttattattgacttaaaaataaatcttcattgtattgtcagagaatgaggtctcaatgatttcagtctttgaaatttgttgaaacttgctatctagtccagaatacagtcagttttaaaaaatggtctgtgtccttccagagcagtcttcaggatgggttcacttgtgagatgattttgttgtaactgggtcaagtttactgtgtgtgtcatttcggtcttctgtgt

SEQ ID NO: 11741 - DNA, 1033 bp, Homo sapiens
aggctgaggcgggcagatcacctgaggtcgggagttcgagaccagcctgaccaacatggagaaacccgtctctactaaaaatacaaaaaaaatcagccaggtgtggtggtgcttgcctgtaatcccagctacttgggaggttgaagcaggagaatcgcttgaacccaggaggcggaggttgtggtaagctgagatcacaccactgcactccagcctgggcaacaagatcgaaactccgtctcaaaaaatatatatattacttataaaagtctgtacttcatgttcagtcacagtagagacaagtagaaactccctccttcaacaatacctagcactcaaggagagatggccttacagagtcagcatgtggtgcagaggtctcttggccatgattttaggtcctcctgggtccacatcgtcccacctggccatggatacgttgtcatctgatctgttcactgttaaggtaacagttgtcataactactacaaaatggttaagtgttaggactttaatgatggtgatcatgtaataaagggcctggaggataatggcatgcttacgaattttctgggtggtattcacatgtttgaaaaagcattgaaatgtatgattttgggtgatgactctgagaagtatggagcatgacccattttgaataggagaacagaatgttgtaaagtgattcttggtcccctaagagtccattgacaaccaccatgtagaggaaaaatggcaaagaatgggctctctccaaagtcaggtgctgaggcccttctaaggaggaaaagccaacgccctttcactgtggtttccagctgctacaggaacaaatagtgtctatctgtgtccagcttattttttgacttctttgagtctgaagatactttgaaaaactttgatttgccagagtaattttttgtaccttggaatgagccatatttttaatttgctttttgatgttacaaaatgtaccctcataagaattcaaacaatacagaaaaataagtccttttcagtccttttgtgctgt

SEQ ID NO: 11742 - DNA, 1029 bp, Homo sapiens
accgagtctcgctctgtcacccaggctagagtgcagtggcgtgatttcagctcactgcaacctccccctcccaggttcaagtgattcttctgcctcagcctcccgagtagctgggactacaggcatgtgccacgacgcccgactaatttttgtgcttttagtagagacagggtttcaccatgttggccacgctggtctggaactcctgacctcatgatctgcccacctcagcctctcaaagtgctgggattacaggcgtgagccaccgtgcctggccaagtacaaagttttataacaagcatattacttattttgttgcgttgtattccattctttatttttgtccgatttgatcaatcaggttttgaaagaggtgttttacagtcgttcattctaagtgggtttttttctttttttttttggttttggtttcaaaatcaggttgtcctaggaaattttgttttcatgcatttggttgctataatgttggtttataaagatttatgtatgtcatgtataatttgtgagtttaaactttttaaaattgtattagtgtattttagagacagggtcttgctccgtcacccaggctggagtgcagtggcatgatcatagcttacagcagtctccagctcccaggctcaagtgatcttcctgcctcagcctcccaagtatctgggaccacaggtgccatcacatgccctgccgagttgcagctttaatcgggacataaggcttctttttgtcctgttctatgtgtttgccatgaattttgttttgcttaatgttgactgtactactgtggctctcggagagagggggcagttgaaaatcttgccaggtgtccttgggactgggtgtgcctggctggacgcagagctgcttgagaggggctgactgtggccggcgcttctgggcctgagtgtgtcctctccagctcccctgtgcccacctttgtttcacgcagaaccttcctcagcgggttccacagctgaggctggccgcctccaaacggggtccccgccagtt

SEQ ID NO: 11743 - DNA, 1890 bp, Homo sapiens
ccgtgtagggatagatcgtaatttttttatccattcacctgtcagtggacattcgggttgtttccagtttttgactctcacatataagcctaggaggaacacgcacttacaagactttgtgtggacacatgctggctcttttcctaggtaagtacctaggagtggaacggctggattgtatggcaggtgtttacctttttaagaaattgccaaactgtttcccaaagtgtgtggaccattttatattccccctagtagtatatgaataggttccagtttctccacatccttagcagccagcacttggtatgatcggtctttagccatcttaggaaggcctgtaggagcatctcactgtggttttaattgcattcccctaatcactaatgaagttgagcatcttttcatgtgcttattttctatccatttttctttgacagtgtttgttgacatcttttgcctggtgaaataaaaaaaaaaaaacctgagttggagaattctagatagaagttctgtatcagatatgtgatttgaaaatattttctagtctgtggttatcttaacagtgtcttttcaggagcagaagttttaattttcatgaagcctaatttaccagtttcttcttgtatgaatcatgctattgtatctgaaaagtctttgcctaacccagaattacaaagatcacacacaaagatgttttttctatatttccttctaggaagtttctggttttagatttcacatttaggtctacaatccattttgaaatttttttggtctgttgtacaaataatggatgagagttcatttttttgcatatggatgtccagctgtttcagcatcatttttgaacacattatcctttctccactttatgatcttcgcctctgttgaaaatttattaaccatgtatatgtgaatctatttctggcattctgtaagattgttccatttccacgctgtcttaattgctgtggctttataatacacgttaaagtcaggaaatctaaatctttttgtctttttcataattttggctcttctaggttctttgcatttccttatgaactttaaaatctgcttctcaatttctgttaaaagcctcttggggttttgattgacattacattcaatttttagatcaattttgggagaactgacatattaacaatactgagtcttctgattcatgagcactattaatgtctttaaaattttctctctgcagtgttttgtggttttgatgtacaggtcttgcacatctatcagatttattcttgagtattttatattttttgaaataatttttttttgagacagggtcttactctgtctcccaggctaaagtacagtggcacaattatagctcgctgcaacctctatctcctgggctcaagtgatcctcccactatagtctcccaagtagctgggactacaggtgtataccaccacccccagctaatttttttttttctgtggagatggggtcttactatgtttcccaggctggtcttgaattccttggttcaagtgatccttctgccttggcctcccaaagtgctgggattgcaggcgtgagccattgtgcctggcaggattttctcagagatgattattttgcctgagaatgaagggctttaatctttttcccttacagtctgtctgtgttttatttctttttcttgactgactgtgctgctacaatctccatgttgagtccaagtactgagagaggatgtcctgtatcagttcgttctcacaccgctataaagaaatacctgagactgggtaatttataaagaaaacagttttaattggctcacggttctgcaggctgtacagaaagcatgatgctggcatctgctcggcttctggggaggcctcaggaac

SEQ ID NO: 11744 - DNA, 1072 bp, Homo sapiens
cctgggactcctgttgccatagcaacccagctaccgccgaggacttctgcggcttttccagcccagcagcagccgctccaggtactttctgatggctccacagtgcagctccccagactttcctcactcggatttgaggactcgatgtgctgaggcaggacccagaggggtcccaagagcctgtcctcttttgttcaaaatacatcttgaaacgtctttgtgaaggctcttagttttaatgcatggatgctgttatttttccctactgttactgaaattaaaaagtgtttgtctctgatcattagttctgttaacttttctgctggaatgtttttcatttgcatttgcttttctgatatatttgcagttttcattgcttctgtacgattgtggcctctttggatgtttctcttttttttccccctttgtctgcttttaaacaaacagattttctaaattgttttcttgctatagggagttgattttgttctttaaacatattctaggggatgagtagcaaaaaacaatgatttcagatttcagaatacaaggaagttcctggaaactgcaactcagttatctctcctctcctctcctctcccctccccgcccctcccctcccctctcctctcctctcttcccttcttccttcctatctttctttccttttgatggaatcctgctctgttgcccaggctggagtgcagtggcacaatctcagctcaccgcaacctccacctcctgggttcaagcagttctcctgcatcagcctcccgagtagcagggattacaggcacgtgccaccatacccggctaatttttttgtatttagtagagatggggtttcaccatgttgcccaggctggtctcgaactcctgacctcaggtgatcccccacctcagcctcccaaagtgctgggattataggtgtgagccactgcgcccagtcaacatttctatatacttaaaaacatgttttaaaaattaggttaaaatatacataagagttcccattttacccatttttaagtgtacagttccgtggcatgaagcacattcacattgctgtgtg

SEQ ID NO: 11745 - DNA, 1032 bp, Homo sapiens
tacagacatgagccaccacgcccagccaaatcgccattctattttggtctctgaaacttaacattttgcttgaggaagggctcatatacaaggatattgaaacaaatgttgttttatatgataataatgcctgaggatcaacacatatacatttcctatcccaatatcccaaaaatagcaatcagtgtatttacagatgctgcagatccctctgaggagttgattctgaggctgtccctgaggacccatgccaggagatgtgtcccggaagtgactgtcacagatgcagtcccccagatgatgaggcaaggcctgagggtctgcgcttgttgggggaaaggtttattacaacttctcccaagcaaacagatggaaagcaatacctagagcagctccagtgcttgtgtgtgggacacctctgcaggggccttgtgtggctttgtcctcatttcagttagagttgagagtacaacccattttcatgtatggtggactttataaaacctaagtctgctttctactcagtaaacgtttagacatttttcttttcacattattctccagttactaagattttgtctgttgtcaaatccacataagccttctgttttttggtgaagacatattatagacttagagttttatttctttccacaaatactttgacattgtcatttttgccttagtttatacaactatttttctaagctctagatttagttttcacatggatacctctggtgttttaattctggcttccgcttttggttagcagttgtgacttagatttcttatctacaaactacttctgaagcctggttctgttgtgctgcctttagcaagtggtacacagaaaagtactaaacgatgaaaagattatttttgttcctttctgtcaaattcaaaggctaatatggagggttttttgagtttatttatgatcactggccaatagctctaagctgtgatatcatgttctttgtcatagaaattgaagagacagtggagaaatacttattttaaaatcagtgt

SEQ ID NO: 11746 - DNA, 1045 bp, Homo sapiens
tcattaccttacttctctgaaacagtctgaattccaaaccctgtgtggccctaaggattttggataagggactatgtacctataatataaataagccatattatttacaatcatgagtttctgaatgttcactttttttatttttggagacagagtcttgttctgtcacccaggctttagagtaccacagtgtgatctcggctcaccgcagcctccgcctcctgggttcaagcgattctcctgccttagcctcctcggtagctgggactacgggcatgagccaccagatccaactaattttttgtatttttagtagagacggggtttcaccatgttggccaggctggtcttgagctcctgatctcaggtgatctgcccgtctcaccctcccaaagggctgggattacaggtgtgagccactgtgcccagccagaatattcacttctaaatgtgggtgtgtattcaggtgacttgggattaaaaaaaaaagaaaaaacccttatgggattttatatttagaagttctgttgttgaaatatgaacctgtatctgttgttgcagtggcagaaggctgcagcacaatgaatgattattgtgaaagctggtaattttgtgcccacaaataattgtcaagaactttctaataataaaatacagaaatagattaatagttgctacaaacataaagagagactccatggtagaacactttaggaagcacattttatcttttttgaaccaacatgtatttccaaacatgtaagtaataatatcaagcgtggtgggaagattggattggaggctgattctgatctgtgtgttgggatgaactgtggcattcacagcattgagcaaaatcatcttcaaggacagcgtttaattctgttgttgacaagtcttttaagaaaaagtactagtttgggaatttttcacagatacaaataagcttgacccctaaatttaaaatattatttaaaaaataaaatgtcagatttattcatctgtcacagagtttattctgttgatggtaatattggctttggct

SEQ ID NO: 11747 - DNA, 1034 bp, Homo sapiens
aagagctgcttgcctctattaaggggagatgcggcatgggcgttatttctcctttttaaggcagcaggcatttcctttaccatcattgccaggcaggttactcctctgagcaaatcagcggcaatgatgagtgtgagatgcagatccttgtccatgcgcacttcgtgtgtcctgcgtgctgtctctctgctgtcaccacagggggccagattggctgtgcagcctctgcacatgcagcagctccgaaagctgaaacaccaccagcagtaaaaagctgtgcagccctcagccgctccaggcctgctgctgcacagcggaaggtaagtggccgctgggctttgtgggagctgcatctcacactcatcattcagggcccttaggccagagtggggctggactgagccccttccttttggaggcagccgttaaacagagctgaggaggctccctgcatgggcttctggaggtggggaggggccgagtgtcaaggaactctgaccctgtaatttttacatatatttgctctctaggggagagcttgctttgctgtatagtataatttttcaaaaatatttacaatgatttctgtgaaaaatcactctgacaaggacttctatttctggtaatatggtagatgagagaacctgaaaatctatctcaacaaaacatctaaaaatgccagattttcaaaaagtgccagataaaatatataaaaccgtgaatgagtctgcaggatagtgagtctagaaaccaggcgagggctgaagtctaaggaggtagttctgtgctaaagacactctatggcctgggtccccatggacccagatgacctagaactttgaggtaagtttggggagcagtctggagaagccttgggcccagggaggggcagaaccaaattggagacccccatataaggctgggctcacagagggatacagcaaacactaccaggaaatgatgaagtgggcaaactactactctaagcttcactgcagaaacagtatctcacttggccatggctgtggatggaa

SEQ ID NO: 11748 - DNA, 1095 bp, Homo sapiens
taccagcccctagccccaggggtcgtcagttctgtgggcacagctggactagaattccgggataaagctggggccgagcggcggctgcccctgtggtcctcgcgccccaggcctgtggctttagcgacacctggctagcgtgggcccgggccgccctccccatggctgaggaagaggctctgtgtgtcccaggctgctgcgtgggatcgccagtggcagctgtcagcaggggtgatggccgggggaggggctcccagggccaggagcctcagagaccagtgtgggctgacaaagcccagccccagtggttggtgcgctgggtgccctcactgctgtcatgagttcacaggggccagtgtgggccatggaaatgaagcctgagcctgccttccgctcggggcccaaggccttggacaggagtgagaggggctgccgtgagcaaatgcacggcccattcctgtgcaggggccagtgaggggaggggccaggacaggggcctctggagagggtgggaccccagtggtggattcctcgtcccagcagcgctggccacacagcagggcccagcatgcagggcggctgagcaggagctggcggggagcaggacacccaggcccgtggctcctctccttccttcgactgcccagatctctgctcacagggtcctgccctgcgtcccccctttggggacagcctcacctgcccggtgtctccagcacctggcttctttctgttgtcttcctctaaatctaaatccaaatgacttgcctttccttttattcttttcgttattgtgaggaagtctgtttgtacagagagtgcatggacgggacatatgttggttttgaagaggtgacctcccgggtctgagtgatgcgtcccactcagtgtgttgaccaccatcctgatgcgtcctcatgccccaacctgcggcagccccgcatttccttagggacagagggggcagctgcctgctttcccccacctgccagcaatggtgtggtccgtccttctgggggcccttctagaatccttggcagaccccactggtggccggggcaggctccagccctttgtcacctccctcctggcaaa

SEQ ID NO: 11749 - DNA, 2114 bp, Homo sapiens
aacagtctcctgccctctttccactttcaggcccctgcccctacccccgggctcctgtgagtacagagggggccgagtgagtagagccatgtctggggcaggcctgaacgggctgagggagtggggaggggccatccatgctggagctgagcagtggcacttggctgccccttaatggggaaggccaggctgccagggagggctgaggagagctggaaactgcagcctgggtccctgtggccaacagctgggggtgcagaggacacccgtggaggaaacattcaggacccagaggggctctcgaggcctggccatgaccctgcagcctccagctcgaacccactgtctgcactggcttgcggtcggggtgccgccatggggagggcagagacaccagggcgctatggtgctggacatccatgttgtgtcctggggcccgcgccctggtggggacactgctgccaggcgtcgccctgggaaatgcagatttcgtgtggccagatctttgatgtttctgaagagctgggaatccaggtttctctggatttggcaatgttgaaatgttggtggtcaattctaatttttatgactcactttgctgaccagaagatgcagctgtgggcctgcgaggcctccggcaagtgggatttggctcccatcacaggcagcagattggagcctgaggcctggttggaacatggcttgttcccttgtttctggaaggggttggtactcagtggggctgcgcctgcccaggaagatgggcttgtgtcctggctgctgtagagggggtgggggcagcccagcctgaaggttgaggatggaggtgtcttccggggggtgacagtggggatctgggggaggctgcccgctgcccgactacagagaccctgttgctgcctcaggaacccctctggagactggggcctgcgtgcagtgctttagtgaccatcagccctctggtcacctctgtgggggcctctgcccaccttgttgttgttggcacaggcaggctggtcccctcccatctgcagaaggggttatggggagggcgtgagccttctgggagaggccgaggcgtgttcctgcagagcccacggcagacgagggcagtggttggtttgttgttgggggaggagaaggggaggtcggggtggattcctggaagatgggtgacactgagactgtggcggtggggccaaccccacgaggggcctggagctctaaggcccttgggtcctccccaggtcaggccaagtccatgagccatcgctgagcagcccccagggagggaggggtgtgagcgtgggtgggctcccggcacctggcccagcatccacgcctggtgtgtgggcatctgcctgcagaccctcgtccgagggccccgtctctctggacccctcactgcaggtgaatagccacagtccctcccccaggccctgccctgcgtgttggaaacaccacctcctgggccttccccgtttgctcattcgggatccttgtctgggcactgaggacgatgagctccgcctctgttctcgcgtcagggctcggctcctccgtgtgtggggagacaggctgggatagcatgctgggcgactgtggtgagggcaaagacacagagggcatgagtggggggctgggggggcacctggatgttcagaggccagaaggcaggactacccgcaggtgcccaagggagacccagggccgcccagaagtccagggggagtcctggggcctcggagggatctgagcagggctgcggcctgacccaggatctctctggcctccctggcgtcttcccaggtggcccaggaccgcagtaccagactgagctggactggcattgaccaggccgaggccaccggccatcctcctccggccagaagctgcagtgataggggacatccctagcagttcacaaagctgtggggagaccccgagggggaagggtttccatgctgagccacaggcccggccacggtgcaaagctgtggggggactccgaggaagaagggttttcatgctgagccacagtcccggccatggtgcagggatttggcacgaagcctctcctagggccggtacacgacctagagggctccctggtg

SEQ ID NO: 11750 - DNA, 1074 bp, Homo sapiens
ggacaggacccaggagcaggacaggacccaggagcaggacaggacccaggagcaggcgaggggcccaggcgagggtctggattgtgctgaagcctgggacccactagtgggggtttgggacttccctgaggcctcagactcctgggttgctccctaggctgaggctgccatgtgtgtgtgggcgtgtgtgtgcatgtgcatgtgtgtatgtgtgtgtgcgtgcatgtgtgcatgtgcgtgtgggcaggtctgtgcctgtcctgtgtgcagctcgtgtccgtggtacccccgtgtggtgggctgcatggggctgtgcgttgccttgtagaacagtgtcacgggttcctctctgggcctctgtgtgtgcgtgtgtgtgtgtgtgtgcacccgcgtgtgtgtgacctgtgtttgtgtgtttgcatgctgtgcatgtggcattgtgttgtgcacatggcgttgcgtgttgtgcacttggcgttgtgtgttgtgcacgtggcgttgtgtgttgtgcacgtggcgttgcgtgttgtgcacgtgtgcaccccttgccacctgcctgtgactggggcctccagcctaatgagaaggcacagccaggccagcagcctcccgtgttgctgagtggcacaggcattcatcacctggtctggttttatgaaccatccttagagtggtgtaattttgtccacattggtggccagcaaagccccagctattgctcatcctcagcagcttgtgccccaagtgtgtggtttggccttctcagccaccgtcagtgctgtaaggtagagttgcttccacccaaggatgtggtgactgactccagcgtggcagggggctagtggatcgattagacagaatgaggatccacaagagcttgctggggttggagccattcctgccggcacaggaccctggcttgccctcccacacccatgcacagaatgttctggaggggcctttggccagcaggagccagagtgaggggctgggtgagctgcagggtggtggtggcagcccatggtgaggcccaggcctcagggacccatctcaccctgcacacggcatttagtt

SEQ ID NO: 11751 - DNA, 1036 bp, Homo sapiens
ctgggctgggtggagggttcagggtggctttgctgacgtgcctggcttctgggccttggtggctcaaggcccaggcagctgtggccagcccttgcagagccttagccaggctggcagcaccattccagcacattctgcaggtcagagccccccagcccagcccaggttctaggggaggggttggaccctggcctggaggggcctcatgagtgccgcctttcaccccacccacagctccctgcagcgctcccaggtatgggggccacagccatccaccaggcaggacagccccacagggcagggagatgcctgaccaaggagggtggcacaggcagtgaaggtggcggcgcacagccctgctggagagggccaggccagagtctggggtgcccatcaagctgaaatccaattatgagaacaggccgggctgctgtgacacgggggttaggaattaatgttaacactgtttctggttaagactttttgtgttgataaataattcatgaggcagttagcactttgagcctgacaacacgagaatatattaatacggtcggctccaagaaaggtcagccacgtgcttggggccagggggccatcttttattcattccctgacacaggctcattaattattctggcccagccggagctgtgctcggagggacactaatgagaaaaaggagagtggatttgagatccacacgccatccgctgtggggacgtagagggagagatggaaagaaacactggtgaggcctctgaggcgggatggggcctgcagcctggctccctgacagtgctggttgggtgtgaagaggtgagcggagctgatccgcaggtgtgtggggcactggctgccacatcccagctctcccagagagatgaggaacaggagcagatgcagccagtatcagagagcaggaggtgcatggggaagtgaggctgaggctgtgggtgccccaagcacactaggcccagcgggtgcaggaacccccagagaagccactgagcagagacccagaggggaggctcgc

SEQ ID NO: 11752 - DNA, 1033 bp, Homo sapiens
ttctggggagccgcagtgccccctggaggcccaaaggctggtctggactcctccctgcccacctgcacaggccccttcactattcctcctgtttctctcggagtccttcctgtttccgatgctgggatggtcactgcgtagcctgggtcaccggcagtggctggacggggcagggaggtggaggcggaccccatgggagccacacttctgggggatgatgttgaggcgagcagagaggagaaagccacatgccccaacctccaggccccctggcttcccaggggtgagaggttcctgtccttctttctttgtaacaagccaggattctaggggtggtggccgcaaggctgggggagggagagggtcatcggggccctggactggggctgggagggtccctttctggggtgccggggtctcctagcttccatccgacccggcccctgtgtggttgagctgggtctgagcagaaacaacctcctcagaaggatgtcctacgtcactgcctgggggttggtggctgggggcgctggacatagagttggtgtttcaccctgcagaagcctgggctgcaggaccccgaccccggggaccgcacagggtgagcagaccaagtagcgtcagtgccaggagctcagcatcccttcccaccagctgcaccgcagccctttaacacacgaacgtgcggggcccaaccgctgctcctttccgaggggcccaccttcctccagtgcaggggcccttccggcgcgtgtgggtgtggcaggcccgcctcggctcttgccatcttacaggcatggacctgctgctcttctctgtggttcaggcccttgcgacgtgactaggaagggcttcccattccagcaagaaggtggaatccacacctggtcttctctgatacgttgatggtttttcacttctatgtttgcgatctgtctggaattattttcagataagaggtgaaacaggagcttgctctgaaggacctacgccacacctggcccccacagcctgcaccccacacctggccccc

SEQ ID NO: 11753 - DNA, 1035 bp, Homo sapiens
acccgagtgtgctcatgtacacgtacccgagtgtgcccatgttcatgtatccgtgtgtgtacgtacccgagtgtgtgtatgtgcctgtgtgtacgtacttgagtttgtgcccatgtacgtgtacccgagtgtgtgtacgtgcctgagtgtgtgtacgtgcccaagcacaggcacattgtccagatccacataacactccttctttgcagttgcttcctccacacacagagtgtcccccatctctccagggtacacactgcagtgtgggtgaacgtcaaaagccgtgcagtgagagaagccaatcacagtaggtccgtgccgcctgacagtgttcacatggaagttcggaaaagacggctctgtagagacagacagatttgtggtttcccagggttgggggtgacggttaggagtcagggtttctttttggggtgatgataatgttctgtaatggatcgtggtgacaggtgcatcactgtgaacatactaaacgctagtgaattgtaagcgttagacggtgagttggatggtatgtgatttacatctcaagtcttagtccgtgcgggctgctctggcccagttctgcagcagacattcacagctcacagtgctggaggccgcaagcaggtcaaggcatggcagagtccctgtgagggcttcctggtccatagagggtgcctctccgctgcgtcctcacatggtggaaggggctaggtggctctggggccctttataaggcactgatgccgctcgtgaggctccacactcaagacctcatgacctcatcaccttccacctcctgatcccatcacctgggggtgaggatttaaacatgtgaattcttgatagacagaaacgttgaatccacaactcaatgaagctgtttaatcaaaaaaaaaaaaaaaagaagaagaagaaactaggagggaaatatctatttaaggtcattcttatgaagctcattcctggaaactgccgtgaagtcccccagagcatggggccctccgtccacccctccccatcagcggccacatt

SEQ ID NO: 11754 - DNA, 1033 bp, Homo sapiens
ctgtgttcagggccagtccccgggcaggcggccctcacccgttctatcctcccaggagatgcagctggacccccacaagctggaggtgggtgcaaagctggacctgttcggcagaccccctgccccgggcgtgtttgcaggcttccactacccacaggacctggcccggcccctcttccccagcacaggtgagactggagtcgggccaggtggggggcacagaaacctcccgctcgtgcccagctgagcctgccttcctgtgccaggagtgagagcgctctctggaccgcagcaccagcctttgcttcttgatgctcaccacttattcaggtcaaagcctggcaactccctcacctcaccccacccctcacctctcttctcctcacctctcctctcctgtcctccccaccagcctccccagggtggacctgggcctggggctgctgctcctccccaccaagtcctgcccagtgtgtcctggggggccttcagcccacgccacacggctctgaggcggctggtcctggccacccctcctccctggggctccctgttctggccccaccagaggcaaaggaatggcagggacccaggcccacgcgaggctgcccctttctgtctcccagcccccgctttcccaggaggagtttggcctctcgctgaacagtaggaagctgctcctgaggccaggctgggcccacaccccagtgccccttcctcacatgcatggttgctcccggggtcccaggacgggcccagctgcggtggtttcctaggaagggttccaggacttggcctgtactgtcctcagtagcacggcccagggtgggatctgccgggagcagcgagggcctccctgccctcagtcacccactcccccgagtcaccccctcccccgggtcacccctcccccagcaacacaacgtgaccacacccgagtgtcatcctccaggcacgcagaggcacgaagactctggggtgctgatctgtaggcaccactgcctggcacaggcccccaggaggaaagtgggct

SEQ ID NO: 11755 - DNA, 1090 bp, Homo sapiens
tgaaggcagagccctgtccacataagggtgatgggcgtgcccagcagccacatgaggctggcttcacaagcatggtggcctctgggccatggagcatcccagtagtctggctttctcagaaagcagaagtccaggctgcagtttctggctgtccgcatcctggctcaagccccccggacacgtgctcagtgtggcgcccagttctgggccctccacactgcccgccccaccgaccctgctcctcccccgcctccccttccctcctctggatacctggtggctgtccctcggtgctctgccatttgtcctgcgaggctgggccccctcagtcccggggccagtgctgcctcctccatctccttggcaggtcttgatatcttgctggcagggggcaggatgattccttgttgctcttttctctcttccatataaactttcaatctgcctgttaggttccagctttcactggagttgggttaaaggggtacatcgacctaagagggattcgtacgtcatctccggtatcattttcctatccctgatcatggtgtatctcatttatttaggtattagtagaattactcatagatgctttatattttactaatattatgattggaatttgtaagttacattcttaagctgttgctagaaaacagaagtgcgtatctgttttgaagatttgtatgccatctcttgatgctgtaactagcaatcctgctaaattcttacgaatgcaaagacatttgtctgtcaattcctttaccttttctgtgtagaaagtcatatctaggagtgggtggtttgcccccttgtgtaaactgtcggtacgtttctggagccactgttccagcgctttgttccagatgagtttcctgagtaagcctggcctttactttcctgtgctgcacctggcaggttttgtcacgagggctctttgccgtcttcagtgagttaaggcgctttccttttttctgctctctggaagagctcttgtgaggtctgatcctcactgccttcaaggcttggaggctcacagttcaggttccaagtactgattttttttctccactgggtgtggtattcctca

SEQ ID NO: 11756 - DNA, 1029 bp, Homo sapiens
gcgcggggagctggagcgcgcgcgggccccgcacctgccgcccgccgcccccgccttggacggcgcgctgctgccctcgctgggagccctgcacttcccgcgcctctcgcccgccgcgctgcacaatgggctcctggcgcggaccccgcccgccgccgccgccctcggcgcaccgccccccctggtgacggcggccgggccccccacgccccccgggccgccgcggagccggactactccgctggggggcctcgggccgggcgaggcgcgcgactactccccgtcccgaaatcccccggaggtggaggcgcggtagccccggggccgcagacgcctctccgagcggagcgcaccgctgtccgtctctccatcagttcctagaactcaagcacagctcccgccgatcctggggcggcgccgcctctccacccgcagcctgcggaggcggggacttgggtgtcggcttttctgagggtgatcttttgttttccgagtttgggattcggctgttgggaaaaaaaaatcgcgtttgtaccttttccccccacagatgagaagtgtttgtaatggatttgtatttttcttaattttatgctctttagacgtttaaaagaaccaaaaaagaaacttttgcttcttcgttttcggttgggatttgcagtttaatggcctcagatccttctccagatccccagggtttctttgtcttatttatggagaaaaaccggtcactttgtccagcgcactgtgaggcccccactcaggccagccctggcccccccttggtacttggaaccgaagttacagattatattaaaataataatgtacaaaactttgtttttttgccttattatgcagaagtgtaatttcttttttggtttgtttttttaaaagcaaacgaaacgtgtaaatagtctgttgatataaatatatgacgttactaaattcttaatctagatagactttataaaaaccgtttccagaaacccctctggttgtttgtctaacatggtcacaaaaacccagg

SEQ ID NO: 11757 - DNA, 1056 bp, Homo sapiens
ttgaaatatggctcgtgtgattcctgaagggaatgcttagtttacgtcaatttaaacttaacgcaagcagggccgggtgcggtagctcaggcctgtaatcccagcgtttgggaggctgaggccggaggatcgcttgagaaatttgaaaccagcctgggcaacatagtgagacccccatctctacaaaaaatacaaaaaaaattggccgagcgaggtggcgcgcgcctgtggtcccagctactcgggaggctgaggtaggaggatcccttgagtccaggggtcccaggctgcacagtgtgagccgagatcccgccacttcactccagcctgagcaacagagcctgtctcaaaggaaaaaaaaaaaaagtagtgcaggtttttaacattagttatgtgttgaaatagtatttttagcatattgaattaaaagtatgatcgaaattcacctgtttctttttaatgttgctattagaaaatgtataatttcacatgttgctggcattctgtttctgtcggccaggactgctctagcggcaaggatggttttcccagtcctaactcctcattatactcagtactttgagaaagggggcacagaattatactactgtggttgcgttaggtactttatattagatttttatcttttgttaaccttatttcctctattattagcatcatacactaagcatggtgtatatatcaaaattaatgagccaaaataatatagattaattatagttattatattagtttataatacattactgttaactaaggttcatgtttcattgagatttcctcagcttttacctgctgttctgttctagggtcccacatgacaagtagtcttcatgcctccgtaggcatgttttggctgtgacaatttctcagacttgttttgatgatcatgagtgtttgaggcgtcctggtcaggggtttggtagaaggtccctcaattgagacttctctgaaggttttctcatgattagactggagttacattctttttccttcttttcttttttctttttccttgagacggagtttcgctct

SEQ ID NO: 11758 - DNA, 1051 bp, Homo sapiens
gaggcctccccagggctgtgccaagggccttgtcttctctccatgctcttcccaaatagtctgacaatttggaaataacatcttgtcagaaaaactcaaacttgggaacagaggtctcaaggacatatcttgtatttcaacatcaggcgagaaccactgtctctgatcaacgtgcggaagaggaacgtggaatctggggaagaagagctggcgtccaagctggaccactacaaagccaaggccacgcggcacatcttcctcatcaggcattcccagtaccacgtggatggctccctggagaaggaccgcactctgaccccgctgggtatgtggtgggttcagatcctctgtggaccctcgtggttatgtggccaggtgcatatctgctggcgccttggttatgtgactgggtgcaggtcctccgccgacccccttggtcagctttcttgaaagtgcttggggcactgggcctcctggggcccatgtccgagaccatcacccctgaatcacacattattaccagtaactgtcagctgaacttggacagaagacaagcttttcaaaatgtccttaccttggccgggcgcggtggctcacgcctgtaatcccagcactttgggaggccgaggcaggtggattacctgaggtcaggaattcgagaccagcctggccaacccggcaaaaccctgtctctactaaaagtacaaaaattagccaggtgcagtggtgggcgcctgtagtcccagctactcgggaagctgaggcaggagaatggtgtgaaccctggaggcggagcttgcagtgagctgagatcgcaccactgcactccagcctgggcgacagagcgagactccgtctcaaaaaaaaaaaaaatgtccttaccttggccaggcacggtggctcacgcctgtaatcccaacactttgggaggccgaggcaggtggatcacctgaggtcaggagttcgagaccagcctggccaacagggcgaaacctcgtcactactaaaagtacaaaaattagccgggtgcagtggcaggcacctgtaatcc

SEQ ID NO: 11759 - DNA, 1025 bp, Homo sapiens
tctagagtcccagctacttgggaggctgaggtgggtggatcacttgggcccgggagctggaggctgcagtgagctgtgattgtgtcactgcactccagcctgggcaagcgagggagacttaaagcaattttttcttttgaaacggagtttcactcttgttgcccaggctggagtgcagtggtgcgatctcggctcaccgcaacctctgcctcctgggttcaagtgattctcctgcctcagctcccgagtagctgggattacagtcgcccaccaccatacctggctaattttttgtatttttagtaaagacagggtttcatggagaaaccaatatagaattgttcaggctggtctcgaactcccaacctcaggtgattcacccaccttggcctcccaaagtgctgggattaaaggtgtgagccatcgtgcctggcctaaaaaatttttttttcttcatctgggtttttgctttgaaaacaagtttctccaaatttacagatttcctgatgatgttgggtctgaactcaccaacttgattaggtctttaggggccgagggactagccagctgcacaggtgactggatgggggaggggcaggtgaggtgggtctacagaggtggcttcgcctttgaccttcatgctggtctcggctgaggtgacacgctagtgacagcccaatagggggttacccttattgagtaaaatacttcagattgacagctcaatcttagtttgcctccagttaatcttttatgcttagggattaaatgtgtggttttttttttgtttttttttttttggagacggagtctcgctctgtcacccaggctggagtgcagtggcgcgatctcggctcactgcaacctctgcctcctgggttcaaacgattctcctgcctcagcctcccaagtagctgggattataggcgcccaccaccatgcctggctaattttttatttttagtagagatggggtttcaccgtgttggccaggctggtctcgaactcctgacctcgtgatctac

SEQ ID NO: 11760 - DNA, 1052 bp, Homo sapiens
aacatattattcatggttgttttaagttttgtctgataccttcaacatccctatcatgtctggttctgatgcttgccctgtctgtgtttttgtttttgtttttatttttttttttgagatggagtccaggctggagtgcagtggtgtgatcttggctcactacaacctccgcctgttgggttcaagtgattcttctgcctcagcctcccgagtagctgggactacaggtgcactccaccatgcccggctgatttttgtatttttagtagagacggggtttcaccatactggccaggctgatctcgaattcctgacctcaggtgatctacccccctcggcctcccagagtgctgggattacaggcgtgagccacggcgcgtggttgccctatgtttttttgccttttagtattgccttgtccctttacattcatagctagacatgatgtactgagtaaaaggaattacttttaatagtactttactaatgtggtgatgagatgtcaggaaagggtgagcattctgtaggcccctgattaggtctgtctctttgtgagcctgttctcctggactctcaacctcacaagtatttcccaggccacccccaccccatctcttagatgggacagggtggaatttggtatatctctcttccctcaggttagttaagctctgacaaaaccccaatatattaggctctgggaacctggttgagctcctgaaagtaaaactcagaaaagcttgggactttgtctccctccactcccaccatgactgggtccccctggactttttaacttcaaacatgtacacacctagcctctagcaatttgtcagttgcagttcaggtatttctgtcctgacgctttctcacagagatttgtgatctggtaactactgtgtttctgcctgtctctaattttggggacagtggtttgtttgccttgtatcttcacttctctttcagatctaagaagagttgttgatttttcagtttgttaaactttttacttgttaggacagagtggctacttccaaactctttacatgcag

SEQ ID NO: 11761 - DNA, 1050 bp, Homo sapiens
tataccacaatgcatttattgtttaccgctccattcttccttttctcattctctatcaaagttataaagccatatttgaaagcaactgtgtacatcttgcatactttgtctccacatacatcctagcattctcaccttaatactctgtttagttacacaaacatttttcatttctttcagattcagagactgcatttgaaatcaaatcatcagtttccagcaggagcatttttaaagataagcaatcctgtgacattaaaatggaaggaatggcaaggaatgatctctggtatttgtcattagaagaagtctggaaatgtagagaccagttagacaagtatcaggaaaacccagagagacatttgaggcaagtggcattcacccaaaagaaagtacttactcaggagagagtctctgaaagtggtaaatatgggggaaactgtcttcttcctgctcagctagtactgagagagtatttccataaacgtgactcacatactaaaagtttaaaacatgatttagttcttaatggtcatcaggacagttgtgcaagtaacagtaatgaatgtggtcaaactttctgtcaaaacattcaccttattcagtttgcaagaactcacacaggtgataaatcctacaaatgccctgataatgacaactctcttactcatggttcatctcttggtatatcaaagggcatacatagagagaaaccctatgaatgtaaggaatgtggaaaattcttcagctggcgctctaatcttactaggcatcagcttattcatactggagaaaaaccctatgagtgtaaagaatgtggaaagtctttcagccggagttctcacctcattggacatcaaaagacccatactggtgaggaaccctatgaatgtaaagaatgtggaaaatccttcagctggttctctcaccttgttactcatcagagaactcatacaggagacaaactgtacacatgtaatcagtgtgggaaatcttttgttcatagctctaggcttattagacaccagaggacacatactggagagaaac

SEQ ID NO: 11762 - DNA, 1046 bp, Homo sapiens
ggaaacatcttcagtctctttttaactcttgtggtagttacctccatatttctaaataaccagcttattctgctagaccttggctttctcccctaatgattgctcagtatagaaaggtaatttacttctctttcactctcctccctccataccttcccaccatatacacactcatgatggagacatgtctcttctcatgttcccatgcctccatcattctgatacagttatttcatatttttggttaaatctgtctttagtttttatgttggtatgactgtaattcctgtttatagggaaatcatgcaagtatacagtgatttatttttgtttctaaatttgtattttttctgtagttaattttttgctaatttaattttgttaccattaatgttttcatcatgtattcaattccagactctcctttcagtatctgaatattcttggctgatactttcagccaaattattaattgtattccttttttcttcctagtgatattgactgctaagtttttctgacttgcttcagagtagcttagtttttttaaggcctgctgtgcaatttttatcctgggatctcctctttgattttattttctatatcctctgtcatttcttttcttggagcaactcaagagtagcttcctggaaaagggtgatacaaacattgagacctgtgcatctgaaaatgttttgactttattcctcattgctctattttctgtcctctagttttcctaaagagaagtctgatggcattctaatttttgttacattgtagaaagctttgtttttgtttcagttttgatttctctggatggttttaagaactgcttcttgtcctgttaaggaatgatgttccctctcagtttatttttatccatttactaggtattgagatgttattcccaggaggactgggaagtaatctgcattgttctctgccatttctctagaagttagcatagtgtttggcacatagtaggtatttaattattttttgaataaatctaatgttcatagatccctaatgacatgtttata

SEQ ID NO: 11763 - DNA, 1022 bp, Homo sapiens
cactatggtcagctgaggctcagaactgtacattgttaatgggtttttcaagttcagaaaagcaacatgagcttttgttctgtggtagcatgttgatgtaataagtagctatttcaatagaggttcccagaacagcttttgttactgtcattttcttaactttgttcacttgtcttttattttgagctattgggtgtgcttttaatacattccttgtttgattgcattagccattgtgtatcttttgcatacagcttactaaatcagatggcttcagaaatgggtggtagaggagtaggcagaaacttgcaaggatatgtggatatttggaaatggttgtttcccaagacaggatggaagtcttttaagcaagaaacttggcccatgctatgaagtcatgaaatgaattgttggcatcatgtgctcactgaggctttggggaaatggataagttgtcattgaaaaattttaaacagaattctggagtggtcaagaggggaatgcttttgatacccatgtataacatggagaataatgatcttaaaacttcaatttaagattatgtgtcagtgatactacttagttacatgtagctatagagtcacagtggtgaaaaactctgccagttgcttactcacaaagttagttttcttcactacctcatcaggtttgttatgtgagtgggcattaatctgggaagagtgggaccctgccagttagattagggctatcttggaggaatatgcggattcaatactgcaaatatttctgaaacaccttctgctttgtactctattagatacccaaagaaattttcatccttgaagcggaggaatttaatgatacctgaatgcctaactgttgtattctgcttatacagaatccaatctcaagatacttggggtgaagaatgatgattcacagaagggaagggacatcttacataaacaaataatcgcagatacttgctaaagtgtatcccccaatctgggaaatactgtaaaggtgtatattattattga

SEQ ID NO: 11764 - DNA, 1955 bp, Homo sapiens
gaagaggcattctggtttttggaatgttcagcctttttgtactggtttctccccatcttcgtggatttatctacctttggtctttgatgttggtgacctttgggtggagtctctgagtggacgtcctttttgttgatgttgacactactcctttctgtttgttagttttccttcaaacagtcaggcccctctgctgcaggtgtgctggagtttggtggaggtccactccagactcttgtttgcctgggtatcgccagcagaggctgcagaacagcaaagattgctgcttgttccttcctctggaagcttcatcccagaggggcactggccagatgccagccagagttctcttgtatgatgtgtctgttgacccctgctgggaggtgtctccccgtcaggatgcacgggggccagggacccacttgaggaggcattctgttgcttatcagagctcgaatgctgtgctgggagatccgctgctctcttcagagccgtcaggcagggacatttaagtctgctgaagctgcgcccacagccgccccttcccccaggtgctctgtcccagggagctgggggttttatctataagtccctgactggggctgctgcctttttttcagagatgccctgcccagagaggaggaatctagagagcaatagtaatttttttgtaggtttattatctccgtggattgtttttgaccttaacactctcttttgtcttgaatctgtagtcattatattcctggacagaacgaggtctggctgctttttctctcagtccaataaggagatgcagactgactgggaaagaagggagttaatttctgcagctggttatggagtaactcaccagaccaactaaaagttacaagtttttttcaacgcttgtattcattctaaattctatgtctgtgtgtaggaggtgcacctacaagccagaatgtttcattcaaactgtatctaatcttcaggtagggtccagggtctggaaagctttctctagagacttggaaaaatttccttatcttaagtgggccctggtacaaggtgtgtgtaagaatgccttcataactttatcaggctttagggtcttagaaaacccgggtgaaaatcttaatgggtttgttttcacatttcagcccttgtacgaaggcagtagtttctccagttatttactgtttaacttacacattcatcagaattatagtaatgtgttagtagaaactgttctggttgctcatggagacctggcctgccacaattacagtttttctccccaatggacattttctatcttatttaacatcagatatttaattttaatctcatatttttagtatattagaagctttaacctgaaagcctccattttgggccttgtcataaaataagttaaatgactctaattctgaatacttctctttgtttcttcttcaggacacagccagtgtgaagtcctctagtagtcttgaacccaatcttttttgtgatgaagagattcccatcaaatccgaggaggtggtgacccacatgtggacagcaccttcattttgtgcagagcatgcttattcttctgcttctaagagttgttctcaaggtattactcctttaaaaaactgtggggaacataagcagaaaaccaatgagaaaaagcattatgttaatcaagactgtgactccatttcgagtggagtacaatggttggccatgaaatactaatggaacctgaaaatgctgttttcttttggaaaagccaatccctgtttgcattttctgtcatcacaacctgaaaacttacatagagttttagagtcctaattagaagaacttgaggggccatctagtcccatgcctcagttctagaaaattccggataggtagtccttcaccctctatgtggtcattatcaggtgttgtggaactgctgctttttaagcatatttattctggtt

SEQ ID NO: 11765 - DNA, 1033 bp, Homo sapiens
gtagagaggattaaatggtttgtgtccttaggctgtcacatctaaatttatcttcccctccttaacttgttggtataggagttattataggttgtagactatagaaggtagattacttaaccataattttttttgtattatactttaagttctggggtacatgtgcagaacgtacaggtttgctacataggtatacacgtgccatggtggtttgctgcacccatcaaccacattaggtatttctcctaatgctatgcctcccctaggcctgcacccctggacaggccctgctgtgtgatgttcccctccctgtgtccatatgttctcgttgttcaactcccacttatgagtgagaacatgcagtgtttggtttcctgttcttgtgttagtttgctgagaatgatggtttccagcttcatccatgtctctgcaaaggacacgaactcatctttttttatggctacgtagtattccatggtatatatgtgctgcattttcttcatctattctatcattggtgggcatttgggctggttccaagtctttgctgttgtgaacagcactgcagtaaacatatgtgtgcatgtgtctatagtagaatgatttataatcctttgggtatatacccagtaatgggattgctgggtcaaatggtaattctagttctagattcttgaggaattgccagagtcttccacaatggttgaactaattgacactcccaccaacagtgtaaaagcattcgtgtttctccacatcctctgtagcatctgttgtttcctgactttttaatgattgccattttagctggtgtgagatggtatctcattgtggttttgatttgcaattctctagcgacagtgatgatgagcattttttcatatgtttgttggctgcataaatgtcttcttttgagaagtgtctgttcatattcttcgcctactttttgatggggtggtttttttcttgtaaatttgtttaagttctttgtagattctggatattagccctttgtcagatggatagatggcaa

SEQ ID NO: 11766 - DNA, 1033 bp, Homo sapiens
tggagtgcagtggcacgatcttggctcacctgcagtctccacctctcaggttcaagcaattctgcgtcagcctcctgagtagttagggttacaagcatgtgccaccacacccagtaatttttgtatttttagtaatgacaaagtttcaccatcaagctggtcttgaactcctgacctcaggtgatctacccacctcggcctcccaaagtggtgggattacaggtgtgagccacggcacctggaacaaaaaaaatatattttttccagagtgtcttttaggatccgatccttggagtacactttgggaaatggtataaaatttcttgaagcagccagaagtgtctcagttgccacatgagcattcccttgagaacagctttgccagttgttctgaagctgagtaaattcttataaactaagaaatacgtgcaatgcattttgaaactgtttttacgttaaaataatttttaaagaaaatactaaatgccagtataagaaaatggaaagataagagaatatggccagcagacatctagattaaactgatatcaaaaacagtgtatgatgaaagaccagaattgtgcctgccagtgaataaattatcaggttcccaccttgtttacatgaagagagtttgctcttattgcagaattgggtttacaagtaacttgctcaatcaagtaagcagaaactgtaaagttatataataaatggaggtgtttggtaaaatgcacttcatatgctcttacattctttttttttttttctttttgagatggagtctcgctctgtcacccaggctggagtgcagtggcgtgatctcagctcattgcaaccttcaccccccgggctcaagtgattctcctgtctcagcctcctgagtagctgggactacaggcatgcatcaccacgcccggctaacttttgtatttttagtagagatgaagttttgccatattggccaggctggtcttgaactcctgatctcaggtgatctgcctacctcggcctcccaaagtgctgggattatagg

SEQ ID NO: 11767 - DNA, 1050 bp, Homo sapiens
tttttttttttttttttgagacagagtctagctctgtcacccaggctggagtgcagtggcgcgatcttggctcactgcaagctccgccctgcgggtccacgccattctcctacctacctcagcctcccgagtagctgggactacaggcgcctgccaccacgcccggctaattttttgtatttttagtagagatggggttttgccttgttagccaggatggtctcgatctcctgacctcgtgatccgtccacctcggcctcccaaagtgctgggattacaggcgtgagccgccgtgcccggccaaaatccagtggtttctttctgtgtcttctatccccatgacctctttattgcactatatattgctgctgttgtttctttacctaacatttgctctactgtttttttagtctctttgattgtatttggccatcatttctagttctttctccttatatccccaacaatgggtgcagggttcagcctttgactgtttattgttgttattttgtgctgtttatcttggaattctcatctaagggtcttaagtctttcagctattaccttgtggtttcagttctcacttcttatagtttcctcctattacattacacacaggaattactatcactgtgaaagaggctgtgtccagccactcatttgtaatctgtgtttccaacatgtgtattgcacatttctatttagatttttatcatctcagtttcagcatctgaaatagaaaatctccttcctctccacccttcacaaaccacttttctttcctaattgcctcatcttagtaagcgccaggaccatcgtgtaaaaacttagcgtgatcttgactcatacgtttcctttttatttttttgagatggaatctcactctgccacccaggttggagtgcagttgcacgatctcagcttactgcaacctctgccccctgggttcaagtgaatctcctgccttagcctcccgggtagctgggattacaggcgttcaccaccttgcccagctaatttttgtgtttttagtggagacagggtttcacc

SEQ ID NO: 11768 - DNA, 1037 bp, Homo sapiens
gtatgtaaagatgctgatagattcacttaataacctcagacaagttagaggatatgtgtggaagcccttgacactctttagaagaagggtgtgatataaattaaaagttatagcagttttatctgtggaataaattaatgggactaatgtttataagttacaatggataatcacttctattttatgtggcttcctcacatattataatagttaagaactgcaaatcccacagtatgatttttttcttttgcttgtttttgtgttgaggctctgagaaatttttaaagagtacgtatttaagatatgaaagagttgtgtgttgttaatagacaaaataattgctaatcataagatatatatatatacacacacacacacacacacacacacacacactttttcctttggaaagttttttctttgaagagtatggaaacactgcataattcagagatagcctcaaattttctttgctttctctgattcctttctgcctttctcaaactgtagatgaattctaaaaggctcttaaaggtccattttcttattttttctcttttatattacaaatccaaacaaaactcctttatccaagttcttctgcctgagcataggaaagaagttgaagttggagtgcgtatatacgtgtagggcatagctattgttgtaatttggtttgtagcttgataattatggaaattttcaaaatttattttaaagactgtaactgttcatttatgaaaagtgatcagttatttatttcactgttagggaaataaagtatataattttataatttcactttgaattatctttctgccagacttgtttttaaaataatttctagatgctaaaatctaaattgtcctttgttttggtttttgcaaaaaaaactaaatgtcagccaatgtggattgcttaagtattactttttcccctttcctatttttttcttttttttttcttctaataacatctgttctttttgttctatggaaatttgagtgctgaatacttccacttaaccctttttggcc

SEQ ID NO: 11769 - DNA, 1036 bp, Homo sapiens
gtttacatttgaaattttacataattaaaagtttagaaataggctgggcacggtggctcatgcttgtaatctcagcactttgggaggtcagggcgggcagatcacttgaggtcagcagtttgagaccagcctggccaacatggtgaaaccccatctctactgagaacacaaaaattagccgggcatggtggcaggtgcctgtaatcccagctactcgggaggctgaggcaggagaatcgcttgaacccaggaggtggaggttgcagtgagctgagattgtgccactacattccagccttggcaacagtgagactctgtctcaaaaaaaaaaaaaaaagtttagaaatatttgattctatgtttatcatattgtttcgtttttcaaaacttatgtttcccttttgaatataggataaatctcagattctcagtccaaaacttaagattaaagatctcatctttttttctaatgttatttcctgtgtttttgcgtatgactcttccattctgccttttcaccagctagactagtatattctctctgtaatttaccttttacattcttgtagctcttcctcctagaatgtttattcaaatcttatctatccttcaaagctcaacacaatttcttccttgctgtgaagttttcctaacaatctttattagtccattcttgtactgctataaataaatactcgaggctgggtaatttataaagaagagaggctgtacaggttccacaggctgaacaggtagcatggctgaggaggcttcgggaaactttcaattatggcagaaggtgaaggctaagcaggcacgtcttacatggccagagcaggaggaagagagagaagcgggagttgccccacacttttaaacaaccagatctcgtgagaactcactattgtgagaacagcaagggggaaatctgcccacatgatccggtcaccttccaccaggtccctcctccaacattggggattccaattcaacatgagatttgggtagagacacaaatccaaaccatatcacaatc

SEQ ID NO: 11770 - DNA, 1049 bp, Homo sapiens
taatgatatataagaatgcttgtgatttttgcacattgattttgtatgctgagactttgctgaagttgcttatcagcttaaggagattttgggctgagatgatgggattttctaaatatacagtcatgtcatctgcaaacagggacaatttgacttcctcttttcctaattgaataccctttatttctttctcttgcctgattgccctggccagaacttccaacactatgttgaataggagtggtgagagaagacatccttctcttgtgctggttttcaaagggaatgcttccagcttttgcccattcagtatgatattggctgtgggtttgtcataaatagctcttattattttgagatacattccatcaatacctcgtttattgagagtttttagcatgaaggttgttgaattttgtcaaaggccttttctgcatctattgagataatcatgtagtttttgtcattggttctgtttatgtgatggattacgtttatcgatttgagtatgttgaactagccttgcatcccggggatgaagccaactcgattgtggtgaataataagctttttgacgtgctgctggattcggtttgccaatattttattggggattttcacatcgatgttcatcagggatattggtctaaaattctctttttttgttgtgtctctgccaggctttggtatcaggatgatgttggcctcataaaatgagttagggaggattccgtctttttctattgcttggaatagtttcagaaggaatggtaccagctcctctttgtacctctggtagaatttggctgtgaatccatctggtcctggactttttttgtttggtaggctattattgcctcaatttcagagcctgctattggtctgttcagagattcaacttcttcctggtttagtcttgggagagtgtatgtgtccaggaatttatccatttcttctagattttctagtttatttgtgtagaggtgtttatagtattctctgatggtagtttgtatttctgtgggattggtggtgatatcccctttatc

SEQ ID NO: 11771 - DNA, 1231 bp, Homo sapiens
atggtgattctgctttgaagagttgccccaattgctcctgtccatctaaccaatcaccagcttgtgatgaaattttttttgatgttcaccttgaaaccatgaagatgtcttgcctattcctaatgcttttctttattataaaaatggggactacaggccgggcatggtggctcacgcctgtaatcctagcactttgggaggctgaggtgggcagatcacgagttcaggagatcaagaccatcctggctaacacggtgaaatcccgtctctactaaaaatacaaaaaattagccgggcgtggtggtgggcacctgtagtcccagctactcgggaggctaaggcaggagaatggcatgaacctggaaggcggagcttacagagagccaggatctcgccactgcagtccagtctgggcgacagagcaagactccgtctccagaaaaaaaaaaatggaggggggtgctgcatggaatgcttttaccctttgtgatagttgtcactgtattcagattggttgataaactatttcaggatttgaaattaagaattttttcaactcctaatttgtacttaattattctgttgaatgtctgtcgttcattcctagttttctatttcagaaagaaaataaaggctttctggtagaacttcagcttcttgccccgtacacaaaactactggtattcatacttagtctttgtctatctctgtgggcaaagtgtacctttctcttcaaggataatccctcctcttccatcccttctggcatctttagtgatttcagcatactgagaaatctttctctcccacctactctgtctgttgaattccattcctcccaatatgtatttaagtctctatcatcttaaacataaaagccctcttcttacatgatgccttatccttgcctcttttcacacagaagtttcttgacaaatagtctttattgtctcagtttcctcaacatctgtttagtttttatactctataatctaactttgagctaagtaattttattgaaactgcactgtccaagttaccactgagtttttaattgtcaaattctgagattctccttttcatttcatatcttaattgatctctggtcatgtatatgtttaatgtggttggtgactcctgtccttgaaattgagattaacttgatttttctttcatttgtgtgatacctttctcttctggttttcctccttatattctgaccactccttag

SEQ ID NO: 11772 - DNA, 1087 bp, Homo sapiens
tttctgatccttgtctcgtttcatatgtactctcttttgagacaactggagcctgtttctggatgtttttgcctcggtttcttttgtggtcttatgtagacacgtctgaaagcgagaaagtggtgtctcttgggcctcttccgcctagaacttgggaactgatacttttctctcagccgtgggcctaaagcctttcgttagccgatatggtgtttaaagtacagtattatgacgtgacgtattcttccctcacgtatcctcattatggtttgatagtcggctatctctttattcaagacctggttggatcaaatatttgcaggcctcatctcagggctagggtttctgaaaaggttatctgagctctagtctcaccggatggtattactagacaagaactccagactaattattgccgcagtgaaaaagtcttagcggggaaagagaaggagcagcaataattctaaaatttagaggtttaggaaaaattggtttatagtggaggtggaaggaaatgttgaaatctcttgacgtagggaactcaagatcaacgattttagaatcacagttattgcagataactaggtttgcctataaggttaattataatctcacctttgaggtaaggaaaacagatactatcccttgtgtggaggggattaatgccccaagaggttgagtgattactcaaggtcaaaggtgtttttctttactcattagaccagtgctttttaaatgatgttgctggaccacttgcaccagggtcaactggatgcttgtttaaatgcagatctctagtcttgttgtggaagttctggaatctgcttttctagcaactagtctcagatgattctcatgtaagttgaggttttcgaaccattgctttagtcgttgcttgttaaaggcattttgctttatgttttgtctagtattagtaatgataaaatattaagcactgttaaccagtgttgctttttaaaaagcatctgccgtcaccactgactaccacagagataggcaccgcagcgtattaaaaacttaaatgacagcgaggaggaactaatttaacacctatagattgtttgct

SEQ ID NO: 11773 - DNA, 1033 bp, Homo sapiens
ctgataaagttttagattccaaattgttagcctttaagaaattacagtcatctgagaaggttattaaaatgcttctctgcactacgtatggtggctcatgcctgtaatcgcagcactttggggggccgaggtgggaggatccctgagcccaggagtttgagatcagtctgggcaacatagcaagatcccatgtctacaaaaaaattttttttaattagctgggcataacgatgcacacctgtggtcctagctacttgggaggctgaggcaggaggattgcctgagcccaagagttggagtaagctggggttgtgccactgcactccaactgggcaacggagtgacaccctgtgtctaagaaaataaaaattaaaaaataaataaaatgctcttcctttcccaactacatatttgtgtggtgctggtttttcttcatatattccaaccaaaagaacatattgtaacgggttggagaaacagatatgataatccagctcgatcctgctaagccaaatgttaaaaaaaaaagtacaaaaaatgtaaaccaatgccactcttctcaccagatttttttgttttggaaaatatagttattatttttaaaatgtatttaaatataaaagttttatattgaaatgaataaaatattttaaacatcttaggtttaatttctaatatagtaaacatcaatatgtattatgcatataaacaagaactttgggggttctcaataatttttttttttgtgagacagagtcttactctgttgcccaggctggagtacagtggcaccatcttggctcactgcaacctccgccacccaggttcaagcgattctcctgcctcagcctcctaagtagctgggattacaggtgcccaccactacgcccggctaagttttgtattttttagtagagatgcggtttctccatgttggccaggctggtctcgaactcctaacctcaagtgatctgcccgcctcggcctcccaaagtgctgggattacaggtatgagccaccgtgcctggcctca

SEQ ID NO: 11774 - DNA, 1052 bp, Homo sapiens
ggatttatgacattacaatcctgcattgtttcaagactgacattttttcctaaggaaggaaataatcatctaagaccacgaaaaaaggctgttttttgtttttttttttttttttttttttgagacggggtctggctgtgttgccctgactggagttcagtggtgcaaacacagctctctccacaacctcttgggcccaagtgatactcccacctctgccttacaaaatacagggattactggtgtgagccactgtgtctggccagaaaaggcatttttgagaaagcaaatcgtataccttattaacaaaatagaatatatatatattgcttatctgaaatgcttgaaaccagaattgttttgcattttttgaatatttgtatacacataatgagaccttggggatgggacccaagtctgaacgtggaattcacctgtgtttcgtgtatatgcctcatacacataattttgtgcatgaaacagagtttttgtataagaagatacactgcagctgaagagggctgggtttttttttctcttagggtcgctgcataaactgttgtatgcctggtgctttgcgacttgtcacacgaggtcacgtgtggaattttccacttctggcatcacgtcagtgctcagaaattttctgatctcagagcatttcaattagggatgctcaaacgcaactgtttctacttccccatttcaggtgtgagatgtaacccaccttgaccataaattggcttttcatagtgctcagatgtttcataattcttcccccaaaataatgaagtttgcagtttaacaactttttttttgagagggggggtctggctctgtagcgcaggctggagtgcagcggtgccatcttgactcattgcagcctccgcctgccaggattcaagcaattctcctgcctcaggctcccgagtagctgggattacagacacccaccacgacgcccgactaatttttgtatttttagtagaggagacggggtttctccatgttggccaggctggtctcaaactgacctcaagtgatctgcccac

SEQ ID NO: 11775 - DNA, 1010 bp, Homo sapiens
acaagaggggagtggacccacgctctgaaatcccatgcagtgatgtgatgatgacttgtcctttctctcctctgtgaaccgtagcagcgcctccggcccctcctgtgacgcacagcactcctgtaactgtctcagaaccactcctggagaaagacttccttgcaggagtgactcaagaattaatcagtaaataccttgaaatgcttgtaagctactgtgctgtatgtttctagtagccacagaataccttttaggcgacataaaaatcctcattttcgtgtggttttgttgagggggttctggctgatagcatatgtccagttcctctttggtcctaaccaaagggaagtgtacttttagggggaggggagagaaattccaaaaactttcagaaggtactgaagacatggaatttctgagggccagtttttccagtgctttctgtgagaatacttcattatttgctgatgacgcacttttccttgacctctgtagagactcttgaagacaactctgaaaagtgggctgtgactcccgatgcaggggatggtgtggtcaagccctcgtctagagcagacccagcccagacctctgacacattagccttgaacaaccagatggtgacccagaacaggactccacacagcgtttgccaccagaaaccacaagcaaaatctggatcttgggacctccaaacttatagcgctgaccaacgcacaacaggtagcagagaggtgtttaggcacaaaaattaaggggagatcctagctttaattctgggaatttttgaggaaggatgacatttcatttaaagtttgatagaatcgggaacttctattagggaatggtactgcaagtagaacagaattgatttaagagccagaacgtttcctttgggctcctgacttcaggtgcagcccttttcagctcctgataatagcaggaagcggaaacgactgcatggagagctgtccctcccagcagcaggtctgtcatgagcacgaggccac

SEQ ID NO: 11776 - DNA, 1036 bp, Homo sapiens
gtggttcatgcctgtaatcccagcactttgggaggccaaggcgggaggatcatgaggtcagcagttcgagatcagcctggccaacaggcgaaaccctgtctctactaaaaatacaaaaattagccaggtgtggtggtgcatatgtgtaatcccagctacttaggaggctgaggcatgaaaaatcacttgaacctggaaggcggaggttgcagtgttctgagatcgagacagtgcactccagcctaggcaatagagtgagactctgtcttgaaaaaaaaaccaagcaaacaaacaacaactacaaaaataaaaaaaccccaaatacatcttattggccagaacatagtcacctgttcaaatgtaaatataaggaaagtagggaaatacagtctcttatcagggcagctaatactggggattctgttcactagggaggaggacagatcagatttggtaggcagcattagcagggaggaggacagatgagatttggcgggcaacattagcctctgccacagggagaatttgatcagaagcaaatagatgaacctgtacgcatcaagaggttctgagtacagcataactctaatacataacaatacaaagcagtcgtacttgttaataatgcaaattctgagacatcaagaaaaatattaaattacatgtaccaatcttctgtaaagaaagcaaagatgtggccgggcacagtggctcacgcctgtaatcccagcactttgggagtcgaggtgggcggatcaccaagtcaggagatcaagaccaacctggccaacatggagaaaccccatctctactaaaaatacaaaaattagccgggcgtggtggtgcgcacctgtactcctagctacttgggaggctgaggcaggagaatcgcttgaacccaggaggcagaggttgcagtgagccaagatggcgccattgcactccagcctaggcaagagagtgagactccgtctaaaaacaaaacatcaaaaaggaaggaaggaaggcaggcaggcgggcaggcaaagatgagtat

SEQ ID NO: 11777 - DNA, 1033 bp, Homo sapiens
cttgacctcatgatccgcccgcttcagcctcccaaagggctgggattacaggcgtgagccaccacacctagcctcaagcatctcttttttattctttatctgaatccttactattttaagaggctctaaaaaaactcttctcccaatctcatctgttagctttgccaatggttttctttcttgaacagaaatgcttaaatttgatggagacatttaagttatcttacccaatatattcctactaaacatttttattgattagctttatagtttctctttaacactgaggtctttaatccatctagagttcactgtttcatctagcatgaagtaggtggccaactttattctccatatggtatgtcagttttctcatacttgcttaattttgcactagtttatgactgactatctctccacataaatgtttctgatttcacactccctgttcttttcatatctgctccttcctgtgctagttaccgcactgttctgaggtgcactgtttggtttcgtttggtttatgactctgtattttcatgtctcacagggcagggttctcccatcttctcttctctttttgtttaatgttagaatagctttattcatccatatacatttttaaaaatttaatagaggtaagatatacagacataaaatttgctatctcaatcattttaagtctacagttcagtagtgttgagtatattcacactgttgtgcaaccaatctccagaactcatttcaccttacaaaactaaaattctatacccattaaactccacattctctccttcccagccgctggtaaccacctttctactttctgtctccatgaatttgactctaggtatgacaagtggaatcatatgtagtatttgtctttttgtaactcctccttacaaaatttaaaataaaatgaattcctaaaaaatactgtttgttttttttgtttgttttgttttgagacggagtctcgctcttgtcacccagactggagtgcagtggtgcgatctcagctcactgtaacctc

SEQ ID NO: 11778 - DNA, 1026 bp, Homo sapiens
tggtgggggttgggacttgtggctttaaagaaatcacttctgagtaggatgtatattttcgttggatttttgttgttatttctttagaaccctccacagcaacatgcaagaccatggagttaaagaaacccagagacctttatcaattaattgtactgtttgtgaatttgtataaataataacaaagatcctcttaaaacgtttatattcttacagtaaaaggttaaactgatatttatataataaaagaggaaatatgaagtatgtttttgaaaaaaaaaaaaaaaacaacagccttgtatctgcgaattatttttaaggcattgtgtgcttgggtacatgccaaggtaggaggtgttgtttgtatactctaagaggacgcaaggtggagtttggtgcatcctatgtgggggtgagtcaactcatgggtagaattttattctgtataaggtttactactgacatgttttgtttctagaaatgtgattagactggagatttatataatgtttggctttaaactttcaacaacgtggaaatttaaagaaattgaacaaaatgaaactttttaaaaaaccagatttgtatgtaagtcacagtttccccgagtggccagtttttctttgggtgaaaatgagatctagaggtgatgttgaaaagtggttcacgacgtgggcaagaaagatggattttttttaccctgagagtgggtgtggggaggatgtgaaggtggaaggactgaagccattgttgagaaaagttaaaagagcgctgtccttgcgtgcttgccggctcagtcatgcatactgaatctcccagtgtgagcgagggtccgggtggagaggaggagggcagctcaagccctctttttcacattcccctccaggcccggctgtaaggaagcactttcctgggggatggggagcttggccaggattttgcacatttgcattttagcacttccaatagccgaggctggccgctggatccactctgtcaagggtttttagactgaaatcggggcag

SEQ ID NO: 11779 - DNA, 1032 bp, Homo sapiens
gggcattgggctgactctaatcaatgatcatgttgctactatctgctagttctcttcttaacttttttttggatataattgtggattcacagttagttgcaaaagtagtagagagaaaaccagggcattggcatcggttggctattgttaagactacggaccttgttagactatggaccttatgcagctttcagtgtctgtatgcgctgtgtgtgtattctacgcaaggtgatctcatgtgtagtatcttgtaaccatctccacccctgccattgccatagaactgtctcgtcaccgagtggaactcacctcccttgtgattctccttttgagactcatccccacacattgcccgtgtgtccttggcagccacaaatcccttctctgttctcctccatctctagttttgtcatatggaggatgttatgtacatggaagcgtgtagtgtgtaaccttctgtaagactggcctttttcaccaagcttcctgctcttatgatcctccacgccgttgcctgtatcagtagtttatttatttttactcttgtgtggatatcctagagtttgttgactccttcaccattgaaagatatttgggtggtttccactgtgaggaataaagttcttaggaacatgcatgtacaggtttttgtgaacctgaattttcattctttggggtaaatgccaaagagtacaattgctgagtcacatgggaagtccatgtttgtttgtttgtttgtttgttttttgagatggagtctcgctctgtcacccaggctggagtgcggtggcacgatctcggctcactgcaagctccgcctcccgggttcacgccattctcctgcctcagcctctccgagtagctgggactacaggcgcgcgccaccatgcctggctaattttttgtatttttagtagagatggggtttcactgtggtctcgatctcctgacctcgtgatctgcccgcctcggcctcccaaagtgctgggattacaagcgtgagccaccgcgcccggcccatgtttggttttt

SEQ ID NO: 11780 - DNA, 1038 bp, Homo sapiens
aagaggccaggtttgaattgcaccttgaagaatgaggcagacataacagaccattacataacgagccaggagattgaatcagtaataaaaggtctcctatcacagacaagcccaggatctgatggcttcactgctgaattctaccaaacatttcaagaagaactaataacaatcctgctccaacttttcccaaaatctgggagaaaattatgaggccaaaaccagaggaggacactacaagaacattacaggccaagatccatgatgaacatagatgcaaaaatcctcaatctaatactagtaaatcgaattcaatagcacattaaaaagatcattcaccatgatcaagtgggagttatctcagggatacaagcgtggttgagtgtacacaagtctataaataggacatgctacagtcatagaatggaggactaaaaccataggatcatctctgtggatgcaaagaaagcatttgacaaaattcaacattctatcataatgaaaactctcaacaaatttgatatagaaagactgtaccacaatgcaataaggctgtatatggcaagcccaaagctaacatcatacagaatgggataaagttgtaagcttttcctctaagatatgtgtacccccaggtgcactgcagcactattcacaatagctgagaaatggaatcaacctaagcctacatcagcagatgaatggataaaggaaatggggcatatatataacaatggaatatgatttagcctttaaaaagaaggaaatcctggccgaatgcagtaactcacacctgtagtcccagcactttgggaggctgaggcaggtggatcacctgaggttgggaattcgagaccagcctgaccaacatggagaaaccccgtctctactaaaaatacaaaattagccaggcatggtggcgcatgcctgtaatcccagctacttgggagattgaggcaggagaattgtttgaacctggggaggcggaggttgtggtgagctgagattgcaagattgcacttcagcctgggcaacaag

SEQ ID NO: 11781 - DNA, 1052 bp, Homo sapiens
aaagtgctggattacaggcgtgagccaccgcacccagccccctgtgagagctctttgttgttaaaataatcttctttcttttatgctgaagatatttttctacttctattgtttatctctttactttcctttcttttcttttctgagacaggatcttgctatgttgcctagtctggagtgcagtggtgtaatgaaggctcactacatccttgacctcccaggctcaagtgatcttcccacctcagcctcccacctgtagctggaactacaggtgcatgccaccacatccagctaattaaaaaaaatttttttgtagagatgggatctcactatgttgctcaggctggtctcaaactggcctcagtgtcttgcagtgctgggattacaggcattgtttgttgtttcttaactttgtttatggtatctcttgccacagtaaaattttaaagttttatgtagtcaaatgtctctcttctcttttacagtttctgggtttccagtcttggttaagaaggtcacccgcaccctcagattgtatatgtagtctcctagattctctttcaggatttgtatgattttaaggttttcattttttttttaaagccagtcaaatttagcagttgggggttgtgtaccaactttagtgacaataatgtcactacccgctaccatcagagcagcctaaggttcttattttcatgcattaaatctttgtatacagtgtaagacaagcatgcaattttatttcctctcggatgaatgctattataattatgccactacatactacatacccgcatcttttacccccagaattgaactaccaacttcaacatacatcgtattctcatatttaatagattttaagacttcaaaacgacacaaagaggatcagaacccgtatgtgatatttttgtgcgtcctgtctggtgaccgttggttcaccttatctctgtttccctttcaggtgctgctagctgaggaggggatagctcctctttcttctgcaggaccagggaaagaggagaaactcctgtttggagaagggtttt

SEQ ID NO: 11782 - DNA, 1026 bp, Homo sapiens
agcccagcctgacagtctctccagtgctgtactgcaacttgtatctgggacagcagttaagtgcaaaggacactagaatgataaacaaatgtatcttttagattgtgactcaatcttattgaatccaggcaaaatcattaagaagagctccttaactacttcatgtgttactacctaaagtccatggagggtcttcaatgtagcactcaagcccacttttctgctacactcaacagccgtcctagatgccagcagctagagtggctaagtagttttatgaaaatgtcttgattaaaaaaaaaaatgctgtctgtgagcctcatgacccaagatgtcatctcctgtagcgtcacatagcatttctagtgggcaggggttttcctttcacttcattcatggaaagaccgagatgcctgtgagtcaacatagctcacgcagttggtcggtgtcagagccacaaatgaggtcttctgacgggtgctcaattccaagtcaagtgtgctttgttttcctcatggtagaactctttcttttttttttttttttttttgagacagagtctcgctctgtcacccaggctggagtgcaatggcagatctcaggtcactgcaacctcctccgcctccaaggttcaagcgattctcctgcctcagcctcccgagtagctgggactacaggcatgcgccaccacgcctggctaatttttttgtatttttagtagagacagtgtttcaccatgttggtcaggctggtctcgaactcctaacctcaaatgatccacccgtctcgacctcccaaagtgctgggattacaggcatgagccaccacacctggcccctcatggtagaactatgttttttttttttttgagatggagtctcgctctgtcacccaggctggagtgcagtggcgcgatctcggctcactgcaagctccgcctcctgggttcacgccattctcctgcctcagcttcccgagtagctgggactacaggcgcccgccactacgcctggctaattcatggta

SEQ ID NO: 11783 - DNA, 1045 bp, Homo sapiens
agtccattctcatgctgctatgaagaaatacacaagactgggttatttataaaggagagaggtttaactgactcatggttcagcatggctggtgaggcctcaggaaacttacaatcatggtggaaggggaagcaaacaaggtggcaggagagagagaagtgccaagcaaaggggggaaagccccttacaaaaccatcagatctcatgagaactcactcatgagaacagcatgggggacccgcccccatgattcaattacctcccaccaggtcccacccacgacatgtggggattatgggaactacaattcaagatgagatttgggtggggacacagccaaaccatatcaagagggatgtgcatttggtctgctcggggccatggtgagtgagacaagtcaggatgaagctgtggtcacccctcctagctgcccatctgcagctcagggactctagatctactgtagcccaggcaccgcacaacttgcttcctgggccaagcagcttcgtgtgggtcagcagcccaattggtaaaatggacactaaactgagcattaggattcttgagttctagctccatgcttcccctggctagttgtgtgactgtggaaaagtcacttttctctgggccttagtttctccctccagaatataaaaggggttgaactcgattccctcctcccttccttcctccctcccttcctttcttccttctttcttccctcccacatgtaggactccattggagacaccaagatgaataaggttttatcaagaggctaaaagaggacacacaaggtagcaaataaaacaaataggcagtgatgagtataattacaaaaacatgggcaagacatggagctggtacagaggacagaatggtttgctgaggagtggggagagacagctccaaggaaggtttcccttggatactgagctgggtttggaaggtgattttatgttcctttccagctccacccctcggtatgccccatgagattctgctcttgttataagggtagatgggatggggaagacagaggggg

SEQ ID NO: 11784 - DNA, 1044 bp, Homo sapiens
atcccagcactttgggaggccgaggcaagtggatcacgaggtcaggagatcgagaccatcctggctaacatggtgaaaccccatctctactaaaaatacaaaaacaaaattagctgggcgtggtggtgggcgcctgtagtcccagctatttgggaggctgaggcaggagaatggcgtgaacccgggaggcggagcttgcggtgagccaagatcgtgccactgcactccagcctgggtgacagagtgagactccatctcaaaaaaaaaaaaaaaaaaaagaatacattgggtgggaattgaacaatgagaacacttggacacagggtggggagcttcacacaccggggcctgtcatgggaagggatagcattaggagatatacataatgtagatgactagttggtgggtgcagcacaccaacatggcacatgtatacgtatgtaacaaacctgcacgttgtgcacatgtaccctagaacttaaagtataaaaaaaaaaatacaatgttattaaccatacagagtcccgacatgcaatagatctcttgagcttattcctcctgtccaactgaaattttataccctttaaccaacatctcttcccctccccacttccccccaccaccattctacactctatttctatgggatcaactttttagattccacgtatgagtgagatcatgtggtatttgtctttctgtgcctggcttatttcacttaacataagatgctactgtgtatttatccaaaggaaatgaaattagtatgttgaagagctatctgcattccatgttcatttcattactgttcacaatagccaagatacagaatcaacttaagcggccatcaggggatgaacgggtaaagaaaatgtggcatatatatacaatggaatgctatttagccttataaaagaagggaatcttgttgtctgtgacatgtggatgaacctggaggacgttatgttaagtgaaatatgccagttttgtttgtttgcttgtttgttttcagaaacatcaggcgccccaaaagccctcccctgg

SEQ ID NO: 11785 - DNA, 1070 bp, Homo sapiens
ctgagaacagagacgcatgtgggcctccagctccagtctgggtcctaaacccaagcctgggaggctgctgggcctgcagtgttgtctgcttctgcctggcttcctgggggactgtggatgttgctgtcagcctcatggttacccagccctctggccttctggagtttctgcaaggcaccagcctccggctactggctggaccagcttggatggacagcagagtgacagggaagacccccttcagatgtttctgtcctagctccaggtctgaggagcagagcagagctgatctgaaaggactcccattgtaaaatggttacaatggtaacttttatgttgtgtgtattttatcccaataaaaagaaagaaatggaaaggggttgggaccaggttggaggtcagcagaagctgaatattgtctatgaaatgaagggcttctccatggtcttggaggccaccttcagttctaaaagtgtcttgtgagtctgtgatatggtcccaactctccccacattttaaccataaacaagtgtggagtgatgataggcaattgaagaatggaaaagctgctggctgcctgttggtctcctagagtgtccaagcaggaattttgtggtcccagctttggggtcggtggcggagggagacagtggtcagaggagcttaaatgagtggagaggagcttaaatgagtggagaggggcttaacacaccccttcaaccagaggggctctgctttatctttttgatatatcgaggctctacataaaaacttatttgaaagaatctactagaacaccaactttctcattgtacagataaagaaactgaggcacagagggaggtggtgacttgctcaaggtgctggcaagtagagaaggcctcctgaatctagaccccatccccaacacctgggcctttgcttgcccctgcgatcgtgtcctctgcctttataaacacagcacatcagttagcggacggccctgtccctagcatcactttggcaattcccctttctttgatcatcatgggaagtgaggacttcctcagcccctgcccctcccctgggat

SEQ ID NO: 11786 - DNA, 1026 bp, Homo sapiens
aattgtgagttcatctagaatctggggtatatccctggggcttgtgtctatgcatgcaataattttttttttttttgagacggagtcgctctgtcgccaggctggagtgctgtagcgtgatctcggctcactgcaacctccaactccctggttcaagcgattctcctgcctcagcctcctgagtagctgggattacaggtacgcaccaccatgtccggctgatttttgtatttttagtagaaacggggtttcaccatgttgaccaggctggtctcaatctcctgacttcatgatccacccgcctcggcctcccaaagtgctgggattacaggcatgagccaccgtgctcagccagtatttcttaaataaagagatcataaatattttgttcaaaatatcttaggcctgatactggaaagatgaaaataactgctgaacacgagttcatatttgtacaatttgaaacagtgccagaattttatcttagaactgaagcaaagggagtcattcgttgttgttagcaatgtcttatttttaaaatgtattcattaattttaaaagggataagaaattaacatttactttacaccttccagatacagaagctatgctgggagcattcgtaggtatttgctcatttattcctcaaaaaaatgctcatataagtgacactgttagatgaatttttaagatgaagaaatcaagactctgacagattaagtaatttgattgaagtttctcagatagcaagagatggcagcaagataccagtataagcatgtctgactaccaatctgtaactttttcaacaacacactgagaaaatccattttcagcttctttgtttttcatttcttccttaatctcagatctttcacctagattctgtctttttctgtttgatgtctatcttttaaaattttcattttcagtgagagtctccatgtggccaactcccaggttttttttttgtcagataatgtctttatttctcttgttcttaaaggatatctttttaagtataga

SEQ ID NO: 11787 - DNA, 1046 bp, Homo sapiens
agtggttggtattctgtgggtggcacagtgaccttatttttgtctgttcttagacacaattatgaaatgaccttgttttgtctcattttattgtggtctcagaataaccttgtcagaggttggttttctgtgagatagtttaggttcatcagaataacatgccttagctgtgagtaccaggccagtttctaaatgtcagaggctgttctttttgttctcaacttgtctaacttttgtttgggctacttttcttcctcctgggaaattgtaagagaatgtatttactcattcaacaaaccagcaagtgggtacctgtactccataccaggcacgatcctaaacacaggacacagtagtgaaatctctgccttcaaggttctccaagtcttggataagaagtcttggataaaattgtgtttcagttaaccgttttgctagtttaaatgccttcttcagctttcccacaagtattccagcttgtactggatactttcaatgattaggaaatactacatgctgtagacaattctgaatgctagaaaattggttcttaccttgatctataatttctttttcttttcttttctttctttttttttttttttttttgtgaaacggagtctcgctctgtcacccaggctggagtgcagtggtgcgatctcggctcactgcaaccttcgcctcctgggttcacgccattctcctgcctcagcctcctgagtagctgggactacaggcgcctgtcaccacctggctaatttttttgtatttttagtagagacggggtttcaccgtgttagccaggatggtctctatctcctgacctcatggtccgcccaccttggcctcccaaagtgctgggattacaggcttgagccaccgcgcccggccttgatctataatttctttcctcgtatattccactgcttgggtctatatctatacattaaagacactcagaacgagttccctgcatgttctctagctgtttacgtagttgacccacgggcaatgtaggtgaactctggattttcatgattccttgc

SEQ ID NO: 11788 - DNA, 1084 bp, Homo sapiens
tttagttcaaagtattcagcatgccaaagtgtcatacttcggggtagtattttctgagccccaacacaaccctcagagagtgggatctatttgccaagagtattcttctgttgttatggttgaaactgcctggtaaggtggcagatgtatggtatttaaaacttaggagttgactggaaaaatggtagaatcacatttcagcaagttgttggactaaatacagtcgtgcgcctcctaacaatggggatatgttctgagaagttcattgctgggtgatttttttcattgtgccaacgtcatagagtgtactttcataagcctgctacacacctaaggctatatggaatagcctattgctcttaacctagaaatctgtacagcatagtattgtactgaatactgtaggcattcgtaacacaatggaaagtatttatgtatctaaacatagaaaagatacagtaaaataaagtgttaacaatctttgggaccacttgtatatgcgatccatggttgactgaaagcttttatgcaatgcataattgtgtatgaaacataagaaactactcctatgctgagataactgcataaatttactttaataacccctaatttccatatttgcaataatttcctataatcagtattcttcccctctcatttctggaatatatttccagataagttagaaagtttatcagtacatttccctatgtttttaagttaagtttttatccagtagaaactagtctgttggtctggatttggtagttgcacattatggttccttcttgtgcatcatataacaatagtcatcatcttagtattttcgattcatacgtataatactctcttcaagctgcattagaggaaagtaattacttgtatttgattttagcaaaaataatttagaataatgagaatgtgctctctgcttatatattcagtttcactatctgtcatcaacaaccttcattttgtatttatatctttatgtagctattattccctttttgttatcagtccttcttaatttttccataacaaaccctttagccacccaagtatatgtcttactcaaggtttt

SEQ ID NO: 11789 - DNA, 1032 bp, Homo sapiens
tattgaatgcgaaaaataagaaataaagccaaactatttctcatcttctgctaaggactgtgaaacttattaacacaagtgtttcaagtacctcagaggcacatacttgagaagtaaagaataatcttggatattccccattggagcataaactcagataataattcttatatctgaattccaagacatacagtgaagacttcaaaagaacatactggctaactctgcagttcagccttaccctaatgagaggattcaagttgagtaacagtgagctttagatagaaggcgttgtctcagttatagtcagaactgagatttcaatttcattttcataggtttagaatcttctttgcacatgtcatctaaagtgtgacagtagggcccaatttttggccagttataaagtctatagtgtttcacctgatccttccagcttcattggatttctctaacagtgcattctcacaggcatgttactaagatttagtcacttttccattatttagaacttatgatcaaaaactttctgtactgttacctggcccactatgttgtctataccatctattatatcatatatactaagatttgtttccagaagtgagctccttgtgaaactgctgaccacaactcatggtgacattgaataagtcattcttctcatgaccttattgaattctaaagctcacagtttactttttctaagtacccaaagccattctttttaggtgctggttttaatcagagacaaaaggacaggattaaaaaaccttgcaagcatctatcttaagctaacggtggagtctctatggaggcacatggaagatttgaaaacaactcagacgtatgtgtgtgtgtgtttgtgtgcgtgcacatgcatatacaggtagctgtctagtttcctcttagagtcatacgctgctaagtggcattaagttaaagtatactgaatatgagagtttatatcatctgagaattaaatttatttttaaaatatgtccgtcacttcaaagatttgctagggtcctg

SEQ ID NO: 11790 - DNA, 1050 bp, Homo sapiens
ctactcgagaggctgaggcaggagaattgcttgaaccagggagtcggaggttgcagtgagccaagatggtgccactgcactccagcttggtgacagagtaagactccatgtcaaaattaattaattaattaattaatttgacatcttgggcatgtacatcaaaataaagatgagtactcatttgatttatttactacttggtggtcacttcataccaatttatgaacctattgcataattggctattgtctcttattttcattaccttctctctgagaattgaagagcagtaatcacagttgcttcctgaatccagtaaatgtttgggatacacccctactagttcaacacattgattgcccattacacttacttataaagcccattgatgaatgtgacttacttaggcatttggtaatcatgattgtatttattgttcacaggggaattttatattacacggcattctaatctctcagaaatccatgttgctttccatctctgtgtggatgaccatgtgaaatcgggaaacatcactgctcgtgatcctgccattatgggactccgaaatatactcaaagtttgctgtacccatgacatcacaacaataagcattcctctcttgctggtacatgatatgtcagaggtaagcagatagaaaaatcctgtaattttatgatttacataatcataatattgatttaacccccaatattatataataatccactttacatttttttaaactaatggatttttgcatctccgatctggttagtagaatcgagtgaaatataatacaaattggtgaataatccttaaccatttatgttcagagagctatagcattgtcctatagtaaataaactagaaaatccaaataatacttagctttggataaggcatgtgcccctacacctctttctcctcctttttttcctcctcttccctgtcttccttctcccctaccccctcttcttacccctctttcttctttttggcttaagtagcattagatttacatacacatagatttggcttaggctgcca

SEQ ID NO: 11791 - DNA, 1052 bp, Homo sapiens
taatttatcttggaggtcatttcgtatcagtccataaagaccatcctcatacttttatgctgttgcatagtagtctgttgcaggatatcctgttattaatcagtctcctcctaatagacatttgatctattgcttattttttgttactataagtagtaatgactactaattgtaaataaccttgcatatgaataattgtgcatgtgtgtgagcagtaagcatatctacagaagagattcctaaagataattcctgggttaaaggacacatacgtttataattttccgtagtattggcgattactctgtatagtatttctaccagtttatattcccactaaagggaggttttgctgtggcaatatgtgttatatataacagagccagctgagtattagaaaatccctatagaagtatatcctaacaaaacctttcagaaaatctcggtataccctcttattcttctaccaattgttattacttttatcaaccctcgcaaaaagaactcatatccatattacgtaaaaatagcttccttcttctcgtacaaactagcaataatgtgatcagaaacattttaaccttattcttagtagtgactaaaagcatgaagattgagatcatgacaggtgtggaaggaggaggaggattctaagtatatttatgagagatagaaagtgtgcagtcaatgacaggaagtttttaaaccacatacggctaaggcagtgcgtgtatatcatgattttattttgttcttgttcaagcaactactttgtggtttcagtgagtcagtgatgcaagtaggtttataaaagactttcttaaagctgcatgttgttatagaaggactttgtgaaaataccttctccatctttttctgtgcacgcctacatgtgtgttctgcatgtttacatcctgatatgcaattacttgtttattctaagacattccattatttttcttactatggttgttatattaacatcttcatatttctgtggtccatgataaaaagccaaaaatgtttatacacatttatatacatttaaaaaa

SEQ ID NO: 11792 - DNA, 1489 bp, Homo sapiens
cacatataggtcatgatatatattgtttcacacagatatatgtatatgacatatatccaccaacctatatatttatgcatgtatgttggtctatagtttgtttgtttgtttgtttttcttacaacgtcttcatttggttttggtgtcaggttaatgggggcattgtaaaatgagttgatctgtggtcatcggtctgatacgatgttttgatttctagaatttccaattgttttcgctctttgctaaaattccttgtgtgttgtctacctttccactagatcttttaacatgttggttatagttttttgaaagtccctttcttttcgtcccaatatctggatcctttctaaatctgtttctgttgattgctttatctcgacagtgggttgggtttttttcttgcttttctggttgtctcttcttttttcttctcctccccggccccgagacagagtctttctctgtctcccaggctggagtacaatgcctacaatgccgcgatcttggctcattgcaacctccacctcctgcgttcaagcaattctcctgcctcagcctcctaagtagctgggattacaggcgtatgccaccacacctggctaatttttgtatttttagtagagacagtgtttcaccatgttggccaggctggtcttgaactcctgatctcgtgattcgcccacctcggcctcccaaagtgctgggattacaggcatgagccaccgcacccagcctatttttcttcttttcttttttttaactgattactggatattgtgggtattagaagagactgaggttaatagtatttatgtccagaaatgaacaatattaatgtgaaggttgtgtacatcttatcagcagttgaggtaggtttggtttccttttttttcccctttgcgttagactttatttattagcttattcactggaacaatgcttggagaaatctgaaaatgcatggcaagtttgttagagatcttgctttcatataatttgtagactttatggctttatttttaaaaaacttttaatttttttatttcagtaggtttttggggaataggtggtgtttggttacacaaataagttcttgagtggtgattctaagattttggtgcatccatcacccgagcaatgtacactgtacccaatgtgtagtcttttaccccacttttatcccagcttggtttcgtgtctgtcagtaccttcaatgtaccaccggcttcattttctactggtgctactttgtgcttagaacggcacttgggggtccaggaggatttttctctgtctctctgctccatcccttgctttcagcagccttcgcatgccagagctgcagagtggagtctgcctccatacttttgctctgcctcccagcagtaggcttgttacttgttacttgaatctaggctcatagttgggggtccggaaggtcactttgttcaactcttctccatctttgttgtctttgtccactcccggt

SEQ ID NO: 11793 - DNA, 1018 bp, Homo sapiens
gagtttgcattttatcctgagagcaatggaatgtcatagaaagtttttaagcggatgaacaacatgatcagataagtatattccttttttaaaaaggaagattactataacttcagtgtagaaaataatgtaagaactgatttgatgggagaaagcctagccataggaagtccagttacaaggctgatgaataaataaatctttaattgatgttgattcttactgcctttaactagattttcttcttccttagtagtgtctagtttgcctttggggtgtgggccggaagtggaggtcctgtactctctcttttctgtgtatcttcttcccacatggaaatctttctaacactttcttactccccttcccccagtcggatctcatgaccacaacctctaagttctccaggatcactccttggtccctgatctgcttctttgactttctttttaccaacggtttcttaagctttgtatttccccacccatgaactctccctaagaattctctctgctcttctctccatggtccttccctattattgagaaccctgccttggaatataaagtactttatggccataattttttttcttaaatcaagtttaaaacaaagtgtctttttttttttttttaaagaagcactttgttttcatcatgaagatggaagtacagggataaacacttgggaaaaactagaataattggctcatagacaaaatctcttgaatggtggaatgttttcttagaaatgggacagcaataatgaaacataatttctttatggacttataacctactgcttttttgttagttctgtagaaatcctgtcaaagaatatgaagaaaaacagagaaagattctgcaatagagagagagaatttgtatataaatttaaagtaggaagtcagtgcttagaactgagagtgccactcaaatttcctgttcaagagaatgccagtcatttgcatggacgtctgatgctgctgcacagtttaccgtgctttatagaaaaaggt

SEQ ID NO: 11794 - DNA, 1033 bp, Homo sapiens
gggggaggcctcgcaagatgaactgacacatgggatggcggcagggatagggatggggccctggggagagagcgtggcaagttctcagcattcgtccgggaagtcgatggtgtgtcatttgtctaggtgaggagatggatgaattccgtctggggcatgttaagggtcagggaaatggtcatgtggaagggtgcgcctaccaagctggaggagaggtgctgcaacttctttctgcctttgtatcattcagacacactgtgttcactcatcagtggttctcaaaaggagaggagcacaccagactcttaagtaagggtgtgtgtgcttgtgtgtggggaggtggggggatggtctgaaaactctcccccggagataaatatattcctaccaggggtgctgtctcctcacctccctctttgggaatcactggcttctactagagtggaagacagatgtatcattagatcgatcagttgatccatatttatctgctcccagtctggaggtctggttctgggagctgagaggacaccaggggaggataagacactttctgaccaagacattttttgatctctcatcttataaggttcgtggtcactttggggagatcatatctgtcacccaacataaccatattatgataagagccaaaagtagatagggtcagttcacgtgcttcgagttcacagggactatgggtctaaggagccggggtggaggaaacagacatcgtcaatggtggcttcacgggagggagatgggatctcaactgggcccttggaggagaagctgccacgacctcccccaacaccttgacattaaatgaacagacacatgaatgagggggaaaggaagactaattgggtccctgcaaggtggctggatcggggtcagaccacaaggccgatctcagcgtcgcctccccactctgcagccccagcacaggaagtcacactttaaagcctcctctggcggaaattgtgggggagttggaggggtgttgggccaccccctcaactgtctctccaca

SEQ ID NO: 11795 - DNA, 1053 bp, Homo sapiens
tctcccgccccccaaagtggttgatcgttggaacgagaaaagggccatgttcggagtgtatgacaacatcgggatcctgggtaagacttgaccttcgacgtggtacacaatttcagaatggcaattaggctgtaacgactatcttttcctcctgtgtagagagtggtactgtgctcaatagtaagagcaaacacttatgtagctgtttacattgtgtttggcactgttctgagtcccctcgtataatttttacttcataagtaaaaataaacagtttttccaaagttaataaatggcagcatcagaattttaaccccaagcagtctggctccagagtctgtgctattgttctgtactgtaatgttccttgtctataggtgctgctcagcaagatgcaaccgtgggttgaaagcttagctggtgtaggatgagttctcttgtcttggatctaatgtgttctctcacattacacaggaaactttgaaaagcaccccaaagaactgatcagggggcccatatggcttcgaggttggaaagggaatgaattgcaacgttgtatccgaaagaggaaaatggttggaagtagaatgttcgctgatgacctgcacaaccttaataaacgcatccgctatctctacaaacactttaaccgacatgggaagtttcgatagaagagaaagctgagaacttcggaaaaggctcatctgtcaccctggagaagggaaactgtacttttccctgtgaggaaacggctttgtattttctctgtaataaaatggggcttctttggaatttgatagccacatacttttgttttcctctagatgctgcctctactcatgtagactatgaagtcttgactcatcctagatcttaggatcttaggtttgggcttcacaccacttgccttttacagtctagctatacctaattcctttaaaaagaaaagttggtgagaatgttattggcgctttttgacataatgctgttatgttaatagtgtttctaaagagccttccacactgaaatgaaatataagagaaaaatggagtc

SEQ ID NO: 11796 - DNA, 1110 bp, Homo sapiens
agtttaccagatcacagatcagcaggctttctttttttttttttcccataaatgataatattttattatagaaaaagcatcccaaatacaggatttcgtaaacactggtaggtgaacaagtgcaattttagaagtaaatgcaaagtaaagaggcaaaacctacaagcattttgccttcagaagaagatgtagtgttctcctgcactagtgatcccacccagaacacaaatgtggctctgtctcccgtgaaagcatcagatttgctttctgagctcagtatgcccatttcaataattgcaaagtgatggcaagaagtggcgttgaacacatgactacagacccttgacttaaaatattgagacagggacttgctctgtcatccgggctggagtgcagtagcgtcatcacagctcactgcagcctcatcctcctgggctcaagcaatcatcctgcctcagcctcttgagtagctgggactacaggtgtgcactaccatgtccatgcctggctattttttttttttctttttgcgttgtccaggccagtctcaaactcctgacctgatcagcaggctttctgagcttgagtcctgtcctcgtgctggcttccttagttgtggtccatgttatgtgtccttgggagtttcagttgtcctgaaatcatcgttctgccacccagaaccagcctgctctgcccctgcaggagttaactacgcgctcagcagtggcacaggcacagttctggaatacatccataaccacaggaacaactgctgttctcaggagcattttttttttaaactgaaggagcgtttgtccttggtccagctgtccaggacaggaaggagttattccttggggactgattagctcatcgctctgcagcacgctgctgtgtagagagccttagctggattcggatggtgcgtgatactggcagtgactcttcttcctccctagattccctgccctcattctggtctctttatagcaacactgtaactcctgtcttctgcctggaaggcctgggatggcttgagcgctacactgggaggtagctaaaggcctcctgcgttctattttcagctcccctgccttgtgcgtgaccttt

SEQ ID NO: 11797 - DNA, 1031 bp, Homo sapiens
ccatttcttcactccttgaatctcttgtgtcttttcagggcagccaagaggagattgggctctgttgaagcccctaagacaaataagtctcctgaggccaaaccattgcctggaaagctaccaaaaggtccgtgaaactaagagctggatgctacatgaggagtccctttgggtcctgggtagggaagaactcgctaaacatttccggagtgaaaggaacagccaaaggacattctgaggggtagaaagtacaggctcccagggtgtggggccagggaatgtgtggctgccattagtccaggactcttcaaacccttagggatctctgcaggagctgtccagacagctggtaagaagggaccccagtccctatttaatgctcctcgaggcaagaagcgcccagcacctggcagtgatgaggaagaggaggaggaagactctgaagaagatggtatggtgaaccacggggacctctggggctccgaggacgatgctgatacggtagatgactatggagctgactccaactctgaggatgaggaggaaggtgaagcggtgagattcatctttttgggcattcatagaaggatccttgctatttagtttctttcccagattcttgagactgtttcttagtggcaaggataagcctgactagaggaaaggggtttttgtgctccatcactgtttccctactgccttatatcctcccagtgcactacaagtttgaaagagctgtaggatagagcatttaaaaaaatctagaaggctgtcttggtgtaggtatgggaaggtggacaatggtgtgctccactgatgggcacagaaatgcactttttataaagcagttatctcagaactttgaaaaatttgttccttttggctgggtatggtgcctcacatctgtaatcccagcactttgggaggctgaggcaggaggattgcttgagcccaggaattggagaccagcttgggcaacatagggagatcccgtatctacaaaaaattaaaaaattggcctggcacagtgg

SEQ ID NO: 11798 - DNA, 1045 bp, Homo sapiens
aacatgtttttgaagagtagttgataaagagtagatgataaaaaggaagatgcttaactgtgtaactaaatgaaaacataatatgggtatgtatatagtatgatctcagttatgtaaaaaactatgcacaaaaaaacctaaaaagaaaaatatcaggatgtatttctagaaggtgggattatctgttgttaaaaatttttgatattctattttctaaattgagtttttatcgcttttgtataagagaacctaaagggtaaagagttttaaaaatgaggacattgaaaaagggaaagaaaaaagttacaaggcaaagttaaactacttgggtgtgggaatgagctgtccatgaagttcttcataggttcttattaccatctgaaacaatgagaggtgagctgagaggccagtcagaagtgagtaaagtgagttatcagtcgaactcccgtttcctcttatcccttgtccagctcttagaacaagctctggtgattgaggaacagctgcgccgggctgcttacttgaacatgtcagaagacccttctcacccttccatggccctcaacacccgctttgctgaggtggagtgtttggcggaaagtcatcagcacctgtccaaggagtcaatggcaggaaacaagccagccaatgcagtcctgcacaaaggtagccagtggctcccctgcctcctgccgattcggcctccctgatctgactgcatcctaatgtacatatatttgttttcaaactttcagagctcctttgtctgggagtttaggaggtgctagggatctttgccatccttgggaggttagtatcttagaggcaatcaaggacagtagttctttgcctttttttttttttaaagagatggactcctggccgggcgcggtggctcacgcctctaatcccagcactttgggaggccaaggcaggtggatcacgaggtcaggagttcgagaccagcctggccaacatggtgaaaccccgtctctactaaaaatagaaaaattagctgggcatgtggcgcaacgcacgcttataa

SEQ ID NO: 11799 - DNA, 1030 bp, Homo sapiens
ggaattggagtagggacggaactcacaaatggctttatggagaagatggcattggaatgaagttttgaagaatgcgacggagatttttttggtagaaacagaagggtatctgaacaaagggattaggttgggcaaagatgtgagccagcaaagcttagtatgtctggaaatagcagatagcccagttgagctgtagggaaacatttgtgttgggtgatggtgggaggtaggttggaacgagaaaggtggacgggctagaggtcagtaggtgggttcttggcaccagataagagagtttggactttacgctatcgttaatgggcagccactgaaagtttgtgagcagagttttgataggaccaagggaaatggaaacagcattcataagattataaaactgtcatataatcatgaggtgttaagggtctgggctgtgatgctggttgtggaaaatgaaaagggtaaagataaaggaaacaacaccaaagaatttattggacttagtgacttactgtaggggtcagcaaacctttttttctccccccaaaccaaaaacggttaataaaaccctttttttttttttttttttgagacaaagtcttactcagttgcccaggctggagtgcagtggcgacatttcctggctcactgcaccctctgcctcctggcttcaaccgattctcctgcctcagcctcctaagtaggtgggattacaggcatgtaccaccatgcctgactaatttttgtatttttagtagagatggggttttgccatattggccaggctggtctcaaattctggacctcaggtgatctgcccgccttgtcctcccaaagtgctgggattacaagtgtgagccactgcacccaaccacaccttttctattaaagggccagatagtccctttgtgggacatgtagtctctgttgcatatactcaactccatctttgttgtgtgaaagcagccacaggggatacataaatgaataagttaggatgtgtttcagcgtttcatctatggatattaca

SEQ ID NO: 11800 - DNA, 1473 bp, Homo sapiens
aattgcagacatttagatgtgggtctatccaattggataatagtgtgcaacagaggagaatgttcttcctttaggtatagtctcaataacatttcttcccctaggtgctgctgatgtagagaaggtggaggaaaagtcagcaatagatctgacccctattgtggtagaagacaaaggtgggtgtttggagaagttgattgtggttcagaagaactctaaaaccagaagcaaggactgtatctgccctgcctccctgtccatactcatctagccattttatcccaagataaaagactgtacctgtccccacatttagttgtcagtgggccaatggcaccattttctgggtctgagagacacccaggtggagaaggggtgtaggtggatggattcttgtagcatacagtgttctgggtaagggcgatggtgctgggctttggctggagctgacatttttcttccccatattctgtagaagagaagaaagaagaagaagagaaaaaagaggtgatgcttcagaatggagagacccccaaggacctgaatgatgagaaacagaagaaaaatattaaacaacgtttcatgtttaacattgcagatggtggttttactggtatggaaatgaggggcccaccagggttagaaggatctgatgtgaaattggggttcttgtcagaaaccacggtacagggactttacctctttacctctgtttgatgagggaatgccaaactgatagtgggttctgtggagaaagccagaagcaaattatatgaaatggatccaggggtaggggatggtgggggacaagaataagtagctttttcaattctcacagatgtttgcttccccccacccccaaccttccctaaattcctcctcagagttgcactccctttggcagaatgaagagcgggcagccacagttaccaagaagacttatgagatctggcatcgacggcatgactactggctgctagccggcattataaagtatcctttgcctgaatctgtactgaggcttttggtgaaaggttctgaaggtcttttagtttgaggttcttactttccttgttttgtttttcctgagcacttttccaatagccatggctatgcccggtggcaagacatccagaatgacccacgctatgccatcctcaatgagcctttcaagggtgaaatgaaccgtggcaatttcttagagatcaagaataaatttctagctcgaaggtttaaggtgagcggttggggaggaatatattgcttaagtgacaaacttgaaagtgcgtaacgtcctgcagcagagggagtctgtccatccagcgcactgttctcactttcttcattctatggaaggctttgctcccaagtaacttacacattagggttgaagacacacagaattgaaagttaactaactgtacatgagctgtaggtgactatgtgtccaatcagtgacacactagtgcagag

SEQ ID NO: 11801 - DNA, 1100 bp, Homo sapiens
tctttacacagggcatatgtctctcttttcatgcggcatttatgtgagccgggggcagatggggctgagacctttgctgatggtgtcccccgagaaggcctgtctcgccagcatgtccttactagaattggtgttatgtctttgattcgcaagaaggtgagccctgagcctcttgccattgtttctagggggccaggcgcagtggctcacacctgtaatcccagcactttgggaggctgaggcgggtggatcacttgaggtcaggagttagagactagcctggtcaacatggcgaaaccccatctctactaaaaatacaaaaattagctgcacgtggtggcgggcacctgtattcccagctactcagaaggctgaggcaggagaattgcttgaacccgggaggcggagactggaaggccaataggaaaggagcctgtagctggaattgggtcttcaacttcttgtcccattgctacaggttcaggagtttgaacatgttaatgggcgctggagcatgcctgaactggctgaggtggaggaaaacaagaagatgtcccagccagggtcaccctccccaaaaactcctacaccctccactccaggggacacgcagcccaacactcctgcacctgtcccacctgctggtaagtctgcctgtcctatcattttctgtccctctctttttgtcctggcctatttttctgctcccctgtgctcagttctaacagggtagtctggcaggacacacagcaattccctctcagtttaggagggccgtcctaagaatagggctggctcttaaaggcacgagaggacaatttaagatgagacaaactgggaagaaatgaccttctctctgatctagtaccttcttcctaattgattgtcttttattgttctgcagaagatgggataaaaatagaggaaaatagcctcaaagaagaagagagcatagaaggagaaaaggaggttaaatctacagcccctgagactgccattgaggtaagagatggggtgactgaatgccatactaaagacaaatgtgtaagtccagtcttccttttagttgctggcctgtctgcttcatctgttttgttttt

SEQ ID NO: 11802 - DNA, 1347 bp, Homo sapiens
tgactggaacccccataatgacattcaggtgagcagaggcagcaggcagccttaataagtaacatgttatgctagaaaggcatagtggcctctatgagggctccaccatctggaattaggtttttaagtgagaaacaacagattctttttgtgttgtttaccttattgtaagccagagtttggttagctgtgatcctattttgggtaacatgataatagagggtggtgtctggaggcaggggtgcaaaaggaagtttcctatgaatgtaggctgtggaccttgccttgtactgaatttagaatattatgtggaagtcaggataagagtggcaccaggaaaatacaatttctggctttatttcctgttcaactccaggcctttagcagagctcaccggattgggcaaaataaaaaggtaatgatctaccggtttgtgacccgtgcgtcagtggaggagcgcatcacgcaggtggcaaagaagaaaatgatgctgacgcatctagtggtgcggcctgggctgggctccaagactggatctatgtccaaacaggagcttgatgatatcctcaaatttggcactgaggaactattcaaggatgaagccactgatggaggtgaggtagtcaggaacttacgttttggtgtggggcttggcctctctaaaggttagggagaatctttgataccaagggtcttgtgggacttgctttttccactgcagctgctgaaactgactttggggatgtgggcccttgattttttataggaggagacaacaaagagggagaagatagcagtgttatccactacgatgataaggccattgaacggctgctagaccgtaaccaggatgagactgaagacacagaattgcagggcatgaatgaatatttgagctcattcaaagtggcccagtatgtggtacgggaagaagaaatgggggtgagtatgaatccaaggcaatcctgtgcttggtaattggtctgaaaattggcattgagaccaaggtggtatttgagacaagtggaaaatatctgtaggcaaattcttatgttgatgaattgatcctcttcctttgaaaacaaagctgataacatgactaatcagattttcatctttgccttggttgtcagaaaacttacaaccaaatatcatgctcacaacagttattttggctctttaccagaatgtcattttctcctatgtgttttattaaaccttacaaatgaaattttgaatgctacctcatctctctagagaaaaggcagaagatcctaggtaatctatctctttgtgttttctggtttttatttaagagacagggtctctaccaggtgcagtggctca

SEQ ID NO: 11803 - DNA, 1044 bp, Homo sapiens
cccccactttgggttttttctagtactaccaattcattaaggggaaaacttgtagatggagaggagaggggaaaattgtctctgccttccttccttgtatgtgacagcccttggtggccaggcctttaaaaagaatgtgaggagtgggatgcttaactattgggcagtgaaaaacttgaaattttgtagagatttgctagagctctgttttcattggatttcacctttctccatctgcttcaccagttcttccgggtattgaatggttactcactccagcacaagctgttgctgactgggacaccattacaaaacaatctggaagagttgtttcatctgctcaactttctcacccccgagaggttccagtaagtatgtgtttatctgtaatcggctcataattgtgcctctcattcttcctgttgcccatttcctgtatcacttttctttcttcctttctccttctccaataacttttttcctttttctttctgaagcaatttggaaggttttttggaggagtttgctgacattgccaaggaggaccagataaaaaaactgcatgacatgctggggccgcacatgttgcggcggctcaaagccgatgtgttcaagaacatgccctccaagacagaactaattgtgcgtgtggagctgagccctatgcagaagtgagttgggagggacagaagcagactccatttagacatctgccagtctgcagagtgtttcctattcctcccccactcagcttcaaggcatctggtgacaggagcaagcaaggcctgaagaaacctgatgctagggcgctggagcgcatagttcttacttattttaggttatacctttccttatttaaaatggtggtggtggtagtgcttgtgcgttaggtgtccttagttccaaagtgggatgtgttggaagaaagatctcagttgttggcactgcattattagtcattgaaaggctctcaagtctaacctgtctttctaccttgcccatgtaggaaatactacaagtacatcctcactcgaaattttgaag

SEQ ID NO: 11804 - DNA, 1055 bp, Homo sapiens
tcttccacatcccctgacttgggctagtgggcagaggaatgcctgtgctggggccaggggttcagggaggagtggatggcacagtgctgtcatcccttctcctcccctctccccactcccggtgctgaggctgcatcagaccctggtagggaggggtgccgcagccactaacggtatgtgctctccttcagccctctcccttcggagggacgtggtcttgcccactgtccttttgcctccatgctgaggtcggtgctgtatttcagagggagggtccttttcattctccttgctttgtatttaaggactggggcatagcatgggggcagtcccccagacctcttcattccccctcctgtggtgagggctaggtgtgatcaacacttttcttctccattcccttcctgcttttttcatggtgggggatccaccaggtcatctaggctctggccctagttgaaggggcaccccttcctctgtgccaagaggattcatcctgggagagggggcaaggtggaatgcagataactcacatgtaaaaggaacttgggtaggtaaataaaagctatacatgttggcctgctgtgtttattgtagagacactgttttagtaaacatgctgagcattcattttgcgtcctctgggttggatgcaatgtgagaggatggcatgccagaattaggacacgacatgaaaccagagtggtgcctctgtccgagaacttgtaagttctcaacttgggaaagacagaggtgctggagggtaggcctcagaccagggggtctccaaaactttgtaaatcatgcatcttttctccataaaacatctttcacttaatttccaataaatgatgtatttgtgctatacatacgtactgctatactatacattagcttgacttctttttttttttcctttgaggcgaagtctcactctgttgccaggctggagtgcagtggcgtgatcttggctcactgcagtctccgcctccgggttcaagtgattctcctgcctcagtcttacaagtagctgggactacaggcacatgctacca

SEQ ID NO: 11805 - DNA, 1034 bp, Homo sapiens
aaggacacttggtaggcaaccctggagaaaaggggggtaattacctggggatgtaggaaaagctttacagcggaggtgatgtttgaatagggtcttgaaggttatttgccagtgaggagagaaaaaaggaattccaggttggggaaagcatccgcaaaggtactgtgatgggtttgtggcaaggtcaagggtgtttgatatttatgactcagaggtcagcgtatttgatatttatgaatctaaggtaagaaattgagaaaggagactggagaaagaggctgaggctagattggacaaggtcttttaagccaaacgaagaagtttgcattttaaagtagagtatgatttttatagaggaaaatgactaatatatggtaaattggagcatgatattgttgataacagagatcaattagtgataacattccaggacagagataagaacctgattttagggagttacagaagtatttaggagttaaatatgaaaggactgactgaatgactgagtggttgagagagaaggaagaatctaaggtggcttcttcctgcttagaaagtgaggtagacaggctgggcacagtagctcatgcctgtaatctcagcactttgggaggccaaggcgggcagatcacttgaggtcaggagtttgagatcaccctgtccaacatggtgaagcccagtctctactttaaaaaaaaaaaaaaattagctgggcatggtggcatgtgactgtaatcccagctacttgggaggctgagtcaggagaatcacttgaacccagcaggtgaagattgcagtgagctaagatcatacataccactgcactccagcctgggtgacagagaaagactccgtgtccctctcaaaaaaaaaaaaaaaaaaaaaaacaaaggctggtggccaggcacggtggctcatgcctgtaatcccaacactttgggaggctgaggcaggcggatcatgaggtcaggagatcgagaccagcctggctaacatggtgaaaccccgtctctactaaaaataaaaaaaat

SEQ ID NO: 11806 - DNA, 1030 bp, Homo sapiens
gcctgtagtcccagctacttgcaggctgaggcaggagaatcgcttgaacccgggaagcggaggttgcaatgagccgagattgtgccgctgcactccaacctgagcgacagagtgagagacttcatctgggaaaaaaaaaaaaaaagagttttgaccctgtgggccccctgtgaaggtcttagtgttccctaaagatccccatgcctcattttaagaaccactggactggtgagacgggcataagctgtcttgggatcctggtatgtgctacatgaggtatgcttccacccttagcctgtagcttctcaagtttcatttgaaacaatttctactttcttcagatagagggagaagctgggaggcctgacacctacctttttgctttccatcgaggtcaagggggcaggaggaaagagtacaatgtattcattctggtttctcccaattttctcagtcccacagacggcaacacaacaaagataaacccttcaagtgccacaactgtcatcgggcgtacacggatgcagcctcactagaggtgcacctgtctacgcacacagtgaagcatgccaaggtgtacacctgcactatctgcagtcgggcatacacatcagtgagtgctccgtttcttctctccttcctcatagtcctctaagagtacagtccacttcaccccattttctgggtagagatctgttgcagtgaataccctgcctccctagctccaacttagcagaacaggtaaatattcagaaattaattagacccattctgaggaatttaggggatgcctgatctcctaatcctatagagacgcataagctgtaattcttcattttacttaaacataaggcaaaataaagccacttgaaattttgaggggagctggatttcagttaggcattttcttcttcttttttttttttttttctttttgagacacagtctcgccctgtcacccaggctggagtgcagtggtgtgatctcggctcggctcactgtaacctccacctcctgggttcaagcgatt

SEQ ID NO: 11807 - DNA, 1050 bp, Homo sapiens
ggtgtaccccactttatacaataaaagtgttcctggaaaatgtttccatcatatcatattataaaggtacctgacaagtttgattcatttaaaggcattctcttatatatcagttcataaaattaaaatcccttttaagttatcgtatagaaatctagatttttatgtgtttgtttaaaatgaggccattgtgagatggagatacatctatatacaatttgtggaagtagtagaaggatcctttaacactctatagagcccttctaatggatcagggtcctctcattctgccctttcttcactgtgacccacattaaagctatctctggactttccaaactgtatatattaaaagaaatgcacatatacagttggaagaaagcctcatggggcttttcacacattcagtatttttggaattcctgaatgaccatccacccaggagactacaaagaactttgaaattgaagggagacttattgtatcctaggtaaacagaatttcttcagaaactcagaactcttgacattccaaagaaatttttttttttttgagacggagtctcgctctgtcgcccaggctggtgtgcagtggcacaatctcaactcactcttaacttctgccacccaggttcaagcgattctcgtgcctcagcctcccgagtagctgggactataggtgcgccaccacgcccagctaattcttttgtatttttagtagagacagggtttcaccacgttggccaggctggtctcgaactcctgacctcaggtgatctgcctgcctcggcctcccagagtgctgggattacaggtgtgagccactgtgcctggcaaaagaaatctttttatcacagtgaatttctgttttgatgcatgtgtgggtcagccataccctcttcagtggtcagtagcatttgactggctattggggcagttgggttctgttactctggtcaagtcaacgtatctcccactctttgttcccatatataaaatgggaagatcagccatgccttcatctgtcttgtagaaatgttttgaggcaaag

SEQ ID NO: 11808 - DNA, 1058 bp, Homo sapiens
caggctggtctcaaagtcctgacctcaagtgatccacctgcctcagcctcccaaagtgcaggaattacaggcatgagccaccacacccattctctccatcttaattctctacttaattcccaccatttatcaccactcttatctcttgtctgtcatttctttccactagaaggttagacagggattatgcattgagacttgaacccctagcattgtctgcaaaatctatatgtaggtagtctaccgttgttcaattcattaaatatgtaattgtgtcttaggtgataaagtcgtatgttggggatatttgtaagatacagatgtaaaagatgtgattgctccttcccaaaaagtttggcaagattgaattctcttaaactgtgatctgattgtatcttgattctgttgcctgaaaacgtgagactcccatctttgctttgttttgttttttgtttgtttttgagacagggtttctctctgttacccagactggactgcaatctctactgacttcagcctctgcctctcgggcttaaatgattctcctgccttagcctcccaagtagctgggattacatgcacctgccaccatgcctggcaaatgtttgtattttttgtagagatagggtttcaccatgttgcctatgctggtggactcaagcaatctgtccacctcagcctctcaaagcgctgggattacacacatgagccaccgcaacttgcatgttttgttttgttttgttttgttttgttttgttttgttttgttttgttttgttttggagttggggtcttgctctgttacccaggttagagtacagtagtgtgttcatagctcactgcagtcttgaactcctgggctcaagcagttttcccacctcagccttccaaatacctaggattatgggtatgcacgaccgcactcacctctttttttttctttttcttttttttttttcaatttttttttttttagagacacggtctcaaatatattgcttagcctggtctcaaactccagacctcaagtgatcctcctgcgtaggcctgccaaagtgt

SEQ ID NO: 11809 - DNA, 1012 bp, Homo sapiens
tcatctagaacggtgtcgtcggcgggaggaggggagagtatgctaccggccagagctttgggaagaggatggctctgagtgggggagggaaaaaccgagagggttggaaaaattttccatggccctaattgagaaagaggtttgaagagcccttccctccctagagggttgtgtggaacacctggagtagggtctccctggagtttagggggtcagttacaggatttggaaaggacagtgctctgagagtccccacactgagtgggtgtgcaaaaccctggccacctccaagtatctgagcttccatatctttccagtgtggagccccctggagctgagatcaggatgttccgcttcatgagggacgtggagcctgaggatcccatgttcctgatgtgagtattccctccccctcaagctctcccactccaggtctctgagcagttcaggcagacatcggggttcccattgctaggaatggttggaactggctggatacctagctcctacctagcaggaagtaggcatcggtgccactgttgctctgtgcgtatttttttgcagggtggtggagggattgacagtttggcgcttctgccatccatactatgtgctcactccacagggatccctttgctattcaccgtcagcatatgagccgtatgttgtcaggtggctttggatatagccccttcctcagcatcacagatggcaacatgccagggaccaggcctgccagccgccggatgcagcaggtaatgatgctgagacacacctgagacccaaagaaaggttggaggttagttaggaaagcacttaattttcttgcactacagccaactgagcaagtgaaatgctctaggagttggggaaagggtcaggaaaaagggctttgtgactcccttttgagaggatggaaaaaaattgaggccatgggcctggtttgggattgtaaagagataggatgtggtctctaatttctgttcctcatgtgttcctgtaggctggagct

SEQ ID NO: 11810 - DNA, 1033 bp, Homo sapiens
cgtcccaacatctccttcctcccagcacccagctgcgcacccccagccaagatagggtttccctctcccctcctctctctcttctttcctcctctcccctcatcctctcttccccagtctctctccctccttcccttgcctccttcccttttctttccttttcccaaggcctcttccctcctccgcccaccagcatccctcacctgatcaagaagggttttaagacatttggaggccagtttgacagcctggtcctcttggggctgctgcggtatcaccagctcaggctggatttggtgcaggggtgggagtagtggggaagggaaccaggcaggaggtatcctcatccccacctgccccactcacatccgaacactagcaattgcacctcctccttctggtcctccacttcacagatgtaagtatctgagtcttctatcttaagattcttgatgatcaggggaaagtttccttggtcccaaaggcttcttcttgagtcagcgcgatcattcagcttggatggacctgggagcagaagacatatggggggggactgaggcgccctggagacagggcacctctggcaagagaatgcccacggctcttctgatatcagttgctaatttcctgcaacatctgctcctcgttctaatcagagaaacccggtctggcaaggaggtctcatcatatccatttacctggctgggacagtagctcacaaatacaaataaaatcatatccttatttggagagcaccaactcctacatgccaaatactttacaggcatcatctcagtaatctccacaataattccgagaaatagatactgtcaacactgttttgtttattttgcagatagagaaactgagactcagagagattaggtaactgcctaaactctcacatattgagattaagtaattacccaactctcacacattgtaggagaataaaccagtacaatttctttggatggtgatttgtaatctatacagaattacaaatgtatatacaaaaccaaatgtccatcaa

SEQ ID NO: 11811 - DNA, 1043 bp, Homo sapiens
aaggccgccagtgctggggaatcggttttatgtttgggcatatccatatccagggcactctggagagagagaagctgtggtctggctcctgggctgtgtgtgtgagtgcatgtgtgtgtgcatgtgtgagtgtgtgcatgtgtgtgcgtgtgtgaatggtgtgaatgtgtgtgtgtgcgcgcgtgtgcgcgtgtgagtccatgtgtgaatgtgtgtgcgtgtgtgcatgtgtgtgaatgtgtgcctgtgtgcgtgtatgaatgtgtgtgcgtgactgcatgcatgtgcgcgcgcgtgtgtgcacatgtgtgaataatgcgtgtgcggatgtgagtgtataagtgtgtgagtgtacgtgtacgacagtgtgtgggtgagagtatgtgcgtgaatgtgtaagtgtgtgtgtgcatgcatgtgtgagtacatgtgtgtgtatgagtgtgtgacagtgtgtgagtgcatgggtgtgagtacatggggtgagagtgtgggtgtgagtgtggatgtgtgtgtagtgtgtgtatgagtgtgtgcgagtgtgtgagtgatgtgtgtgcgtgtgtgagagtgtatgggagtgtgtgcatgtgtgtgagagtgtatgtgtgtgagtgtgtgtgtaagtgcgtctggatttggagaaaagccaggagccagggaggggggctctcggtcaggtggaccccatccctaggctgtagacctgagggagtgggaacttgtagaattacaactggcagcctagagcccaggaccacaacccacctcacttcatcacttctatgcctccttttggggcctccaaagcaccctgggaccacagaggacaccatacccataaccccccaactcaggcattgggaggccgggactctgggtggtctctgccaaccacaggaaggtcccgcagcccaggaggcagaggccttggaacctgggtccttacccttgatgttggattccagcaggacctgtcccgagtcactcagcagacactgccacatccccgcctcagggttcagcacccacaccgccttctc

SEQ ID NO: 11812 - DNA, 1064 bp, Homo sapiens
gggctaggtctcacccaggagccccactcacaaacactcccatgatccccacaatcctcgccctgtcagcaggcaggctgcccccaggctcaccccagtgctcagcattgcatgatggacccagctgagggcagatgtagagggcaggggaggagactgagggtcagcagaggcaatcctcagctttcatactgggcggggccttccttaagcatccctgcaattgatggggcaggcaagctggctactttcccaactatgaggctggctggggggttctggtccccatgctgggacttccaggtctcttttgcctctggttcttgaccagtcaggaatcttctggatgccccagggatttgggggtggggctcagccccctggacaggctgcaagggaaagatgagatgtgggagggagagggcaaaggtagggcctgggctggtctccaatcagcctcctgtgccccctttcttgaaactataggcatgactgattactaaggccctgagggtcattcagaacattcctttgccttaactctgacagctaaacaccccacacagatgagagccgcactcttccagacctctagggaagaaggtattcccacctccctgtctcctttagcccttcctcctcccgctggaactcccaggttccttcttagaacatcccctgctcagcactactccacccctatcttcaagtccctaaatgtctcttcagaactactgatgggagacacaagactggtttcctcttgagggttcacagtgaactgggatatggcatcacagccttcctcccctacctgccggtctcctggatgcaggggtcttggtgcttagcccctacttccccaaacctgggtgatcaccctccagctacccatatctgggaaaatgggagaaaggagtctgggaccgaagggggtgctagggaacctgaaggcggggaaaccgctgacatcagaagcatccagaaatggaaagagggggaactagggagaaggaggagagtttgagcagaagagaaagagggggcaaagtggtagtatctga

SEQ ID NO: 11813 - DNA, 1393 bp, Homo sapiens
ccagcattagaactcgatagcactcggtgttaggaagcacagaggaaaatggccaagtcttggcttttcctgcacctcttcgagcagagaggcttatgttacaggtttgcctgacaggaagctaaggcagtgcatgttgtattgagagtgaagggttaggggtcgcaaccttcctttcagctccccagtcccctcaaaccacccctcccttcccctcttcacccctgccctcaggtatccctgttgatccgccgggagctgacagagagggccaaggacttcagcctcatcctggatgatgtggccatcacagagctgagctttagccgagagtacacagctgctgtagaagccaaacaagtgggtgagtcgcaagagccgtggggtgagggcttctgagatgcaggaggaggaaagactccatgggtggggctcctgacccaggacagggtctccctgactctctcccaccacagcccagcaggaggcccagcgggcccaattcttggtagaaaaagcaaagcaggaacagcggcagaaaattgtgcaggccgagggtgaggccgaggctgccaagatgatatccttctgctggagagatctcagcccagcccctagggcacctgagttccccattctccttcatgggcaggctgatgagactaaggcgaatgcgactccgtgctctctggcccttggctccttgttgggggtggggactacagatgagatctgaaatcttagtggtagtacctgagccatgactccccactgtaaggccagatcaatagcattggtggccttgccttcatttctggtgctgcccctagttcctggcagcagcctgcagggaggcccacaggtggggtccacggtagggctgggcacaagccacctgagcgcaaccttggatctgacagcccagaggaggactggagcaagggagtgtggtaaggacagggccagggattgagacctgcccttgcgtgtaccttaaccctcctcaccttggagaagcactgagcaagaaccctggctacatcaaacttcgcaagattcgagcagcccagaatatctccaagacggtgagtgtgtcagcccagcgtctctgatggggctgccttgagaaagtgctttcagttaaggcacattgaggtgagggaattcgaaccttgcttgttccggtttctactcagattggcttctctggccggcgcggtggctcacgcatgtaatccccgcactttgggaggccaaggtgggtggatcacctgaggtcaggagttcgagaccagcctggccaacatggtgaaaccccatctctactaaaaatacaaaagataatgagcccgctgtggtggcgtttagctatattcccagctacgcaggaggc

SEQ ID NO: 11814 - DNA, 1026 bp, Homo sapiens
cggcctccgatcttgtttcctgcccctagtcggggccgcttgggtggcagagcatcccagtcctgtgcctgctccccaccgcttcgttcacgaggcttgaatccatcactgggcgcggccatcttgcaacaataccggaagttgcgctaacgctcttaaataagaacagcgcggcttctaatcacaaatttccttccggctgccattttgaaagtgggccaggaaatggagatgacttgctgtcttgcgctgccctccctgggagggcagccttccagaaaggggcgggacttccgtatgcgcgattcctgtgcgcgaagttcgggtccgtagtgggctaagggggagggtttcaaagggagcgcacttccgctgccctttctttcgccagccttacgggcccgaaccctcgtgtgaagggtgcagtacctaagccggagcggggtagaggcgggccggcacccccttctgacctccagtgccgccggcctcaagatcagacatggcccagaacttgaaggacttggcgggacggctgcccgccgggccccggggcatgggcacggccctgaagctgttgctgggggccggcgccgtggcctacggtgtgcgcgaatctgtgttcaccggtgagcaacctccgcctgctcgccggacgcttccagtccctcccccaaaccccttgccctgtccccgcgcccctccacgggcctagcatttcctctgagcagcggcctggcctgatcaccacccatctccccacagtggaaggcgggcacagagccatcttcttcaatcggatcggtggagtgcagcaggacactatcctggccgagggccttcacttcaggtaatggcgggcagagcctgctgaccctgacctttcacccttgacgccgacccagcagtggctatagtcggacgtgcaacaggattcaacgctgctcttttcccaccctcctcatccctgcccctaggatagtgggtgctgcgagaacctccagcagcatacaaactgttgttttc

SEQ ID NO: 11815 - DNA, 1026 bp, Homo sapiens
catatggggccctgaccaaaaatattgaaccgtactactagaaatccccattctttagctaaaggataatctgacttcacttttaattcttcattgactattggtgctctgaaagaataggaaataatagcaaaacatgggaactcctagatagcatacatttatttttaaaatgtataccatcggccaggcaccatggctcacgcctgtaatcccagcactttgggaggccaaggtgggcggatcatttgaggtcaggagttggagaccaccctgggcaacatggtgaaaccccatctctactaaaaatacaaaaactaactgggtgtggtagcacacacctgtaatcccagctactcaggaggctgaggcagtagaactgcttgaacctggaagacagaggttgcagggagccaagatcacgccactgtactatagcctgggagaaaacaaacaaaaaacatatggtcaacttcccaagtaaactgaccaatgtcagtttaggttcagtcttactgtaggagtgcctgccgtaggccagcgcctctcaacctttccactaagtacattaagatcctaacagtaatcattgggaccccaggtcatcgtctcaacagaagctccagatttcttcaagtcttggccctcttgttttatatcaaaattttatgtatattatttttatattttcaaaaattctccccagatcatcaagtaatattgagatgctgacatagaaaaaagtagatttccagctggtatgatcagtgataaattggacttcatcaaaattaaaagcttttgtgcaccaaaggatactatcaagaaagtaaaaagctatcccacagaataggagaaaatatttgtaaatcataagtctagtattcagatgtctaaagaactcttagaattcaacaataaaaagataacccagtttacaaaatggatatgaatagacagttctctaaaagagacatatacatggccaataagctcgtgaaaagctgtttaatatctttagtcatt

SEQ ID NO: 11816 - DNA, 1831 bp, Homo sapiens
tgagggaagacagaagtcctgtctcgagtctggggcgctgtgccctctgaacctcttcatctttctcttcaacccctgccatgccctctggcctctcagtcgggcccccgccctcttgtgccaggctctacccttgctcccacgacctgtctttatttgtcgctctgttgagttccactgtctggccatgtgtcctgctctgtcattaataaccaccccgcacacgcgcgcatctcatcggtaggcatagggcccctaactttagccctttcggccttttcagccccatattccatatttcatattctgagcgcctgttttgcttattgccagcttatattatactttcgtctcttttctgtcccagtcctactattttctttttataccatgttgctttttttattttccaagccacctacctgtcatttaccctggaatatcattttaatgctggacttgggaaacaggactaacaacctccttaaaatcgatccatactattccaagcgtttattacacgtgtggttcaaaggatgtggtgtatctgaatttatgccacaacaagctgtattacaactggtttataggcttttttaccgcatcctcactccatggtttaatacatggaggtagcatagtacaatggaaaaaagtatgggttttgaaggcaaacaaatcagatccagccttgttgctgctcacaaactgaaggaccctacgcaggccgcaaaaccctctgggcctaatttccttatctatgaaatgaggacaacagtgcctaccacataggattgccataaagtcctgtagaagggccaagattgggaagtacctgtacatatatatacataaaatttaagcagttggaacgttttatgaaggttatagaactttaggagcgggtgagtgggaaggattaagcaaaagctgtaagtggtgataaggaaacaggactggggctagagcagagggttagaggtctgaaccatgagaagtttgagataaagttgggcaggtgtggaaagccttaaatgccagagagaagtttggcgtttatccagtattcagtagaaacactgatatataatatcaccagagggtgttaacccaatctagataatgggataggcattaattcatatttaaacaaccttgcctaatagcattgttactttcctattacatatcaaaccaagatcttcctttcttccaaataaagatcacctttttcttcctctgtggaatcgtaagattttaaagatggaatggaactggggttgtgcagtttgctcagtgtcacccagacatcatccaaatttatcagcaccctagtctaggcttatttgcactacaccagctttgaacttcctactctttcatccttgtttctgacccagttatttttgacattgtaattagcaattagtgtttacatttgacaggacgcagcggcttatgcttataatcgtaacactttgggaggccaaggtgggaggaacgcttgaggccagcctgggcaacattttatttgtctctacaaaaaattaggccaggcgcaggggcacatgcctgtaatcctggcattttgggaggccaaggtgggcagatcgcttgaggtcaggagtttgagaccagcctggccaacatggtgaaaccccatctctcctaaaagtataaaaattagctgggcatggtggtgggcacctgtaatcccagctacttgggaggctgaggcaggagaatcacttgaaccctggaggtgaaggttgtagtgagccaagttagctctactgcactccagcctgggtgacagagcaagactctgtct

SEQ ID NO: 11817 - DNA, 1099 bp, Homo sapiens
tctgacatcaggagttcaaggccagcctggacaatatggtgagaccccgtctctaccaaaaatataaaatttagccttttcgtactctgagcagcaccatggtgtttgttaagaacaagtgccttatgaaaggtggcaaaaagggagttaagaagaaagtagttgatccattttctaagaaagataagtatgatgtgaaagcacctcctatgtccaatataagaaatattggaaagacttggtcaccaggacccaaggaacccaaattgcatctgatggtcccaagggtcttgtgtttgaagtgagtcttgctgatttgcagaatgatgaagttgcatttagaaaattcaagctgattactgaagatgttcagggcaaaaactgcctgactaacttctatggcatgggtcttacctgtgacaaaatatgttccatggctgaaaaatgttcaacaatgattgacgctcatgttgatgtcaagactacgatggttacttctttcatcttgttttgtgttggttttactaaaaaacgcaacaatcagatacggaagacctcttatgctcaggaccaacagtctgccaaatccagaagaaaatgatggaaatcatgacctgagaggtgcagacaaatgacttgaaagaagtggtcaataaactgattccagacaacattggaaaagatgtagaaaaggcttgccaatttatcctctccatgatgtcttcattagaaaagaaaaaatgctggagaaccctgggtttgaaaggcatggagcttcgtggtgatggtagtagttctggaaaacccactagggatgagacacatgctaaagttgaatgagctgatggatatgaaccaccagtccaagaatctgtttaaagttcagacttataatagtggcaaataaaaagttctatttgtgaaaaacaaacaataaacaacattgaaaaaagcaaaattagcctggtgtggtggtgcatgcctgtaatcctagctactcaggaggctgaggcatgagaatcacttgaacctggagacagaagttgcagtgagccaagactgcaccatttcactccagcctgggcaacagagtgagact

SEQ ID NO: 11818 - DNA, 1046 bp, Homo sapiens
ttctgccaggacacagggctcacgcctgtaatcccagcactttgggaagccaaggcagatggatcacctaaggtcaggagtttgagaccaacctgaccaacatgatgaaactccgtctctactaaaaatacaaaattagccagcacagtggcacatgcctgtaatcccagctacttgggaggctgaggcagtagaatcacttgaacctgggaggtggaggttgcagtgagctgaggtcgcaccactgcactccagcctgggcaacaagggcaaaactccgtctaaaaaaaaaaaaaaaaaaaattctgactgcaagtttttgaaaaatgagatttaatgtttagttgccggtatagatttgcatttggaggtgcttttttcccctactgcaggactaggcaatttttatattatttcattagattatgagaacttctagagaaatggaatcatatacttaatggtgattattcttggccatagaatcacacgctgtcacattttgtctgggcctttgcttctcttggactgacagcactctaactggttttctaagagttaccagccccctttttcatttagtatcactactcatttttccttttcagggaatgtatcttaggaaacagctgacaataaatgcagaggttatcctatctgagtttttactatttcccagttcttaagtatagatgtctttctctctctacaggtttgcatcactggttgctgtttatgttgttggggggttcctataccagcgactggtagtgggagccaaaggaatggagcagtttccccacttagccttctggcaggatcttggcaacctggtagcagtaagtaacagggcagctggttgaatttgtagcctgcaaacaaggttgggtgaccaaccatcctcgtttgttcacactgagggggttcctgggacacaggacattgagtgctaaaaccacaaaagtcccagcaaacaagacagttgccctagtacagagtagtaagtggcacagcatccatttctggccttggtaagacattgctga

SEQ ID NO: 11819 - DNA, 1026 bp, Homo sapiens
caagcagcaggtgcattgaatttactcaattgtaaagtggcttggtgatccccaatttgttgtcattgatttgtagtgtaaaagacaactgtacttatgggaagtctagaaacccttgagatttgtgacctgtagaggccaaagaggtttcagaagactacatcaagccatcaaacagtaaagaggcaaggatggctccacccaagctgtcatcattcttttttaagttctttcatttccctcttcccaactttgtagtttgttctgaaagactcacctatacattagactacaagttacatataaatgaattttctgctgcagatgctcttgttacagagatattaaaatgtactatgtgttgcatatgccagagaatcttgtactttctggataattaaaataccatcgatttattacacattcatacgctttatctctttcctctctctcctgatcctacctgccctccccaacacacactctctcccaaaggatgttccctttctacagctgctggaggactggactgctactactactcctggctgtggcagtgagagaatcctggcagacagaagaaaaaacttgcgacttggtaggagaaaagggtaaagagtcagagaaagagttggctctagtgaagaggctgaaaccactgtttaataaaaggtaaatgagaagaaccttaaagagcttgagaaaatatttatgttaaagtcttttcttcttactgattttatttcataatgtgctctcttttatgacatagagcaaattctcagcccagtttttagttgctgtgtgcagttttctcatctttcacagaagtgtagctatttccaagactggatccaagagaccagcttgtagaaatttaaggattatttgacacctacatataataggactttagaaatatcagataaacatatttaggccgacacatgtcattataagtgtcaggaaccttcagatatataaatctgaagttggtccctaagaaacgagactatccgatgaaca

SEQ ID NO: 11820 - DNA, 1810 bp, Homo sapiens
ttatttaggtctgtctctcctgccagagtgtatacaccagttggacaaggacgctgccttattcatcactggatctatagtgatttgctcagtgccttgcacacaggcactgttgggtaaatattttccggctgcaggaaacagtgaaggactaacctcccccatccccgccccccaccccccgccccccgccccccgcccctctctgcctcgtgggaggaagagcatgaattgggagagcagagccaccacaggaaaccaggaggctaggtggggtggaagggagtgagctctccggctctcaggagcgaaagcttccaagttgggctctccccttggccccttccacccagggaagacagctgggtcctccaggaccaagaatccccaaaggggctgctcccagaggttgtgttgcagggactggagagaggacttcccagtacaggggctggccctctgatcaggtgggggtaggtggcagcagagcatttggtaggaggtcaggagctcataggagatgggattctgccgatgcctgctgaatgaatgagggagggagacggcaggaccagggactggggaattggtactaaggtgctgggtacctgccgagcaccctgtccatacatgatctcagttcagctctccaccttggaaacacaagaaaggatccctggctgaagagggaaacagaggctggaaacaggtacatgggcagggtggtggtggtgagagaattgcccgaatcaactgccaaatggtgcccaggttggaaaagcaaatgtgcacacgtgggttcttcccactctaaccctgaggaattcgaggcctgcgtcctagacagactgggcagtggctagtgactctaggtataggagtgtccaggccctgctcacccaggctagagcttagggagccagaaggaaggaggtgcatgttggggtgcaggacaggagggaaaaatactcgaattgcaaggtgagggcacagtctgtttatattgggttgaattaactcttctcccgatgccactaaagcaggaatcacactgcagatggcactgatttgattggcaagagacatgccaggaagaatattaagggaccaggcccctataattaggcctaatcatagcctgttgtttgaaaagggcatgagggacattcatccggcctggcactgtgccctagacctgctctcctgggtagtggggccctccattgcaacagaggtgtgggtgggcctgggtgagtgtggcaagaaatgcctcggaggctgtacttggccttaaagggctgtgtgaccttgggtaaactgccttctctgaatctctggtcctttccatttcccattctccaggctgagaactgcactctgatacacggttattcccaataataataatgtgtgtatcacacataatgcactgcacctcttcaccatgctggcacctactcctctgctccccctgccagcttcctcagccccttcttctaccctgatggttctctccttgcctcctcaggccagcacttcccatgatctgagatgtctctttccttttcacctttttctccagcagtgagttcctcctcctaactcaggcttccaggaaggatatcctctgcttctcagacctgaacctgcctcgaatactcatgaggacccaggagctactcctcacctcccacttctcctctgtcctgtcacataaccaaggcacggccaactgatctccaaccatctgaggaaccaatcgtgtgagaccacccacacctttcaaaaatgttcctcccctctccttctt

SEQ ID NO: 11821 - DNA, 1035 bp, Homo sapiens
agcttgttgaagagatcccacatcaattccctgccttggcttacggctctcactgcaataggaaagccacggagtggggtgtggggttcagtcacatttgacccccggctccgtgttcctgtcccctgtagtgtttttgttattagacccttttttctccttggtttaggaatgggggccccagggccacccttgtccaggctccctctaccgtagaggtgagaattccagggcgctacagtttgaaaaccactattttatgagccaagtagaacaagaaatgacaactattaaaaaaaataagggatttctgaccagctaacaaccccacagaaaatctgccagggatccagaaatgagactgaggtggcctcagagagcggctccctcctgaaggggatgctgctgctgtcatcctgcccggcaccttggactgcagtgggcggggcctggggtggggatgagggtgcactgaccagcaccgcagcagcttggggaggttggggtgctgttaacatgccatcgtataggtcggaagtggaaatgggagaaagtgtggggtgcctagggaaggaggtgactgagtagggagcctggctgccatcctaacacccagctcactgggcttgagagacttgagcctggtgccagggcagagtgggtgatgctggggcccaggctggcaccatacttgaggtctgccaggcaggtcaggtaggatggcacatcgaccttggggacttggcccaggtctggcgtgtagaagtagttctccgggacacacgggattaggtagggacatgtgagaggtgacagggacctgcaggagcagctagcgagacctcatgtgcaccctgcacagctgtggtggcataaggggttcaatagagcctctcctagagaggagcctggcaaggcccccagcccctgcccctgcccctgcccctgcccctccccctccctgtccacctgctgctccagctgctctctcattgatggacaaggggcactgaacagtttcttctctgtctctgc

SEQ ID NO: 11822 - DNA, 1034 bp, Homo sapiens
gcctctgaggggtcatggggccatgacgctgtggccttggtctacaggtgtctaacttccggcagcagctgctggcctgtgccggggtggaagctgagcgcgtggtggagttttcctgtggtgagaagctgtgcccagggtggggcaggctagaggtcaggttctggcccccgttttctgtgggtaataactcatactgcgaccaggcacagaggcggaggagaccccgggatgggagactcacccttcgtgcgctcacccaggctctcctgctttgctccctgctgcctgctgcgtgctgcccagtgtgactggcgatggtgggtgggtgagcgctgtcagtcgctgttcctgtgctggatgatggggcaggtaaatgccctctctgcagtgtcttacagcacacctgcatcttcagttttcggcccctccctggctcttaccaggtcacgtgatccctccagacaacatcctgccccttgtcatctgcagcggggtctccaaccagccgctagaattcacgttccagaagagagacctgcctcagatggtcagtcccagccagctcgctgcaccacagcctggcctccggcagcaaagggttttctggggcaggggcgctctggcccaccctgagtgttttcaggtgttggggaaattgcacagggacacccacttagagccacacagaatgagcggcgtcgatctagatgcttatggaggaaggtctgagcttccccgcccctcacgccttaggctgcgaaatatgtattcataaaacctccaggcatcctctgaggacgcctcactcagcagaaagctgctagttccctttggctctcttgccctttggttatatctgcccctgccgggggcagggatgtggggcttgggggcatctcctgtggtgtgcctggggtgtgcagcccctgattgtcattgtggtgcccatcaggaccctggacagaagaagggacgactcagtgccagggcaatagggaggccccccagggacgctagtgctgtgacatgtg

SEQ ID NO: 11823 - DNA, 1050 bp, Homo sapiens
atctatgagccttgtgatttggactattttctttctcaacttcagtttcctcatatgaaaatggagaggataggccgggcgcggtggctcacgcctgtaatcccagcacgttgggaggctgaggggggcggatcgtgaggtcaggagatcgagaccatcctggctaacacagtgaaaccccgtctctactaaaaatacaaaaaattagcagggtgtggtggtgggtgcctgtagtcccagctactcgggaggctgaggcaggaaaattgcttgaacccaggaggtggaggttgcagggagccgagattgagccactgcactccagcctgggcaacagatcgagactccatctcaaaaaaaaaaaaaaaaagatggagaggacagtatggtccacctctgtgggctggttgtcctagagattaaatggtgtttaatttaaagagaaagcactagcacttgtgcctcagacctggactcaactgtggaccccctttgctgggacgatagaagtgtctgttgggcttgcactcatctccccaccaatctgtttttccaggcagtctcagtcagagcaccctgaagtttttgctcctgaatccagctgtgcactttgcccaagtggtgaaggaatgccgggcagtggtcattgccggggggaccatgcagccggtaaggacacctttcccagcccctcgttccccaggtgttgggatgagatgggagcttgggagagatgcgttatcagtcctgttctctcctggggccgcaagccagaaagggtcagctcgagcaggcccagtggtgtccactgggtgacactgctattctctcactgctgtgccttttaggctgcaggagcagtggagactcctctgctgctccattctgtagccccaggatcacatgtctcccagagaaagctgttctgtggtttcaaactcaaggaaaaaaatcatgattccacttttaaaaggttcgttttgatgtatatgaatataatagtctttgtaggcataatttttacttatgtgcatagctgttttaaaaaca

SEQ ID NO: 11824 - DNA, 1069 bp, Homo sapiens
ccaccaggggccatcctgctcctttccccacaactttgtcctgctcgtccaggcctgggagacgctgggtctgtgacaggctgaaccgtgtgaggagcagccccctccctggcctggccggcccatcactggaaggcaaaggagaggtggcgggggcaggtccacgtgtgttggtaggatgtcatttagctggcaccatctctttgcctctttctttctcctttgttgcagaacctttgtgtaaatgaagacgtgagaagcctaggttctgtgcagcttatcaacaaccgctgcgtggacatgcagagaagcaggcacggtagccaccaggaccatggtgtagccgcaggtggtctggagagagtgaggcaggggtggcagtgactgaagaccattcagtgtctttcatagaaagaatggcagaggagaccccagttcctccctgagtcccctctccttgggaaaaagtgttcctactctctgggtgagcgtctggtccgaatcgttggcttggagatgattttacgggctctttctggagaacaaaagtaaaacgttacagtgttccgatgagacacagtaggcagtacttgggagggtcttatagaccccaccctgtggaagtgggtctcaacattacacaaccccctctcgggcccgtggacagttgctgtcctctctgttttctctctttgtgcctgtgcccccctcagagaagaagaaaggagctgaggaggagaagccaaagaggaggaggcaggagaagcaggcagcctgccccttctacaaccacgagcagatgggccttctccgggatgaggccctggcagaggtgaaggacatggagcagctgctggcccttgggaaggaggcccgggcctgtccctattacgggagccgccttgccatccctgcagcccaggtgagggccctgcagggccagaaagccgctcttggctctcactgtggtctaggccatgaggggggtcctcatcacactgtagtttgggggatgccccccaccgtggtcaggttgatggcaccttaacccattctctcctgaggcgtg

SEQ ID NO: 11825 - DNA, 1105 bp, Homo sapiens
tgtctctaaatggtcttggggatggagtgtgggtggttgtttttgttttcaagaaaaaggctgtgcctcctgtcaaggaaaattgtcctgctatggagaaaagtgttactatttttcaaaagaagagaaaacttggaatgagagtaagaagtcatgccaagatctgggttctagtctcattaagattgatgacaaagaggagcaggtatgtttattttattaaccccgagtaagtgctttatgagacatgtgtgtgtcctgagttaggataattgtttgggctttcctctcatcttatttgacccatttggtggaggtacctttagtactggtgcacatttaccttttacctgcagaggaaggggagtaggtattaaagagacctggaagcactgttaattttaaacaagaataatagccctgatgtcctctcattgtatgtgttacatcttcatattttagtatacatcagactattcaatatttagcctatcagtgctaatgtaggacaaaagataaactgccttggatgatatgagtagtcgaaaagagatgacttactgtattaagctcacttctttcaccatcaatatttgagaaagatcaaatttctaagggaagatgatctcttactgtcatgtccatggaaaaaaataggatgaaaacaatgaagaatgcaaataacaatgaaaaatacacattgttctttatgtgcccataaaatctatgtgtgactttcatgctttaaatataaatttatttataattaatttactaataaattaatatacttctcatggatgtatgcatgcatgatcaaaagtttttggaaattaatggtgatgagtgatatttatctgattaagattttttattgctatcaaaatgaaccataaatctatataactacgaatatggtggttcttattcaagtgatatttcaagtaatgtgggaaaggacaatttatttcatgaaaattggttgtgcaatttggatagttatagaggcatagtatacattccttttatactatataccaaatatactagaaagcataaaaattggatgagaattagaaactataaaaatttttgaataaaatat

SEQ ID NO: 11826 - DNA, 1048 bp, Homo sapiens
atgtttctttttttaaaaaaagtattaagttctgggatacatgtgcagaacatgcaggtttgttacataggtatacatgtgccatggtgctttcctgcacccatcagcccatcatctaggttttaagccctgtgtgcattaggtatttgtcctaaagctctccctccccttgccctctaccccgcaacaggccccagtgtgtgatgttcccctccctaggtccatgtattctcattgttcagctcccacttatgagtgagaacatggaatatttggttttctgttcctgtgttagtttgctgagaatgatggtttccagcttcatccatgcccctgcaaaggacacgaactattcttttttatggctgcatagtattccatggtgtgtatgtgccacattttttttatctttatatgtcgttccttttaattttggatttagttcttgtttattctgattccttgaggtgcaatgtttggtttatttgagatctaattttttgatgtaggctataaatttccttcttagaactccttttattgtatcccataggttttgatatattgtgtttccatttttgtttgtcccactatatttttaatttccttttaaatatatttattgacccatttgttcttcaagttcctcctgttactaatttctacttttattatattatggtcagaaaagacacttgatatgattttgatatttaaaagaaattgttgagacctgttttgtgttctaacatataatacatcctggagaaagttccaagtgctaatgagaagaatgtgtattctgcagctgttggttggactgttttgtaaatatctgttaggtccatttgatctagagtacagtttaaacctgatgggtttattttggttgattttctgcgtggatgatctgtccattttaggaagtgggatgttgaagtctgctactattattgtattacagtctatctctccctttggatctaataatatttgctttatatatttaggtgttccactgtttagtgcatatatatagttgtttctc

SEQ ID NO: 11827 - DNA, 1062 bp, Homo sapiens
atggtccttttcactcctcaaaatgcatgcccattgtcttcaggtttgccatggaaagtcaaatgatttccacttcattatgcaagtacgctatcatcttcaggtcttttgtatgtaaaatgtttctgttccagttgtagaccttgatgattgtgcagtatgaaatcgtattgtaattttcttgcatttagatgtcaacctcagaaacaggaacaatcgtcttttgaacttccagtaggcccacagttgttggttgttcctcaaaacaggttgtggctcctgttgaataagatgatccattaaaaactgaacaaggttgaggagaaatagtgcttacgttgaaaaatctttaagtctttgtccccgttctctaacttccttacgttttcgtttatttagctctatccccactatctactagaatttctcatatttaaaccaagatgggagactaggtcattaggaaaatattaccgtctacaattttcttatactttgatctgtcttttatttgattgtaagttgctgatggacagtgatcattagaaactgaattttgtataatactagttttatatgaaactagatttttattgcgctcaggttatgttccttttacctccttccttaataaagagaccacttgaaataatcagactttttccaagtactgtctgcacctcatcccacctcttccccattcatgagatagtgcagaaccctagcacagtcttttccatatagtaggtgttttttaagtttgttgaattggttgctgtcttgctctgtccttagattatttgcctttagattatttatctttggtatttcattggtatcaggctgagtctatttgtatggatatttttaatgtaaatattaatgtaactgagatgatttatatattctattgttagactacttcgttttgatttgaaatgtgtgaacctatgagcatggactgtgctgtaagtttaaccactgacccctttaattaataactggattcctagcatgaatggataatgaagtcgaatagaaaattttaaaaatttaataaac

SEQ ID NO: 11828 - DNA, 1034 bp, Homo sapiens
attacagaggctcattttagaactatagtcagtttgctagccaagataatttcagtggcatcctatcagtttattatgcagatgtaatcctgatttttatgtcattaaaggcttattatcttgtctctcagtagaagttagcagagtatttcattgattgtccaaaaacttttaatccaacagctgtatataataatgcccaagttgtattagctactttgtataaaaatgtggatacagtatcagcaaatccaaaggaaagaaatccttattggattatgtcagcctcattaggcctatatcatctcactgtccttcttgggctcaatacttgggaaaaagatggaaaaaatccattatggcctaagtatgctttagctatcgatgtcttcccaagatctgtctctcctctgccccagggttttgtagcacatcccattttcttggtctgatcctagccacttatttttatttgtgcccattcccctcaaagtgtccccatagtgctcttacttttttctgtcaccctgaattgtaataacctatttgtctgctttactggtttgaatgtaagctccttgagaaccttgctgtatccacagagttagcatagtgccctgcacataatagatgctttcaataaatatttgttagtggaaaggagaaaggaatgaatgcatgataactattggacgcaaaatctgtgttcacaaagaccatccaaatgcttttaaactatcaaatttcttttcctacatttggtaagggtgtggcattgataccctactgggattataaattggtaatggtttttggaaagcagtttggtaatatgcatcaaaaactgttgacatttttcattcacctttggcctagtaatttcatttctgagcatctcttctatggaactattcctaaatattggaaaagctttattatgcatgaagatgctcattgaagtattatttataataggaaattaaccccagtgtctaacaaggagagaattattaaattaattaaaaattactagg

SEQ ID NO: 11829 - DNA, 1011 bp, Homo sapiens
gtttatgtccaaaaaaacattgcctagcctaatatgatggaccttttctctgtgttctcttctagtactttcacagtgtcagatcttacatttaagtctttaatccattttgagttgatttttgtacatggtgttctttattgagtatattatctatttttattctgaaggctcaatgttttgcctgctgtgtatagaaagcaaagaactttaaatcttttttctgaagaaaaacaacctgcttaatgatggaacaaaaaatgtgtccctatcgaacagaaacctgggtaccatgtacttgctatatatactgttaaaaactactccccattcccccttgtacttttagtattatagcttaatcctttatgccccattagtttctataggttatttttctataaaaatttcttgcagatccaatgctattttcatagatgaattagctacttatttattcaacaatcatatgaattctgatatatgccagacactgctcttggtgctagggatacagcaatgaacaaaatagctggtccctaaacttttattcccatgaaggtttcatgctttttcttcttcctttgccagttcatttttgtcctccccaccagcccaggctcagccagtctctagttctccaacatgctttctgaatttagatgtggctactgttctgtgcctacttctgggctgggctaatgagggacctaaagaagctgactgtgctctccaggaaattaaagtcttgttgggaagaaacagataataataggcaaactggttaagtactgaataagtaggttgggtattagatatcatgtcttggcatagtgtctaactggagaaagtgaaagtagaagggaacgaatgtgcacaaaggtaaagaagctaattacggctgggtgcagtggctcacacctgtaatcccaacactttgggaggctgaggcgggcggatcacctgaggtcaggagttcgagagcagctttgccaacatggtgaaacccca

SEQ ID NO: 11830 - DNA, 1033 bp, Homo sapiens
tagtttgtgttgcaactgagagtgcctaattttgtaatgaagcattttgttttttacttctaaaaaaaattctgaacatagctgtatgcactgtatcttatcccctgtgctgtgacactcactgtcagctctcattgcctctccaggctggtgagattggagagatgaaggatggagtcccagagggagcacaacttcagggaccggttcatcgaaatccaacttaccgcccaaggtaccgtaggtatgtcgcattttccactaatggccagttaaaggacttgtgtgcacaatggtagaatgaggactgtgtggttccgttttgtggatttattatatatctagaagatgtgaatgctttgactacatgccagagttttcaggtggtggtgtgacatttcccacctacttaatactagaatttttagttatctctgcgccaaagcgtcattttgtattctggaattataataagatgtaaattaatacttaatttttatcaaaataaatcagataaattattggtgggcaattctgtggtaatgctgcagatggaggaagaattgagtgtcagaggatatttgggatagtgactgttaatcactgaggcagtccagtagaggggttaaatcagggtatgatcaaatcgcctgaatttatcttcctactctacagttcattagatgtatgttcttggactgcattccagcctgcgcaacagagtgagaccctgtctgaaaacaaagagatattctatagttggggattaaaggtactaatgcagctaagataattagtgtggtacctgataaagtaaaggcctcactatgtattagatattattaccaccattgaggttaatattagtgaacgctgggttattctatttgtgctttattcctttggaagactgaattaggctagactccttccataagatccctttgaagcattttataatataagcctgcccattcttttatcttaccctttgtggtaagtggaaaagctacaacttcttcctgaatgatgt

SEQ ID NO: 11831 - DNA, 1030 bp, Homo sapiens
ttgcttcgctagtacgctggggaggaggaggaggaagggagcggcagcagtgaaggatttgacccccctgccactgataggcagttctctggggcccggaatcagctgcgccgcccccagtatcgccctcagtaccggcagcggcggttcccgccttaccacgtgggacagacctttgaccgtcgctcacgggtcttaccccatcccaacagaatacaggtaaaattgcaactgagacttctcttcagcaatcctcacccttccgtccttctctgcctcctcttcctcctcctcctccaacatcagctgccagaaaccttgcttatggcttcctgatgctacaaaagctgaggcaaggccttcagtctgttttttcaaagcagtcattccggtaacacttctaaaagcaaaaccacgtgatccatgcctataatagggaacccttatggccaaagtttctagttgatagaagaacaaaagaattaaggtaacaagacaggtggaatgtgtaagagcttggactctgaagtcaggctggatttgaatcctgtttctgctacttatttgtgaggttttgagaaaaccaagttttagattaagttcatccattaagtgggggcattaaatgcctgcaccatagggttatgatgattaaatataaaggatttagcaaaagagatgcctgcagcataaataacatttttaaagtattggttttaaatgagacagtgctgatttttaaaggcaacctaccagaatggaggttgttgattattgattctcctttttcactgcagaatattagtacagctgttttgagtttgttttgtgcttaataaaccttacatcaattttgcagttcctagggaacttggaaaactagggatagatcatcatttttgttatcagtagccacaacttttttctcctcagtgtcgttggggtttcttttttttcccctcaccgctagatgttttgaccgaacattatgttcagtctgttctttgctacccttctcctgtcccatcat

SEQ ID NO: 11832 - DNA, 1019 bp, Homo sapiens
actcccaggttaattcaaaagcaaaagtggtagaaaaacattcagtgaaaaatttttcttaaagacttttcctgtccaaaacctgaaaattccaaagtcatgcatataaaagatatttagaaacaaaattgttaaaacgcttaagaaacaaaattgttaaaactcttaaagtatacataaatgagcttttttgttgtaatatctaagtcccaacaacttgttcagtatctctcaaaagagtgtgttcagcattgctggtgccattattatgctttgtaaaactcttaaagatttgattgtgtgaaatgcaaaagaggaagataagcccaagaagaaaaacagtttatgttgtctcacacttaatattttggtaagcattttctgtgcaaataaacgtttacataattgtgaatctcatctttggtagaggttttatgaagagtagaatgacttgattttttttgaagttagactagttgaggcttttttggagggggagtttggttgcacatgtggacttgttctggaagggtccaaagcttaaatacactcctgtaaaaaaaagtaatgggtcattattttgctttttttatttattcatttttaaaaactagttacttcccattaaagacatttgcatatcccctttaaagtaagacttgaaatcacagtctttgtaggatgtttggttttttaaaatgtaaaatggtagtatatgatataatttaaatagaagaaaaatataaaatgaatcggtaaattcctttgtgaatattaataagatctattatttagaaacctccaggattagggcttactaccatcaaagtatgattaaagctttactcctaaacatataaagggagtcatgccttaggtcagtggttctcaaacttcctgattttgggatctgtttatatgcttacatgttattgaggattctagagtttttgtcaatgtttatttatattaatattatattagaaagtaaaataaacttaaaatgttaattgattaaa

SEQ ID NO: 11833 - DNA, 1025 bp, Homo sapiens
aatttttttcttctgccttacctagtctatcgttgaagcttttgaaaatatttttttttttttactttattcattgaattctttactaccaagatatctgtttggtctttctcatgacatctaggtatctggtgaatttcttattcatattctgatttttttcagatttttgtattgattatctttgctctattatatttaactaagcttctatgatatcatatttatgaattttttagaagttcatagattttatttttgttgcaatctcctgctgaagaataattgtggtcctgtaggggtgtcatgttttctagcatcttcatgtttattgagtccctatattagtatatgcacgtctggagtaacagcctcttcttgattggctttcataggggaacactattttttctatagatatatctgtagtgttggttgcatacagcactttagctttgattctgggtgtatacactagcataatatctgtatggtttctttgtctctagtcgggatcagtggtctgtgatttcctcagttgctaagactgaggttgttagtaaaagtttttgtgaggttttgatgggaacaggggtactagatgggccagtctgcaacacatgttagtggcagcagtggaatgagcatgccggtctttgagcctccagacaacaaacattgacaccaatatccacagtttcagttgggtaaattattgtacctccagggagtttcctgtggtgctggaagttgcagtggtgggcctggtgagtgagtggttcttgagactttgtgcaatgtgcctggcatgggtgatagcaatagcagtagcaagacaaccctcaggcttccaggttgaatgtgctggtggtaatggtgatggcaatggcctatgtaggccagtcctaagaatccaaggtgtcacatgcaggtacgtactggcaatggtcttggcacaggctgtgtaggtttgtcctcagacccatcagagaagtacatgggtgccagcagtgctggatggaatg

SEQ ID NO: 11834 - DNA, 1066 bp, Homo sapiens
ttccacattttttggcatcaaaatgaacctaaactgatatgctgtaagatgtctgaataggagctatttcaaggaataatgaaaaataagacaggagtttcaaaacatcccctataagagcaaaatacatttttctaaaattaaagtgaaaacaaagagaaaatttatggttaagcttgcatgaaagaaggtaaaaccactgatgctttctgaaaagttcatatggataatggctgaagaaatcagcagttcacaagtagatatgttatttcaagaagggatgaaatggtgctgaacctcaagtctacggtgacagagtattcatatcaaatgtatcttgttgataccatgatagaagaggaatgaagattaagagtacaaacaatagccaacccttcatgttttttaattggttcatcttacatgattctaactgaaaaattaatgttgagcaaatttttcactctgtggatgccaaaactatggcaaccagagcagctacagacaagagaagaagcttccctgaaaatttaaataaggggataaagatcctgaagcatttcatcaaagaattgtgacagcagatataacatggctttatcagtacaatcatgaaacaaagcacaatcaaagcaatggctaccaagaggtggaagtggtccagtcaaagaagagtggatgaggaaagtgcaaaggtaattgtaagagtttattgggaagctcaaggcattttgcttattgactttctgaagggccagagaaggacaatatatgcttattctgagaatattttgagaaagccagaactctagtagagaaatgcctgggggagcttcagcagagtccttcaccacgacagagctcctgctcatttctctcatcagacagggcaattggtgagagttctgatagaaaaccattaggcatccacattacaccctaatttagatcctttggatgctttttgttttgtaatctcgtaacatctgtaaagactatttattattcttcagttaatgtaaaaaggacacaccaatagctggtatgttgaccaaaatgtatgaaa

SEQ ID NO: 11835 - DNA, 1152 bp, Homo sapiens
aacaattctttaaaacttttacaagaaaatcaaaataagactctactgcctttaatttgaggaagcacatgtcattaaggaaaagactgatgagttcacatttgctgataaaaataatataatctgtccatcctaagttaggtgtccaacaaatagttacatgtctatcctctcacctttcatgtcctccaacacttctctttaaagagtggcatagaataacatcatgaaagaatgaggaaactccagtgcaacaaaaaaattatagagtttataaatatctttttttgtttacaaatatattgtgtgagatagatttttccatcttaaatatgtgaagaaaaattaaccctgcaataattagtattgtaacaacaatattgcaatttgaaataagacaaatgtgtaacatacttcttcttccaaagtaaataagaggattaaatatagaattgaaaaagtaaacaatcaaacagagaaaataccaagaattgttttgtaatcttgaaagttgggaagacatgtttaaacatgatattaaaggcagagtacatttaaaatgaatgcatttaatagcatgactggaagaatttctgaatgcctcaagaaaataaatatagaaaggtaaataatagattaaaaactttaaagtctatttgcaatataaacagtagaaaaaaatttaatacttttactgttttataaaaaagataaaaataattttaaaaaccagattatcatatataaaaaattcagcctcacatttaaacaaaaacgtaagtttagtatagtactatggtaaaatgaataacaagtgctctattttgcatttcaaattggccacattttgcttttgtaaattgttacatagaattataatgtgtgcaaagttacgagcagtctcgtttaatgctagtgagagcttacattggtgcatgcattttgtaggggactttgtcaatattaataaaagtcttaaatgtttatatagattataacctgctttttggacttcacccatttctacgacttcatcttacaaataattggagatttcaccacagagttttgtcttagtccattttatgttgctataaaagaatacctgaagttggataatttatttttttttgcatttttgatcatgtggat

SEQ ID NO: 11836 - DNA, 1065 bp, Homo sapiens
ctagaaagtaaataattttaatttacataaaattatctcaacagatgttgcaaaaatgtttaatctaatttaactcctaatcaagataaatacccaaaccaagtttaaatagaagcaacatttaataacttgtatgtctactaaacaaatacagaagcatagttattagtgtaacatagagcttttcatttaatcaagattaagacaaagatacttgtttattgacaatttcgttaggtcatttaactaatacactttgacaaaaatattgttacatagaaatttggatggaaatttaaagaaattatatactaatagtagtaattccacctagataatttaaaaatcaacaggaaaacttttgaaataacacaaatttgataagcttgctgagtacaatatcaatatatatgggctaaaattacacctattcaccagcactggtccattaaaatgtggaattaaaaaaattccctttcttattacaaataagaactatattttgattatgactaagtctcagaaaagtgtttcatgatgttatatattgtgaaattacataactataatactttagtgaaggatttgaactatatagatatgcaaaaattaattttcaaagacattgattatgctcaaattaattcacatattcaatataattctaaccagaatcttaaagaaatttattttcaaattgacaaaacagtcctaaattacacatgaattaagtattcaaaaataattcagacaattcttgaaaaagaaaattaaggtaggggtatccagtagatagcaagacttatttaaattatttatttagtggctcatacttgtaatcccagcatgttgggaggctgagatgggaagatcacttgagttaaggcattcaagacccacttgagcaacacagtgagaccttgtctctaaaagcatcaaaaaagtagctgggtatagtggcaactgtagtcttagctacacagagaatcaaacaggaggattgtttgagcccaggaggtcaaggctgaagtgagccttaattgagccactccagcctgggctaca

SEQ ID NO: 11837 - DNA, 1029 bp, Homo sapiens
ggtggctcacgcctgtaatcccagcactttgggaggccgaggcgggtggatcatgaggtcaggagatcgagaccatcctggctaacaaggtgaaaccccgtttctactaaaaatacaaaaaattagccgggcgcggtggcgggcgcctgtagtcccagctactcgggaggctgaggcaggagaatggcgtgaacccgggaagcggagcttgcagtgagccgagattgcgccactgcagtccgcagtccggcctgggcgacagagcgagactccgtctcaaaaaaaagaaaaagaaaaaattcatggaaaagatgcaataatcatgaatttggacatacctaacaatgcattacgtaaatagataaagcagaagcctcacaaacagaaactgaagaatccacaaataataagaatgtaagacacacttaataaactgccatatcaagcagaagaaagaatgatatggaatattttaagaatgcaattagcaaaaattaattcaatacttttatgtagaaatctgtacttgacagaaatctggacacaaacattcaaatacacatgaaacatttacacacctaaaccatgtacactataacaaagaacagattccatggaataagtattacgtagaatgtaaagtagtaaaatgttaaatcaatcaaaaaagtttgaaaattgaactattctctataactgagaaaaagatgaacatttctacataaaagataaatgtttagaactcagcaacgaaaaagcttttcacaatcaaaatgaaaaaaccggctaaagctaagaatccatatccattagtacatgttttataaaaaagttttccagatgaatgaggcacatattcaccttcagttaagaaaaatgaacaacagaaaaatttaaagaagggtgaataagttaagaaggagctaatatgtaccttgcgcttacttagtacatggtactgttctaggtggtttaggtgtgctatttattttatatttattcctaaaaacagtctcattccctttggtt

SEQ ID NO: 11838 - DNA, 1772 bp, Homo sapiens
tgaacggaattgactgggtcaagatgtgaaagagatcttcgaatcctcacagctttgactatctccagaatttgtctgatttcggtaataatggtgagatggtttatagaggagctgtagttatctttacagatgagcagaaagaaagccagagctgcaaactcttgtggtgaagagaatacatcactagggggaacccatccctgggaaagaagctgttcttaaaatcagaagtggaaataacttagagtaaaataatcagatgcttgctatcacaatggcattaaaaattcgaagactaggccttttggttcctttgtgaataatcattttcttattatatttactagctggtcattgtgtaatcacaaagattctttagaagttgaattaataaacggctattgtattaaattttattttaattacaatggttttccttcctttccttttttacctgagtagaatctcttgttattttctggacagaaaaacagatctgcatgtggtggtaattttactccttccatttgaatatatgtatctctgttatgtgcttgtttatctaatattaaataaaattattcactttctaattatccacaacattgacaagctttttctttgtgcctttttattagataatttttcagggtgttgcagatacacataaggttagcagctactttgaggtacaccattttaatcatggtcagaaggctaatcaaaaaagtattttacaagaattgttttttaaaaaatatattaaatattatcaaagacaacgttggcatcttttgagatggtcatatttttttttcctctgctgacttcattatccaaaacaaataatgaacattccttaacattcctggaatcaagtctgcttggtcatttaactcatatatcactttaatttgttttaaattatttaaagtgagatttatagttattactgttagagtagtcatatcaaaaaattttttttcaagaacttggggtatttctcttcttttcagcattttgtataaatcagcatactaaaggactgcctgttaatgaggaatcttccatgaaggtgcttttgggaggagtgaattctctattaaatttcatcatattttacttagatattaactactataatgagtttaatatatttttaaggtcattttgtatataagtcactccatattgtatatctgtaaaaactgtgttcagtttttcatgtttgcttttcagaatgtaggaaaaactcatcttttaaaacacttgtttaagctttacctgattactctgaagattatctgtttcccttattcttccagaattttcacaatcttttgccaattttattggattttcaagaagttattactgttagttcaaaatttatgaatcatttcttctcattcatttaatcttttaaattttcattaattcttatttctgttctcccaagtgtattttgtctctcttttttaattatttgagctcattgcttacttttttttcaatactcctggttgcattataaagtcatcaatttctaaaatgttttctgactattgtgtaaatcaagtcacatcaattttcacacgcaattgcccttcaaattatgctgccgccttgatgaaatccattcaggttttcttaagaatggtaagaatcataggcagggacagaactgatcagtgataaaataggggaaaataggtctagtggcttctggggaatacaggcatagaaccatactcactttcctagaaaac

SEQ ID NO: 11839 - DNA, 1110 bp, Homo sapiens
acagtgaggccgtagtacaataggactggtgtctttataaaaagaggaagaaacaggcatctgtgggcacagagaaaacacaatgatgtatgattccatttatataccattctagaatatggaaagtaatctatagtgactgaaagcagatccatggttgcctggtaactgggggtttgataaagaatgggcagtggtaagttggaggaataacacaggaacataaaggaaagttttgggggtactatatatgtttgttacctgattatagtgatggtttcacatgtgatgagtatcacatggtgagacactcatgaaattgtacactttatatctgtacaacttattgcatgtcaagtatacctcaagtggcatattagaaacaactcaggaggaaaactgcacataagtatgcattcttagaaagcttctctttgcaactttggaagaatcaaatattattatttcctattcttattttttgatcttagcctgggccttatgtttactggaataaaatatgtaggaattcttgttgtcttatctaccttactggtttgtcttccccagtagtaagtttttaagggaagaaagctgcaggggtgtgtgtatgtgtgtgggggcggggtggtgggagggataggagagcaatagcagagagctcctctgaagtgagttctagctttcctggagcctaggttctgcttcatcatcgaatgccccatgaaaattcagtttcagagcctactccattaccccattttcattcttgtaggaattggtgtgttcctcagattcagctcaatatcctggaagatgccaagcctgtaatgtccatcctacctctgcctgggtcatgtgttggcgctcctatccttgaaagttttttcttaaaatttcccatttttgcctgcttaactcctcaatctggatccctccaaattcgaggatcatatagacaacattacagatctttgctgatgtagtttattgctctctattgatttaaaaattttcttgaagaaataagaatatattgggatttaactccaccgtgttgtttagcaaacctatacttacttactttggagtaagatttaacagccatag

SEQ ID NO: 11840 - DNA, 1049 bp, Homo sapiens
cacccaccatggtagtttgtctttctctttgtcttctttcccaacctcatctttattgcctggatatagcgaggccagggtaaccttcttgtctctatgtggatagtacgtttgtacttctagccttgggatttttccttaatatttgtccatgctagctgagtttgccttttcaatagctctcttgactaaatatacggtaatttccaagatattttggttttattttattttatttttgcttagctttgcttcaggggactgaaggtgagggatcagttcttcatagtggaacaccttacatctttctctgccatctttgacgtttatgaggcatatttttctactttgtttggtagctgttgctgaatttgtttcattggtgctttgctcactttacttacttttttagctattgaagaagaatgactgtatcatgctgctgatttccccgtcttggctagacagtatgtcatcctttatctacattggtccctgtagtgaggatcatggagtagatgttgctgggagagtgagtatatgtgaaaaaaatgtgaaggtatttggtgctgatgaagcaatatgccctactgggcaggggagaggcacagaataagaattcttgccatgtggatgaactcattcaaacacaatgactgctttatgagacaatagatagatttctacctcttctcacatgtacagagaaaatatttccaaagtctccggaatatttacatgtattactatttaatataaacttgcaagtctttttaaatgtgtttaaaactatcacagtactaaacatgaactagatgcataataaatgctgaaagtaaaaagcctgaattatttaagtgaaaagagaaaaagatttagatcccaaataaatgtatgcgtttgtgtgtttgtgtgtgtgcgcgcatgtttgctgggcatgtacttgtaaaaagtaaaataatagaaaagtattattcttggtacccagcattctaggaataatgtcttccacaagattattagaaaactctgctactttgtaggaggag

SEQ ID NO: 11841 - DNA, 1022 bp, Homo sapiens
atacactcccacccaataatagtgagtgacatcaacactccactgacagtattagatcatacaggcagaaaattaatgaagatatttaggacctaaacttagcattggaccaaatggatctggtagacctttacagaagtgtccatccccaaataagagaatatacattcttttcatagccacatggcacatactctataatcaaccacataattggatataaaacaatcctcaacaaatgtaaaataaccaaaatcataccaaacacactctcaggccacagtgcaataaaaataaaagtcaacacaatgaaaattattaaagcatacaattacatggaaattaaacatcatgctcctggatgacttttagataaatttaagtctgaaatcaagaagttctataaaaataataagaacaaagatacaacaaaccagaatctctgagacacaactaaggcagtagtaagagggaaattcatagcactaaatgcccacatcaaaaagtttgtaaggcctcaaattaacaatctaaattcaaaattgaaagaattagagaaaaaagaacaaatcaaccccgaagctagcagaagataaggaataacacaaatcagagctgaactgaaggaaattaagacacaaaaaaccattcaaaagatcaatgaatttgggagttggaattaaaaataattataaaataggccactaggtagactaattaagaagaaaagagagaagatccaaataaacacaattagaaatgatttaaaggaatgttattacttaccctacagaaatggaaacagccatcagaaccactgtaaacacctctgtgcagacaaactagaaaacctagaagagatagataaattcctggacacatacaccctccctgctgctggaagtcagagaccccaaacggagggaccagctgaagccatggcagaagaacataaattgtgaagatttcatggacatttattagttccccaaattaatacttttataatttcttatgcctgt

SEQ ID NO: 11842 - DNA, 1014 bp, Homo sapiens
tcggatcatacctatatgaagcagagaactggatttcctttcctggcagtctgactccaagatcctttcttagaaacaattatactgtaaaaactgagaatgaataaaacccaacattggagactgattttaacatctgttaatcttaaaccattaaataataaaaataagttaaaatgaaagaaaaatatccaaatattcatatacagagaagtcaatattcttcaatcgaaaacacattttttaagtgctcaaggaatatttacaaaaatgctgaatatttaattaaataattcatatttgtatatcaaattgacttaagagaatgacttccttaaaagcctaaggatgcgagatcagttcgataaatattgaaaatgggctgaaaattatgagtaggaaaatagggccatttcaacctgcatgtgacatccctaaaatttattttccattttggaaactgtaggacaaaaactattcccattcatgtggggtatatgtatatgtgtatgggtgtatatgtcttcccaagaaaatcttgaatgcttttgataggaaaaatttagattctgtttacatgtatctggtattgagaaaaataaattaacagcagtcatgatacaagttatgatcaagcttccttcagaaatttagacatccaatatatgatctatgtattgggtttaaaaatttccatagcaagtgatgttgctgaacacaaattatgactacacgaggaaaatattgcaaaacagtgaaagagaatatgtcttcatttgcatgcttgcaaatgagaaatcagcttttacttccaaattattatgaaaaaagcctatagcaagaagagacgttgtttaaatagtaggtaatttgagccgttttgaaaattacattttttccataaaggcagcattgaactcatccattagtatgccctagcgctttcctatttgacattggtcccagaattgaatttagaagaaccaagaattttactgcacattcagaaatcag

SEQ ID NO: 11843 - DNA, 1066 bp, Homo sapiens
actgataatgtagccaaatggttcaatagagaggaataaggctgattattcatctatatattcatatatatcattttaatatagcattgcagatattggcagattgatatgtggggaattttaattatatgatgatctatatataattagataatgatataagtgaagaaatacatagatagaattatggtttactaacccatttttgatttcttgcgttttgtacaatgtctcagtatctgttagtatcttatttcttaagtttttttctctatgatcaattacttatgagttaatttttgtgtacagtataaaataagggtctaaatttacgtttttttccttctcttttaactcccacttcttaggtaagttcatctactcatggccttacttattttctgtgtgctgatgatgccaacatttaatctttcagctgagatctcaacgctggtctccgaatcctttctctaatagactatttgacatcttcatttggatgcctaacaggaacttgaactaacatgtccaaatcaaaatactgctcttcccccaattgtcagatttgtttcttctacagtctttccctcttctgctaatgaccacttcagactttcagatgcttagactaaaaaaaaatggagtcaatattttctctctttcagaacctatctttaaggcatcagcaaattttgttgactctaccctcaaaaacctacagaatccaatcccttgtcatcactctgccatactagtctaaactgctgcatatcttgccaggatatttgccatgagtttctaattattctttctagttctgcacatccttttatcctgatgtattctcaaggtggcagccagagagaacctgtaaaaacgcaaatttgatcatgccattcttctcctccagatttttcagtggctttcatctaattcagagtaaaggccaaatccttacgaagtcttataatcatttgaatgatctgattttgtctgcctgtgtgccctaaaacacctggctcatcccatgctaacaacactggcctttgtgtcacttcttgaatat

SEQ ID NO: 11844 - DNA, 1050 bp, Homo sapiens
taaaatgtgatttttatataatatttttaatatcctttctaaatgaacattttaattgccatattataaaatcacagaaaagtgagtgaaaaataaattataccactgaatgaatatcttagctttggaggtctagaactagagccagtgtctgatattaaagtgataacatttctttggaaggtaagtccagggcagcaatggcagggacgcgtggaaattgaggcaagagcacgtggaaagtgaggcaagagcagatgtgaaagaacgtgttgggatgtattgtaacaatgtgttgtgtgtatgtgactctgttgtggcaacttcattataaggtgagagagacagcatggtggtcatcagatgcatgcacttggaccccagtacttttccggaaaggctacaaggggaataccacagccagcattagtccatggaagcgagagaggagggagaatgtatctgttcagctgtcttctgtcttccattttccattggccagggtttccctgaggcggaactaccatctctgctgttctgctttccatcatccagtccgttggtggctgttatgaaagacagacctcaggcccacagtgtggtgttccattcaaggaaggatggtaggatgatctggatcaggcaaggtgctggcctagagaataagtgacagttaagggaatctgaggaagcacatgtttaagtccaatactgtctactccttgtaccactcagatttgctcatgtcttccaatcatggctggctttatgggcatatgatttccactgttgcacagggtcttgtgcttagaggcgctcatgcttagaggggcaatcattagtcttcctgttgcatgctgtattagcagcaatgaacctggtttatttgggggatgctgccatcttctgattttatcattgttcgctgggcacctcttctcaatctcctttgctggttctttctcttgtctctaatcttctgcaactgctgttttgtttttgagacagagggcactcctctgctgaagagggaatggtcttgcactaatt

SEQ ID NO: 11845 - DNA, 1035 bp, Homo sapiens
cttctatccctgttttcccactcaaatgttgccttttttggcctgccccacccctcatcctatgcccataaaaccccaggctccaccggtagtgagaagtggctgaagatcgagaggagaagcagctcaatgttgtagactatggtgggacgttggagagaagtggcttgacttcagagggacaggttgaaggcgtgactttcgagaagagtctggctggagacagccggacttcaggggaagattaccttcctgcttcacattccctttccagctccccttcctgctgagagtcacttccatcaaaataaaatctccctcatttaccattctccaattcggttgtgcaacctcatttttcttggaagctggacaagagctcaggagccaggaatgcagatacgaaaagttgttacactgaacctctgcccttgctggcaagaggcagccgcctcaagcgaaaaggcaaagggcccactgagctactaacacttaagacgtctgcagatagcagagctaaaagagcactgtaacaccctccccctcgaggtttcaggggtgcgggcacccccccagatgctgctgcggggcctgcacagaatttgttcctgctggcatccaaaagtgctcctgcacctgttcacctgtgtgctccctcccatgagggctgggcgcagtgggtcccagcgagtggatttcacccctgccagccctaaagcagctggctggttctagcgtcagtgagccccagttccctcccatgaaggggtaagggaaatgtcctccatcaaaggtattatttcagtctaagccctgatgctgagaataatatgagaatcataaagccaggagaaagaataattgtgttatcccattaccctgaattgtagcacttagaaaaatgaatggtcacatttattagctagcagtctaccttgtagctatcatcatcatctctatctacatctatcccattaaataatttactttttgaaatatgtacattcataaattggataatgcctacgtaattta

SEQ ID NO: 11846 - DNA, 2004 bp, Homo sapiens
atattctctcttttttctttatcattgtggctagtgttctatctatcttaatttaaaaaaaaaaaactcctcagcccactgatcttttgtatgattttatgcattgcaatttccttcacttcagctctgatgttggttattccttgtcttctgttagctttggcattggtttgctcatggttgtctaggtctttttgttgggatgttaggttgttaatttgagatctttctaacttttcaatgtgggcatttagtgctacaaactttcctcttaacactgccttagctatatcccagaaattctggtatgttgtatcttttttctcattagtttcaaagaatttcttggtttctgccttaatttcatatgtacccaaaattcattcaggagagggttgtttaatttccatgtaattatatggttttaagctattgtcttagtatttacttacatttttatagggctgtggtccaagaacgtgactggtatattttttgttgttttgtatttgctaggaattgttttatgttagattgtgtggttcattttagattacatgccatgtacagatgagaagaatgtgtgttctgttcttttggggtgaactgttctgtggtggtctattaggttcgtttggtcaagtgtttagttcagattctgagtacctttgtcagttttctgtcttgatcatctgtctaatgctgtctgtggggtgttgaattctcccactagtgttgtgtgtttatctaagtcttttcataggtctctaagaacttgcattatgaatctgggtgttcctatgttggctgcatatatattcagaatagttaggtcttctcgtgaattgagtcttttactttacataatgcccttccttgtcttttttgatctttgttgatttaaagactttttttatgaaattagaatagtaactctgtttttttttttctattttttatttgcttggtagatttttcttcattcctttacttcgagcctatgcgtatcattacacgtgagatgggtctcttaaggacagcataccattaggctacgcttttttatccaacctgccactctttgctctttaactggggcaattagcctttttacattcgaggttagtgttgatatgtgaagatttgattgtttcatcatgttgttagctggttattatgcagattgggttgtgtggttactttatagtgttactggtctatgtacttaagtgtatttgtgttgtcagtgaagatcttttctttccatgtttagtactcccttcaggaccccttgtgaggcacggctggtggtaatgaaatcccttagcatttgcttgtctgaaaagatcttatttccccttcacttatgaagcttagtttgggtggatacgaaattcttgattaaaaattctttttaaaaaacaaaactgctgaatgtaagcccccattctctttctgtttgtagggcttctactaaaaggtccattgttagcctgatggggttccctttgtaggtgatctgtcctttctcttccagttgactttagcattttttcttttattttgagcttggagaagctgatgactatgtgccttggggatggtcttcttgtgagtttttagttcagtcagatcagtttggttccttcgttgattctttccccagcttgctcaattatgccgtgaatactttccattgtgttctgaaattcttgatgttagtttttcagttctgtcagaacacttttttttcttttttaaaataaccgttttgtatttcaacttctgcatcattttattgcattccttaaaaactttggatttggtttttactttctcctgaatctcattgatcttcattcccatccatattctgaattctatttctgtcatttctgccttttcagcctggtcaagaaccattgctgctgaactagtgtggttgtttggaggtaagaagacattctctggcttttcgtgttgccagagttcttgtgctaattc

SEQ ID NO: 11847 - DNA, 1033 bp, Homo sapiens
ctgatctccttcctcttgttatgtgccattttctttctattcctaatcgtttcggtttggagtcctaggaggctgcggaatgacccggttgtcatggttagcaaggctgttggaaacatatatcttgcattcgactcattcatcctaatttggagaaccaagaagctaaaacacacctttcttttgattttgtgtcagattaggtgctgagtaaaagacctgaaactctcaactctctagattcacaagtgggacattgtgtgtgtattctaggagaaaacaaactgatagtgtctggaacattttatactttttactgttttttctgtagtgtatgtttttgagtattttctgaaagcatacctagaaaagtcttttacctaaagttagtctaaaagtgtatctatgtgtgtgcatctgtatatgaaagacttaaaagacattgacaataacataatgttaatcatattttcacaagatgccaaattatagaaaatatggtaagaagtttttcagaatcatgaacccatgtatatttcacatatacatttcatattatcatgtttcacttgaaaactgtgtgatctttacttataattgttaagaagtgacacattatctcaaaatctttgctcttttccactgatttttaccacacatatgtaccacagtgtgcttaaacatctaaattttttgatagtaagcacactcaattctaaatcaataatgaggtttcatctttggggtagtttttatttcatcatgaattctaattttatgtttagtttatagccagcataattattttcagaaaaagatgcacagaataatattcaaggatgacaaatatatttagaacacattttgtatatgtctaccataaacagtactgaggaataatagacttaatacaaatatgtgaacatttgagaaaaaagtcatttctataataaggatgaagaaagaaacaccgtgatgacttatgttgtcataagtctcaacatgcagttagaaaagtcatttcttccagttt

SEQ ID NO: 11848 - DNA, 1986 bp, Homo sapiens
gaggagtcaccatcagtgacattaggcctgaattttttacttgcttttttgtttagacatgatgagttttctacacattgttttttccattctagtagtggttgcatttattcttggaaattttgccaatggctttatagcactgataaatttcattgcctgggtcaagagacaaaagatctcctcagctgatcaaattattgctgctctggcagtctccagagttggtttgctctgggtaatattattacattggtattcaactgtgttgaatccaacttcatctaatttaaaagtaataatttttatttctaatgcctgggcagtaaccaatcatttcagcatctggcttgctactagcctcagcatattttatttgctcaagatcgtcaatttctccagacttatttttcatcacttaaaaaggaaggctaagagtgtagttctggtgatagtgttggggtctttgttctttttggtttgtcaccttgtgatgaaacacacgtatataaatgtgtggacagaagaatgtgaaggaaacgtaacttggaagatcaaactgaggaatgcaatgcacctttccaacttgactgtagccatgctagcaaacttgataccattcactctgaccctgatatcttttctgctgttaatctactctctgtgtaaacatctgaagaagatgcagctccatggcaaaggatctcaagatcccagcaccaagatccacataaaagctctgcaaactgtgacctccttcctcatattacttgccatttactttctgtgtctaatcatatcgttttggaattttaagatgcgaccaaaagaaattgtcttaatgctttgccaagcttttggaatcatatatccatcattccactcattcattctgatttgggggaacaagacgctaaagcagacctttctttcagttttgtggcaggtgacttgctgggcaaaaggacagaaccagtcaactccatagattcacaagaggtgcattgtgtgttttctagcagaaaacaaattgatggtgtctggaacattttatatttcccacaagtttttccgtagtctatgtatttgagtaatttccaaaagttgacatagaaaagtcttttacctaagtttattatataaaagtatatatatataatatacatttgcgtgtgtgtgtatgtctgaatgtatatgaaaatttaatatttaccataacatacctttaatcaacttttcatataaactgttcagttataccaaagtaggataagaaatttctcagaattatgaacccatgtgtatttcacacatttttttatatgatatttcatttgaggaatttatgatctctatttataattaagaactgacagcttatatcagaaaatcattgctgtttttcgttgtaaaatcattgctgtttttcgttgtaatttgtatcacgtatatgtaccatagtgtgtttaactgtttaactatcattgtttgaacctctaattttttggatggtaaggacatttaattctaaatcgatgagaatgtgtctttggggtaggtttttttgttttttttttaatcatgaattctttttttcttttttttgagatggagtcttgccctgttgtccaggctggaatgcagtagcacaatcttggctcaccacaacgttcacctctggggttcaagtgatttccatgcgtcagcctcctgagtggctgggactccaggcatgcgctaccacacgtggctaattttttgtatttttctttttttttttagtagagatggggtttcaccatgctggccaggctggtctcgaactcttgacctcaagtgatccactgcctcagcctcccaaagtgctgggattatagacattcatgatgaattcttattttatgtttaatataaagcaaatacaattattgttagataacaatgcacaaaataaaattcaagggtgaaaaatatatctagtgtaca

SEQ ID NO: 11849 - DNA, 1301 bp, Homo sapiens
catatcaacaagaaagcatatatggggaatgtcttcattgctggcaaattctactttttgacgaaagtgtggaatatgagtgttaatgttacattcttttttccttttactgtgcatttaggttttattgctttccctacatatgttaggttcccgaataatgaaaatattttaaaagcagaaatattaagtaaattaatgaatataaaactaggctgaaacaatatattcttacatgtaccatcgtaattagagttttgctgaataaagaatacagcattatagtagtaagaaatagggataaaattttatacttttaaaaattaatttaaaaaagaaagatataagcaggaagtgtacatccacattcttaatgctaatcttaatttgaaacaatagattttgaacaactatattgcaatagacttttttcttgtttccaatttaattattcatgatacacgtttcaaattggcagcaattagggaatttttcataaggtacaaatattaaagtatgtaggactatagatattaagtgtataggacaatttttgctacatttatccctaaatgaaataattatactcatgttgttcccattcaaagatcacaatactatgcatgtgcacagcatatgtgttggggaaaatattttgttactataaatttttcaactgtattagagaagaaaacatagaaagataactgttaagctataaaacatatttagtgtaatctttgagtgtgcttgtgtatatgtagtattactttgactgctatagtaaaataacccagatttagtgacagtagctgagattgtaaataagcagttgagagaattttgcctgctaatgatactattaaaagataaaatacagtttgtatgctatataattgtatagaggatttgtatatatgaagttcatatgaaagtacagtgaaaattaaacagcccaaaggagaatactctttgttgtagggcacttttgtcatgattttcagaatgtggtaaaagaaaaaaaaatagccagtaaatcattggaaatacattggttttaacttattcttaatgaaatactgtctgaggatctttgtctgtgcctgatgctgagaataatataagaaacaagttcatgagcccatcaccctgaaacgcagcacttagaaaacatgattgaagtcacatttatagaagagcatggccccttttaactgacattatcatcatcaccaatcatcatctatatctatctcattaaatgatttatttttgaaatgtttacataaataatttggata

SEQ ID NO: 11850 - DNA, 1048 bp, Homo sapiens
gggaaatttttccaaaaatgatgaaatgtatatatttccatctctatatatttaggagccatcaaattttggacaagataactaaaaaatttaaaataaaatgacacaggacatcaaagaccaatagaaaatctgaaaagtagctagaggtgaaaggtagattatgttaaaaagagccacattctaaataacaaactgattttcaacagaaaatatgaaagcgggaattcaatggaatcatatcttcagtgtgtttccaaggaacagtagacttttatagacagaaattaaaaatgatattttttcagataaaatataaactaccaaaaatacaaaattgagcatgcaagaaggaataaaaattaatgaaaatgataaatatgtacataattataagtgaatgtttaccatctaaaataatagtatcttcttgttggactaaaggtgtaattgataagatatatgcaaatagtaataaagagactggagttacagaaataaatttagttaaagtattttttggacttttctatgtctgtgggcagaatttgtacatcttaatcaaggaccctataattctatacctaggcatatatgcaaaggaattgtagcaaatgtatatgaaagaatgctcatagtagcattattcataatagttcataaaagaagctgtccaagtatatatcaactaaggatagataattatagtaaattcataaaattaaacaatatagagaaatgaaaagaaataaatcacatgtacatgcatctgtctgattaaatttcagattcataatgttaagtccaggaagccatgaataagaacatataggattgcacctatacacagttcaaagcaggccaaaccaagctattgagtttagggttgcataccttgttgataaagtataaagaaaatcaaggaaatgatcatcacaaataatggatattgcttacctcaggagatatgaagaaaggtatagaggcttggaaagtgtcatggaggtggaactaggctgtttgcagtgttccttgtcttgccctacat

SEQ ID NO: 11851 - DNA, 1098 bp, Homo sapiens
agactgagggaagtttctgagcagcaatggaagtttattaaaaagatttagagcaggaaagaaaggaaagtacacttggaagagaccacagtgggcattttggaggtcaagtgcagtgttagacctttgacttgtggttttatatgttggtatacttctggggtcttgtgttccttttcccacgattcttcccttagggtcttgtgttccttttcccatgattcagccccttagggtgggctgctcacatgtgtggtggcctgctaacactttggaggtgagcatgcgcagtgtgtttactggagttgtacacatgcttgcatgaggcattcttcccttttttggtggaatgcccccagaaggttgttttctacccttttctctcttaacacgtatgcctcagcctactcgccctattcctgagctgctgactagcaattttaagcatctttacttattgtgaaattgcctctccctggtgcctgtgagcaattatcatttttagagaggcagtgtgacaactgccaggccatcacctgatggccacctgacattcctggtgggtggtgagagccttcttctgccccgctcatgcctgactaactatctactgtaagagccctatacctaaaagtctcagatggtgtggatgtgtgtcctttcctctgggtactgttatctgggaaatggctacaggtctttgagaaagcaccgtatgaatacgtcctgaatattcttgtggtgaattttcagcatccttttcaaggggacttacactttccttcaattattgaattcttgttctcggaattggctcagtcctgacaacaggttgaggttctttgattttccacttcaaaggctgacctcaggaatcagtttttcagcctttgaagtgaaaaggcttgctcttggtttataagtatttttcaaagtatgaagcctctttaactattggcttatgaactcattccaagaagctgatgctgtcatcagttcattgattctgacatttgcaagatcaccagagagtctatgttcccaaggttagtcatcatgttgcatgctctattagctgcattgaacttagtttattta

SEQ ID NO: 11852 - DNA, 1006 bp, Homo sapiens
taaatggataatttgatgtggtaaatcagtgaaaatgaagctcatcataaaatctgcagttgcttgaattttctattttcaggttgaggttataggctttttgaagaagaagcatttctcagagcaaaagtttggctagtccacaattctaggggaaatatcactgtaatatagctttgatgcagctatatcaggtgtgtgaagtagagacaaggtggaacgtcaaaattagatggcacttattctaatgctttttgaaaagcatattaaagattttggtatatttgcacagggtcagggtcacctgtgagtgccagctgctcggggctagcagaccccatgacaagaatgttagggaacttcccagcagctgccaaacacacttttgtttttagggaacgtctctttctccttcagtatgacttatgctgccttcaatgctttgctgatacaaaagaagtaaactcaaaagaagtaaaaataaaagctagcaaactttgcaactgattaagttggttggaaatgtacctaatcactttctactatgaatgatatatttgtattatgatattttctagctggttatcatatacacaaaaaggcatttcatttttaaaaattgagtttgtaaccagtcacctttcttacacattatttgtatatttttttagtatcctttctaaatgaatgttttaattgccatgttataaacgcatggaaaagtgatgcaactgaatgtatatcttagcttttggtgtctaaaactagagccaatgtctgagtttacagtgatgacatttatttgggaaggcaagtccagggcagcaatgaggggtaaatgtggaaactgaggcaaaagaagatgtaaaaccatgtgtcgtgatgttgatatgattttgctggtggccacttcacaattagtgagacagacagcatggtggtcatcagatgcatgcacttggctctccatacttttccagaagggttacaaggggaagccacaaca

SEQ ID NO: 11853 - DNA, 1083 bp, Homo sapiens
attccttagggaatgcggttattatattttatatattttgttgccagtagaggagaatttcagaggcttccctttggtcctgctataataatgtcctttactctacagttcacgaagaatgtgagtcctgccggctgccatacatatctatttcaattatactttcaggaagaggtagtaactacaaactgattagctccaccttggaatggacatgagccgaagctctaggtagtatctgaccttcaaaaactccccctgcaggctggatgtgatggctcatgcctgcagtcctagcactttgggaggcgaaggtgggaggatcccttgagagcaggagttcccttcacaacatgtggaaactccgtctgtacaaaaaatttaaaaaattagctggtgtgttggtgcatgcctatagttccaaatacttgggaagctgaggcaggaggattgcttgagcgcaggagttccaggctgcagtggactatgatcctgccactgtactccagcttgggtaacagagggagactgtgtctcagaagaagaaaaaaaaacaagtataagttctcaccggtatcttaaacatcaagtaaaacagtatcgagtaaaacaaaaaactaaaaactccaaaagtcaaaaacacttttaaaaagaacatggtgttaagagtagtttgttcagtttccccatagaaaatgatttatggaaggagaataaaagattattctgaacactaaaacaataagactgaaaaaatgaattatcaatattgagaatccaatagacagagttaaccagttggatacagtacaagagagaataagtgaattggaagatagctacacagaatgaagcatagaagggaagagatggaaatacacagagctagagggtaacacattgatgctacagacagaacacctaacatacttctggagttctgtaagattagaggagagaaaatagagcaagagaaatgttgcaaggatttttccaaaaggtataaaatgtatccctgaatatatttttagtaatctcaaacttcaggcatgataactaaaaccaaattaacataaaataata

SEQ ID NO: 11854 - DNA, 1071 bp, Homo sapiens
gatactttaatgaacaaataaatgggtggctaaaatggataagttgatgtggtaaaccagtgaaaaggaaactcacacaaaatctgcagttgcatgaattcccctgttccagtctcaggttaagattacaggcttatccaagcagaatccttctcctaaggaaaagtttggctattccacaattttaggggaaatatgacaataatatagtcttgatgcagctgtatcaggtgtctgagttggagacaaggtagaacaccaaaattagatggcacctattataatagtttgaaaaatcatataaacaactttggtctatttgaatatgtatttttttctattgtcaattatttgtattatgatattttctagttgattatttaaacaaaaatgacatttcatttcaaaaaattgagttagtaaccagctactttaccaaaatgtttttaatgtaatacctgttattgaagtgctaccatttatttagaagtcaagttcaagacaaaaatggcaaggacgtgtggaaattgagaccggaacaaatgtgaaacaatgtgtggtgatgtctggtatgaccctgatggcagccacttcacagtgaggtgagagagacagcatgatggtcatcagatgcatgtacttggcttccagcacttttccagaagggctacaaggggaaaccacagctggcattagtccatggaagagagagaggagggagaatgtatctgctcatctgtcattagtcttctatttcctattggtcagggtttccttgaggcagaactatcatctctgctgttctgtcttacatcatccagtcccttggtggtggtcatgaaagtcagacctcatgcccacagtgtggtgatgcattcaagtcccaaatagaaggatgacctggatcaggcaaggtgctggccaggggaattggacatagtgaagagaatctgagaaagcacatgtttgtgtccagtaccgccactccttgtgccactgaggcgtgctcataccctccagtcatggctggctttatgagcatatgacgtccacagttgcatagggttttgt

SEQ ID NO: 11855 - DNA, 1076 bp, Homo sapiens
gtggtgtatgaaacattttatatttcttactggtttttctatactgtatgtgtatgaataatttcccaacgtatacctagaaaagcctttgacctaatattagtctagaaaaaaaaatatatatatgtgtgtgtttatgtgtgtatgaaaacttaagaacattgacaataacatgctcttttctgtttttttcatacaaactgccaaattatacaaaatatgacaaaaatttcttagaattttgaagccatgtatatttcattcatgtattttatatttcatttgtagaatttatgatgtctatttataattattaagaagtaacagcttatcccaggataaatattgctcttttctattgttatttgaaccacaggaatacaccacattgtgcttagaattcattgcttgaacctcgaatttattggatggtaaagtcattcaattctaaatcaataatgaggatgtatctttggtgttttattccattatgaatttctattttatgtttagtaaaaagcaatgagaattattgttagaaaagaatgcacacagtagaatttgagtgagaagcatatgcagagtaaatttaatgtatgtctaccataagcggtactgaggaatattagatttcatatgtgaatagcttaggaaaaaatcccttctctaataaagggatgaaatatcatgatcatgatctggattggtatcatcagttatgcatatgcagttagaaacgtcatttcttccgcttttgaattaaagaaaagctgtttttgaagttgagatctcatgcaaattattttagtattctttctaaagcacttttaagcccctgaattgctaattatatccttaccttccatttatgaaattccttctaaacttcagataagagaactcaaatcctctctttttgaaaaataaaatcaatgtaaatataatatataaattgtggaaaatatttcagtcaaactttttgtaaatgttaaaaaagtatctatgaaatctgtgtattaattatgagatgagccttaacgttgtaattttgtcatcaatgatgaaatgaaagggtg

SEQ ID NO: 11856 - DNA, 1046 bp, Homo sapiens
agaaaatctggtttcctgtcttggcagtttgactccaaaatcctctcttagaaacaattatactttttaaatggaaaagaaataaaatccaagattggagactgattttaacatctattcctcttaatcctttaagtaatcaaaaataaattaaacggagaaaaatgaaaccaaatattcatatacaaagaactctagactcttcagtgagaaacatgtgtttttcaagtcacccaaaatagttacacaattgctgagtattttaattaaacaataaatatttaagtattaactgggctctagagaaaaacttagtcaaaggcctcagcatgagcgataagtttgataaatattgaaaatggtctgaaaagcccaagtggaaaagcagggctatttctacctggatgatgtccctgtaattaattttccattttggaaattagaggacagaaattccttctatccatgagggggtgagtatgtatgtatgtgtgtatgtttgtgaatgtgtttgtatgaatgagcttgtaaacaataagttatacaaaagtattagtagccaccaggatttaaggattattggcctttctgaggttcccaagaaaaccttaaatgcttttggtaggaaaagacgggattcattctacatattactggcgttgaaaatataaatctactttggtgatgatcctagttatgcccaagctccctttaccaggtaataaaaccaatgtgtcatctgtgtattgggttgttaaattgctgaacacaaattatggagagtttaaacaaggaaaaaattgcagaacatttaaaaaactcttcattggcatgctagtagatgagaattcaggttttacttcaacaacgatgtggaaaattttatcttacagcaaggacattgtgtttgaacaagagttaatttgagctgttttggaaattatcatattttccataaagagagcattgattacatccgttggcctattgagatgctttcctgtttgacattggtcacagaatttaaaaggaaaaacaacattact

SEQ ID NO: 11857 - DNA, 1050 bp, Homo sapiens
agaatttttggttctaatgtctcagcaataaccaagcatttcagcatctgggtgttactagcctcagcatatttcatttgctcaagactgccaatttctccaaccttatttttctccacctaaagaaaaggattaagaatgttggtttggtgatgctgttggggcccttggtatttttcatttgtaatcttgctctgataaccacgggtgagagtgtgtggacaaaagaatatgaaggaaatttgtcttggatgatcaaattgaggaatgcaatacagctttcaaacttgactgtaaccatgccagcaaacgtcacaccctgcactctgacactaatatcttttctgctgttaatctattctccatgtaaacatgtcaagaagatgcagctccatggcaaaggatctcaacatctcagcaccaaggtgcacataaaagctttgcaaactgtgatctccttccttatgttatttgccatttactttctgtgtctaatcacatcaacttggaatcctaggactcagcagagcaaacttgtattcctgctttaccaaactcttggattcatgtatcttttgttccactcattcatcctgactatgggaagtaggaagccaaaacagacctttctttcagctttgtgacaggtgaaatgctgagtgaaaggacagaaaccctcaactccatagattcacaaagggagcattgtgtatcttttagctgaaaacaaactgacggtatctggaacattttatatttccattcgtttttccttagtgtatatatttgaataatttcaaaacagatacctagaaaagtcatctatctatctatctatctatctatctatctatacacacacacacacatatatgtgtgtgggtatatgtgtgcatgtgtgtgaataacaacattgaccacaaattatgaagccgagtatatttcacatatatatgtaggtatattttatgatagttcatcctatggtatttcatgtgaagaatttattacctctatttataattaggaacttacagcttttatcaggaa

SEQ ID NO: 11858 - DNA, 1064 bp, Homo sapiens
aattagaagatagctacacagaatgaagcatagagagaaagaaatggaaaatgcaaggctagagggtaacacactgatgctatcatcaaaacacctaacatacttgtagagttctgtaagattagaggagagaaaacagagcgagagaaatgttgcagggatttttccaaaagtgaaaatgtatcccagcatatatctttagtaatcacaaacttcaggcatgataactaaaatcaagttaacaaaaaataatacaggacaccaaagaccagtagaaaatctgaaaagtagctagaggtagaagatagagtatgttgataagaattgcattctaaatacaacctgattttaacagaaaatatggaaggaggaattcaaaggaatcatgtcttcagtgtgtttccaaagagtagtagaccttcataaacagaaattgaaaatgatatttttcagatataataaaaattactgaaaatacaaagttgaacatgcaaggagcaataaaaattaatgacgaaaaataagtgtgtaattctaaataaatgttgactgtataaaacaatattgtcttgttggattaaacgtataattgataagatatatgcaaatagcaataaagagactggagataaaggtgacaggaataaatttagtcaaactgtgttttgggcttttctatgtctgtgaggagaatttgaatgtcataatcaaggaccctgtaattctacacccagctatataaatgcaaaggaattgtagcaaatgatatgtgaaagaatgctcattgtagaattattctaacagctcagaaaagaagctgcccatatgtacatcaaataaggatgaataaataattacaataaaatcataaaatgaaaaaacatagagaagtgaaaagaaatgaatcacatgtacatgcagttatgtgattacatttcagatccataatgttgagcacaggaagccatgaatacgaacatataggattgtatctatacagagttccaagcagaccaaaccaagctattgagtttagggttgcatacctagttggtaaagtataa

SEQ ID NO: 11859 - DNA, 1047 bp, Homo sapiens
aatgtcaaaattagatggcacttattgtaatactttttgaaaagcatataaaggattctggtatatttgcacagggccaggttcagctgtgagtgccagctgctcggggttagcagaccccatcacaagaatgttagggaacttcccagcagctgccaaacacactcttgtttttagggaacatctctttctccctcagtatgacttatgctgccttcaatgctttgctgatacaaaagaagtgaacacaaaagaaatgaaaaaaaaaaaaagctagcaaactttgcaactggttaagctgtttgtaaatgtacccaatcactttctactgtgaatgatatatttgtattatgatattttctagctggttactatatacacaaagatggcatttcgcttttaaaaattgagttagtaacgagtcacctttcttacacattatttatatatatattttagtatcctttctaaatgaatgttttaattgccatattataaatgcatggaaaagtgatgcaactgaatgtatatcttagctttgggtgtctagaactagagccagtgtctgagtttacagtgatgacatttatttgggaaggcaagtccagggtagcaatgaggggtaaatgtggaaactgaggcaaaagaagatgtaaaaccatgtatcatgatgttgacatgactttgccgttgtcacttcacaatgaggtgagacagacagcatggtgatcatcagatacatgcacttggctcccggtacttttccagaagggttacaaggggaaaccacagcaaatattagtccatggaagagagaaaagggagaatgtatcctagctgtcttttgttttctatttacctttggccaaagttattttgtggcagaactaccatctttgcttttcttccttacattatccaaccccttggtggctgtttgggaaagtcagactaaccaatacccccatttttctaagagatacttgttttgttttttttttaattttttgtctcttttcctcgcccctttccctatgtttcccactt

SEQ ID NO: 11860 - DNA, 1052 bp, Homo sapiens
gaacaaataaatgggtggctaaaatgggtaagctgatgtggtaaaccaatgaaaaggaaactcatcacaaaatctgcagttgcatgaattcccctgttccggtctcaggttaagattacaggcttatccaagcagaatccttcctctaaggaaaagtttggctattccacaattttaggggaaatatcacaataatatagtcttgatgcagctgtatcaggtgtctgagttggagacaaggtagaacatcaaaattagatggcacctattacaatagtttgaaaaatcatataaacaactttggtctatttgaattttttttctattgtgaattatatatttgtattatgatattttctagttgactatttaaataaaatggcatttcatttcaaaaaattgagttagtaaccagctactttaccaaaatgtttttaatgtaatacctgttattaaagtgctaacatttatttagaagtcaaattcaagacaaaaatggcaaggacgtgtggaaattgagacaggaagaaatgtgaaacaatgtgtggtgatgtctggtatggctctgctggcagccacttcacagtgaggtgagagagacagcatgacggtcatcagatgcgtgtacttggcttccagcactttttccagaagggctacagggggaaaccacagctggcattagtccgtggaagtgagagaggagggagaatgtatctgctcggctgtcattagtcttctatttcttattggtcagggtttccttgaggcagaactatcatctctgttgttctgtcttccatcatccagtcccttggtggtggtcatgaaagtcataccttatgcccacagtgtggtgatgcattcaagtcccaaatggaatgatgacctggatcgggcaaggtactagccaggggaataggacatagtgaagggaatctaagaaagcacatgtttgtgtccaataccatcactccttgtgccactgaggcgtgctcataccctccagtcatggctggctttatgagcatatgacgtccacagttgcatag

SEQ ID NO: 11861 - DNA, 1059 bp, Homo sapiens
ttgtctgttcagacatgataacttttctacccatcattttttccagtctggtagtggttacatttgttattggaaattttgctaatggcttcatagcactggtaaattccattgagtggttcaagagacaaaagatctcctttgctgaccaaattctcactgctctggcggtctccagagttggtttgctctgggtattattattaaactggtattcaactgtgttgaatccagcttttaatagtgtagaagtaagaactactgcttataatatctgggcagtgatcaaccatttcagcaactggcttgctactaccctcagcatattttatttgctcaagattgccaatttctccaactttatttttcttcacttaaagaggagagttaagagtgtcattctggtgatgttgttggggcctttgctatttttggcttgtcatctttttgtgataaacatgaatgagattgtgcggacaaaagaatttgaaggaaacatgacttggaagatcaaattgaagagtgcaatgtacttttcaaatatgactgtaaccatggtagcaaacttagtacccttcactctgaccctactatcttttatgctgttaatctgttctttgtgtaaacatctcaagaagatgcagctccatggtaaaggatctcaagatcccagcaccaaggtccacataaaagctttgcaaactgtgatctccttcctcttgttatgtgccatttactttctgtccataatgatatcagtttggagttttggaagtctggaaaacaaacctgtcttcatgttctgcaaagctattagattcagctatccttcaatccacccattcatcctgatttggggaaacaagaagctaaagcagacttttctttcagttttttggcaaatgaggtactgggtgaaaggagagaagacttcatctccatagattcacgagaggggcattgtgtatcttctagcaggaaacaaactggtggtgtatgaaacattttatatttcttactggtttttctatactgtatgtgtatgaataatttccaaac

SEQ ID NO: 11862 - DNA, 1032 bp, Homo sapiens
ggaaaatagggctaatttcatctggacaacttcttggaaactcattttttattttggaaattttgagaaaataatttgttccattcataagtggtgtgcacatgcgtgtatttgtgttcatatttatgagcttgtgaataatgaagttatacaaaagtattagcagcaaccaaatcttatggagtattggcctgcctgtggttctcaagaaaatcttagatgcttttgataaaagcagtttggattctgtgtatacaaatctggcattttaaaaagtccatattggtaatgatcttagttgtgaccaagctccctttaagactttagacatttgctatatgatctatgtattgggttataaaacttcccaaacaactgaagttgctaaacacaaatgatggagaggttacacaaagaaaaattgcaaactctgaaagagagtacgttcttatttgtgtactagcaaatgaggattcaggtttccagtcaatttcagtatgaataattccagcctgtaacaagaacaaacagtgaatgaatgagttaatttgagttgtttgaaaataagaatgttttccataaagagatcattgaactcattagttaacacgccatggtgatttctggcttgacactggtcacaacatttaaaagtaaaaagaatgacccagcagatttacaaattaggtgcatatagaatttaaggtcaggatattcaagcaatcacaaccagtgatattacattgagaggtgaagccagctggacttcctgggtggagtggagatttgcaagaatttggcttgctaatgatgctattaaaagataaactaaagttgatatactgtattattgcatagactatttgtccatgttagtgttcaaaaatgccaaaaaaaatcccaaaatagaatcctaattgttggaggtcgtgtttcttatcgaattttaaaatgtagtaaaagaaaaaaaagcaaataaatcgttgaaaatatgttggttttacattattcttgatgaaataccatgtgagg

SEQ ID NO: 11863 - DNA, 1061 bp, Homo sapiens
ttttcttccttcagcacttttaatatgtcataccactctctgcacttttaatatgtcataccactctctcctggcctttttccactgaaaagtctgctgccacatgtagtggagctccattgtacattatttgttccttttcttttgctgctttcagaatcctttctttatccttgagcttagggaaattgattattaaattctttgaggtagtcttcttcaattttacccagcattgttttttgagaaaaaccattaattcctatcaaattgcagtagtcccttttttgaaatcaattgaccatgaatgttggtgttaatttctggactctcagttgtgtttcattgttctttttgtctaccctaatgcgagtaccatagaatcctgattcgtgcagctttgaaggaagctttgaaatcagaaagtgtaatcctccaaatttgttattttttaacaatttctttttgtgatcttgtcacttggcatttccagacacattttaggagtagttttccactttctgtgataaaacatctgctgggatttgatagggattgcactgaatatataactgcaatctataaagactctccctgtgctggatttcagttcagctggtcattcttgcttgtacaactctgtgacaaattgaaaatataattttggccttttatttctcttatcttaattgtagcagaaggtatcatgcttttctgaaccttgtgcattctgcccaaaaatggaagttctcagccatgtgtggttgttcacacctgtatgcaagcactttgggaggccaagatgaggggaccacttgagaacaggagttgaagaccagactgggcaacatagggagactctgtctcaacaaaaaaattaataaattagctgggtgttgtgatgcatgcctgtagacacagctactccagaagctgaggtgggaggacacaaatgtttgagactggagtgagctgtgatcaagccattgcactccagcctgggtgacgagtaagaccctgtctttctcgctcccctaccccaaaaaagaaggtctcactgg

SEQ ID NO: 11864 - DNA, 1044 bp, Homo sapiens
tctgtgccttttaattggggtatttttcccatttacatttaaggttaatattgttatgtgtgatttttttcctataattatgatgctagctggttattttgcttcattagttgatgtagtttcttcatagtgccaatggtctttacaatttggtgtttttctgaagtggctggtactggtttttcctttccacatttagtgcttgcttcagaagctcttgtgaggcaggcctggtggtaacaaaatctcttagcatttgcttgtctgtaaggattttatttctccttcaactatgaagctttttggcttgctatgaaattctgggttgaaaatccttttcttgaagaatgtccccactctcttccggcttgtagggtttctgccaggagatctgctgttagtctgatgggcttctctttttggtgactcagcctttctttctggctgttcttaacattttttccttcatttcaaccttggtgaatctgactattatgtatttttgggtgctcttctcaaggagtatctttgtggtgttctctgtattccctgaatttgaatgttggccagtcttgctaagttgggtaagttctcctggataatatcctgaagagtgttttccaactttgttccattatccccatctctttcaggtacaccagtgaatcataggtttggtcttttcacatagtccaatatttcttgaggctttgtttgttccttttcattcttttttctctaatctcatcttcatgcattatttcattaaattgatcttcaatgtctgatatcctttcttccgcttgattggttcacctattgatatttgtgtatgcttcacaaagttctcatgctgtgcttttcagctccatcaggtcatttatgttcttttctaaactggttattccaggtagcaattgctctaaccttttttcaaggttcttggctcccttgcattgggttagaccatgcttctttatctcagttgagtttattacccaccttctgaagcctacttgtgtcaattcatcaaactcattctct

SEQ ID NO: 11865 - DNA, 1121 bp, Homo sapiens
ggagcatattgtttcatttccatgtgtctgtatagtttccaaaattcctcttgttattgagttctagttttattccattgtggtcagagttgatgcttggtaatatttcaattttttggattgttcaagacttgttttgtgatctaacatatggtctatccttgagaaaaatccatgtgctgaggaaaagaatgtttattctgaaacttttggatgaaatgttatgtaaatatctgtaatcaatttgttctatactgcagattaagtctgatgtttctttgttgattttctgtctggaggatctgtctgatgctgaaagtggagtgttgaagtctccatctattattgtattgaggctttctctttgctttggtctaatagtatttgctttatatatctgggtgctccagtgttgagtgcatatatatttacaattgcaatatcattttgatgaattgacccctttatcattatatggtgacctttatctcctcatagtttttgtcctgaactctattttgtctaatacttgtataggtactccactttttttggcttccattgccatgaattatctttttccatcccgttgttttctttctgtgcatgtctttatagacaaagtgtgtttcttagaggcaacagattggtgttttgtttgtttgtttgtttttccatttagccagactatgtcttttgattggagagtttagcccatttacattcaatgttagtattggtagttaggacttacttttgtcattttgttatttgttttctggttatgttgtggtctgctcttctttctttcctaccttcctatttttctttagtgaaggttattttctctggtgatataatatagttttttgctttttatgtttgtgtatccattctatgctttttggtttgagattaccatgaggcttgcaaatactaccctctaacccattatttcaagctgataacaacttagcactgttcgcataagcaaacaaacaagcacaaaaacaaaacaaatgaagactctgcaccttaactccatcttcttcatttttaactttctgttttcactatttatttcttattgtactgtgtatgtattcaaaggttgttgtggc

SEQ ID NO: 11866 - DNA, 1714 bp, Homo sapiens
gctattgtgaacagtgctacaacaaacatgggagtgtggatacctgtttgatacacttacttcctttcttttgggtatatacccaccagcgagattgctggatcatatggtaactctaattttagtcttttgagaaacctttaaactgttttccatagtggttttactaatttatattcccacctgcggtgtacagtggttcccgtttctccacatcctcaccagcatttgttactacctgtcttttgtatataagctgttttaactgggatgagatgatatcttattttagttttgatttgcatttctctgatgatcaatgatgttgagcaccttttcacatgtctgtttgacattcgtatatcttgttttgagaaatgactatccaaatatttcacccatttttttgatcagattgttagattttttttcctatacagttgtttaagctccttttatattctggttattaatcccttgccagatgagtagtttgcaaatattttctcctattctgtggattgtctcttcactttgttgatcatacctttgctgtgcagaagtattttttaacttgatgtgatcccaattgtgcattttttacttggttgcctgtacttgtagggtattactacttaagaaatttttgctcaaaccaatgtcctggggagtttctctgatgttttcttatgggagcttcatggtttgagatcttaatcatacatctttaatccattttgatttgatatttgtatagatatatgggcctagtttcattcttctgcatatggatattcagttgtcccagcaccatttattgaagagactgtctttttccagtgtacgttcttggcatctttttcaaaaatgagttcactgtaggtgtgtgggtttgtttccgagttgtctgttctgttccatcgttctatgtgtcagttttaatgccagtacatgctgttttggtttctgtagcctcagtagtaagtatcatatgaagtcaagtaacatgattccttcagttttgttcttttttcttaggatagttttggctattctgggtcagttgtggctctatataaattttaggattgttttctctatttctgtgaagaatgtttttggtattttgataggaattgcattgaatctgtagattctttgggtagtatggccattttaacaatgttgatacttctaatccatgaacatggactatcttttctttttttgggtgtccttttccatttctttcattagagttttatagttttcattatagagctatttcatctctttggctgagttaattttcaggtatttaattttatgtgtgacctttgtaagtgggattacttttttgattttgttttcaaattgttcactattggcatgtagaaatactactaattttttatgttaattgtgtattctgcaaatttactgagtttgtttatcaattctaatagtttttggtacagtcttcaggttttacaaatataagatcatattgtttacaaacaagcgtaatttgacttgttcctttcctatgtggatgctctttatttttcttgagtgattgctccagccagagcttctactattatgttgaataatagtagtgaatgtgagcattcttgtcatgttccagatcttagaggaaagccttttagtttttcccaatttagtatgatactagttgtgggtctttttatgt

SEQ ID NO: 11867 - DNA, 1023 bp, Homo sapiens
caaagcagaccaaacgaagctattgagtttagggttgcatgctttgttcgtaaagtacaaagaaaataaaaaaagatcattataaattatggatgtacttatcataagaggtgtgaagaaaggtgtaggggattggaaagtggcattgaggtaaacctagcctcttagcaatgttccatgtctcgccctacataatggttacatgagtgtttatgatacattgctatgttttccatttttgttttggcccatttctaagtgtgtagtctagttataaaaattattaattaggagaaattttccatgaaaattattattaccctgctcattatatactgaagggaaaaatccactatttgtatacattcatgtataactctaagagattttaagaagaaactttctgattttagttgcaacttttggaaatttgacatgatgtttcctgccaaccccagatttttcaacaggtttttcttttaggtttaattattgacttcatatgacaaaactttgacattctccaactatttttcccttgtatcctgaattcctgacacaacaagtgtggacatatttcccacacttttggtttagcagaatacctatgtcacttatgtttttctgcaagagaaaatcctccaaaactacattagatatttgtatctcatatgtctttggatttcatttttctaagctgggtttgatggatggctgtggtgattggagatgggccacgtactgcatcttgaagatagagtttggatgatttaggctagatcaggcagtggcattctgactccattagtttctcattcttcttctgggaacagtgtaatagccagatgatgtccttatggtaaatggaaaagagcaagaaactccaatgtggaagccatcttaaatctctgtgtaaagtctactaatttcctgttcattgaagcaagttacaggagtgcacacgcatatatatatgtgtgtatatgtgtgcatgtgtatgaataacaacactgaccataaatt

SEQ ID NO: 11868 - DNA, 1056 bp, Homo sapiens
ttgaggtttttctttttctttttcttttttttttttttgagactgagtctcgctctgtcgcccaggctagagtgcagtggcgccatctcggctcactgcaagctccgcctcctgggttcacaccattctctggcctcagcctccccgagtagctgggactacaggcgcctgccaccatgcccggctaactttggttttgtatttttagtagagacgaggtttcaccgtgttagccaggatggtctcgatctcctgacctcgtgatcagcccgcctcggcctcccaaaatgctgggattacaggcgtgagccaccgtgtccggccaaaatagttgagtattttaattaaataactaatatttaagtattctcaagagaataacttagttaaaggcctaagccttagagattaagtttgataaacattgaaaatgggctgaaaagcccgagtaagaaaattaattttcattttagaagttataggacagtaatttttccaaaccatgaggggtgtgtatgtgtgtgtgtgtgaatgtgtttgtgttaatgagcttgttaacaataagttgtacaaaattattagttagcagtaaccagttttcaaggaatattggccttcctgggcttcccaagaaaaccttggacacttttggtagaaaagttgggattcactctccataaatctggcattgaaaaaatgattcaacagtggtcatgattctagttttgaccaagctacatataacagtgtaggcatccaatgtatgatttatgtattaggttggaaaatttccctaacaactcacattgctgaacgcaaattatggagacattaaacaaggaaaaaattgcaaaatgatgattaagtgtatgacttgatttgcatgctagcaaatgagaattcagctttcacatcaacatcagtatgaaaaattttatcttataacaagcatatagtatttgaataggagttaatttgagctgttttggaaattatcctgttttccattaagacagccttgaactcattcaatagcattccccggtgctttcctgt

SEQ ID NO: 11869 - DNA, 1042 bp, Homo sapiens
gttagaacagtcatttcttccagcttttcaattaaagaaaaactttttttgaaattgagctcagatgtaaattattttagtattttttctaaagcacttctaagcccctgaattgctaattatatccttatcttccatttttaaaattctttctaaacttcagataagagaactccagtcttccgttttctaaaaaaaaatctgtcaatgtgaaaatagtataaaaattatggaaaataattcagtgaaactttttttaagtgttaaaatagtatctatgaaatctatgtattaattatgggatttgtcctagtgtaattttgttgtcaatgattaaatggaattgtcttgacatattcattaatgggaagttctattataagaaggaaatgtacagtcttgtttacagctaaattctacatgactgtattaattcttggtgttatgaaattttaacaatgttgttcagaccttaagataaatcatccccacacctgattcatgtattttttagaatcatgtatcttcctcagtacaatgtaagaaccataaaagaagagatcgtgtctgtcaggctttctgttgactcccaggacctagaacccagcacaaggaatagatggtcaaaaatgatattttaatgaacaaataaatgggtggataaaatgggtaagctgatgtggtaaaccaatgaaagggaaactcatcacaaaatctgcagttgcatgagttcccctgttctggtctcaggttaagattacaggcttatccaagcagaatccttcctcagaggaaaagtttggctattccacaattttaggggaaatatcacaataatatagtcttgatgcagctgtatcaggtgtctgaattggcgacaaggtagaacatcaaaattagatgccactattacaatattttaaaaaagcatataaaagactttggtctatttgcgtatgtatttttttctattgtgaattatatatttgtattatgatattttctagttgattatcatataaaaatggcatttcatttcaaa

SEQ ID NO: 11870 - DNA, 1199 bp, Homo sapiens
tttttccattctaatagtggttatatttgttattggaaattttgctaatggcttcatagcattggtaaattccattgagtgggtcaagagacaaaagatctcctttgttgaccaaattctcactgctctggcggtctccagagttggtttgctctgggtgttattactacattggtatgcaactcagttgaatccagctttttatagtgtagaagtaagaattactgcttataatgtctgggcagtaaccaaccatttcagcagctggcttgctactagcctcagcatgttttatttgctcaggattgccaatttctccaaccttatttttcttcgcataaagaggagagttaagagtgttgttctggtgatactgttggggcctttgctatttttggtttgtcatctttttgtgataaacatggatgagactgtatggacaaaagaatatgaaggaaacgtgacttggaagatcaaattgaggagtgcaatgtaccattcaaatatgactctaaccatgctagcaaactttgtacccctcactctgaccctgatatcttttctgctgttaatctgttctctgtgtaaacatctcaagaagatgcagctccatggcaaaggatctcaagatcccagcaccaaggtccacataaaagctttgcaaactgtgacctcctttcttctgttatgtgccatttactttctgtccatgatcatatcagtttgtaattttgggaggctggaaaagcaacctgtcttcatgttctgccaagctattatattcagctatccttcaacccacccattcatcctgattttgggaaacaagaagctaaagcagatttttctttcagttttgcggcatgtgaggtactgggtgaaagacagaagccttcgtctccatagattcacaagaggggcattgtgtgtcttctagcagaaaacaaactggtggtgtatgaaacattttatatttcttactgggttttctgtaatatatgtatatgaataatttccacatgtatacctagaaaagtcttttacctaaagttagtctagaaaagtacatatatatagatgtgtgtgtgtgtgtgtgtgtgtatgaaaaactgaagaacattgacaataacatgctttttattgttttttcacaaaaactgccaaattatagaaaatatgacaaaaattcctcaattatg

SEQ ID NO: 11871 - DNA, 1032 bp, Homo sapiens
tctagtagaattattcataacttcaaaaaagaagcagaccaaatgtacattaaggatgggtgaatcattacattaattccatgcaacggaacaatatagagaagtgaaaaaaaaccacatgtacttgcaactatgtgactaaatttcagaaacataatgttgagtccaagaagccacaaacaacaagaacatgtaggaatgcacctacacagagttcaaagcaggccagaccaagcgatggagtttagggttgcatacctagttggtaaagtgtgaagaaaattaaggaaataatcaatataaattatggatattgcttatctcaggagatgtgaagaagggtttagggggttggaaagtggcatggaggtggacctaggctgttttcagtgttccttgtcttgctccacataatggttacttgaatgtttatgatacactgcggtatttcccatttttgttttggttcatttctaagtgtgcattataattttaacataaaaagttttaattaggagaaacgtctcatagaaattattattactcgtctcattatatactgaggggaaaaataaactattggtatacattcttatacaactctaagagagttgaagtaagaactttatttagttgcaacatgaggaaatttgagatgattttatttgccaccccagatttttccaaaggatttcttctagccttaattatccacctcacatgaacaaatctttgccgttccccatctattttttcttttggctcctgaattcctgacacaacaaggttgtacacatttcccacactcttggtttagcagagttcttttatcagttatgtttttctgcaagagaaacccttcaaaactacattagatatttatatatcacatggctttggattttgtttttctaaatgggtttgttggatagctctggtgacttgagatgggccaaattctgcatcttggaggtcgttagagtttggccaatttagtctggatcaggtggggggcaatctgccttcattagt

SEQ ID NO: 11872 - DNA, 1023 bp, Homo sapiens
ccctgctttgggtctcatacttggtatatggctgtcatttatatatgcacattaataaaaacttgtgttttctcttatttatctattgtcagtttattttcaatgaaccctcagagcagatgaaaactttctcttggcttcttacaatacttgattctcttttaatgtatttcagttgaattggagtatatgctactgatgggagaattaaaagaattattgataaaaaacattttggcattgtttgattgtatccgtaaactgccaaagttggctgatgtatcataagatttatttgagtgactttattctaacaaatttgtctccagtattgagtatgttgaatactatatactatttttcaaaactcaaaaatattttatactatttttaaatattacttctttatttcaatattaaagtagaaaaaacattccactattttgctctggacacaaaccacttgtttcgctctcttgtttgccatttttttgggggtaatatctgttagtgagctcataatatttatcataattcacattatatgtattatattgttatatctacccattcataagatccatttctactcatatatctcaggtgtgtgttggtataaaattcacaaaatcttacaagtcttttggtctgaattttactttgtcctgtatcacattttgtatcttgtcatttggggcctgctgggaattgagtgttatcatatatttaaacataagaggaggcagggatatatatagagtggtatcagcattcctctgtaagccaaacagctcaaggtaactcattacaggtttttaaggcaagggaaggaagactaaccttctcagcgaggggaggaagagtgcatctcctggcaacggtgcaccagcagaatttaggggttcaagatcctccagattctttgggatctgccattacaggcccaccccaatttttaagttcctatttcttttttagcaaatttcctgactttaacacaggaagttgtgaagttgtaaatac

SEQ ID NO: 11873 - DNA, 1688 bp, Homo sapiens
cagcctgggtgacagagcaagcctgcgtctaaaaaaaaaaaaaaaaaaaattggtgttttctttgaccaaagtgtgggtaaaagaagagaattattggtattttcttgtcaagtttactaaaagtttttaaaaaatctttaagaatttggtattatgagtattttatttatccatagaaataacttacagaaatagagtgaaagtttctttctaccaccaaaataatgactgaaaaaattaatattaagaattcaatatttaacaatcaattagatttaacaatcagttagaaatggtagaataaagaattagtgaattggaagataactacacagagtgaagcataattagacaaagagatggaaaaatacaggctaaaggggaagagcattgaggctacagtcagaaaggcttaacatacttttggagttctggaagattagaagagagaatgtagggaagaagtaatgttgctgagacctttccaaaaataataaaatgtatcaatccatacattcgagaaaccaacaaacctcagacaagataactgaaaacaaattaacatataaatgctacaggaaaccaaagaccaatagaaaatttgaaaagtagcctgagaaaaaagatagattatgttgaaaggatcaactgtttgaatgacaactgattttcagcagaaagcatggaagctagaattcaatgtaatatattttcagtgcgtttcaaaggagtagcagacatttcataaacagaaattcaaaaggatacattttcagatagaaaaaagttactgaaaatacaaagttgaagatgcaagaaggaatgaaaataaaggcaatggcaaatgtgcgtaactaaaaggactattgactgtatagaacaataatatcttgtgttaaaagaggtaatgaataaaatgtatgccaataacatatagactggggtgaaggtgaaaagattaaatttagtttaattattatttaaccttttcattgtctgtgaagagagtctgagtatcaaattcaatgcatatactctagctatatatccaagagaagtgcattgaatgacatgtaaaataatgcccatggtagtattatttgtaattgttctaaaaagaaacagctcaaatacctataaattaaggaaggattaataattatagcaaattcatataatggaacaatatagagaaattgaaagcaatgaaccacatgtacatgcaacaaagtggatacattttatcaacataatgcttaaaaaaagaagtcataaacaagaagaaaatatattaaggttgtatttataaagagttcaaaaatgaggcaaactcaaatcaatttctgcaataaacgaatcatcttgaaaattgtatttacaacttcacaacttcctgtgttaaagtcaggaaattttctttctatatgtcacataaaattctagttttgatttttaacaactgacctaattggtttctaatgttctagaaaagacttataatcatttttccaggtttctgtaccttctctggttctctggttttcaagtgagaaaagctacacctaagcacccccatgaattatactggaaagttttccacctctcttttttgagcagagatttaggaaagttggcatttggatccaagtgacccaagctttagggcagaatgaaaattgcaaatcag

SEQ ID NO: 11874 - DNA, 1762 bp, Homo sapiens
gcacttttggaggctgaggcaggaggatcacgaggtcaggagtttgagaccagcctgcctggccaatatggtgaaaccccgtctctactgaaaatacaaaaatcagctgggcgtggtggtgctcgcctatagtcccagctactcgggaggctgaggcagaaggatcgcttgaacctgggaggcggaggttgcagtgagctgagattgtgccactgcagtacagcctgtgtgatggagtctcactctgtctcaaaaaaacaaacaaacaaacaaacaaacaaaaattccagttcaaactgaatgtccctaacctcagagaactatagtcaattcttcactgaagcatttgtatcttcctcgtctttaattctggtatattttgtttattctttttagctcctgtaacattgcatacaaattatttatattaatagttttaggacttgggtgaaattcttgaattatgaataattttagggacttatttctataaatcatattgcatcaacaaaaatgcttggtatgtagaaggatgttactgaatgagagacaaataattactgaaataaatgttatttctaacaatttctattcaaaatttaagatatttgtattcaagtggtatggctcaggggagatgaaaatgcaaattagtgaaaaatgatctctcatttttgcatgtttacatactcgacttcgcttctttagtcattaccatgaatggaaaattgtggctgatgctgaagataaatagacatcattagtgtttgttctagaaattatatagtagctgactgaaagtggtaagaaaggtattcatgaagctttgtatctcttaacaatttggtttagtaccggagttacaatataaatagaacaaactatttttttcatgaagatctctgaacatatatctgaatttggctatgccttctgaaattgtgatgaaaacatagatagaaagcatcataaatgcatgcccatctgcaactgtttgactataaagctgtcagtgaagtagaatatcggaaatattttcatagaaatgttcgttggaattaatattttctttctggtggtggcaacaagaggacttgtcttaggaatgctgggaaacgggctcattggactggtaaactgcattgagtgggccaagagttggaaggtctcatcagctgatttcatcctcaccagcttggctatagtcagaatcattcgactgtatttaatactatttgattcatttataatggtattgtcccctcatctatataccatccgtaaactagtaaaactgtttactattctttgggcattaattaatcagttaagtatctagtttgccacctgcctaagcattttctacttgcttaagatagccaatttctcccgcttattttttgcctggctgaagtggagaatgaacagagtggttcttgtgcttttcctgcggtctttgttcttatcgtttgtttacctttttatgtccaatgccattagtgagttgtgaaaaaaacatgactttgcactcagatacaagtaaaatagtctgtcttcaaggccttaggcttctcagcttgacatacgttattccctttcttctgactctgacctctttgctccttttatttatatccttagtgagacacaccaagaatttgcagctcaactctctgggctcaagggactccagcacagaggcccataaaagggccatgaaaatggtgatagccttcctcctccttttttttattaactttat

SEQ ID NO: 11875 - DNA, 1027 bp, Homo sapiens
ggtccatgatccattttgagttaatttttgcaaagggtacagagtctgtgtctagattttttttttttttttggcatgtggatattcagttgtcccagcaccatttgttgaaaagactatctttgctgtatcatattatcattgctcctttgtaaaaaatgtctctctatatgtctgtttctggggtctctattctgttctattcatccacttgtgtattctttcacaataccacactgtcttgattcctgtagcttcagagtaagtctcaaagtcagacagcggcaggcctctggctttgttttcctccttcagtattgtattattgattattctgggatttttgcctctctatgtaaactttagaatcagtttgtcaatccctacaaaataacttactgggattttgtttgggatagcactgacttcgtaggtcaaatttggaagaactgatacctttacaatattgagtgttcctgttcatcaacatgaaatatctatccttttatttagttcttcttttatatttttcctgcattttgtagttttcctcatatagatctttacatattttgttagatttatacctgtttcacatttttggatgctaatgtaaatgtaaatggtaatgtgtttttaatttctaatttcacttgtttattgttggtgtgtaggaaagctattgacatttgtatattacccttgttttgtgcaaacgtgctataattgcttattagttccaggagtttttgttgttgttattattgctctttcagattttctgcatagatgatcatgtcatctgggaaccaagacagtttcatttcttccctctcaatctatacattttacttactttttttgtcttatttcattagctaggactttcggtacaatgttgaaagcagtgatgagagaggggacatgcttaccttatctctaagttcaattaactttttatatttgtgttcaacattaggctttgcttaaaaaactatatccccattgctcttatccttatcccttc

SEQ ID NO: 11876 - DNA, 1046 bp, Homo sapiens
gatatccaggctgcaaagcaaatgcgagtctaaacttcaatgaggatcagttacatggggaatgagattaataattccatccagcaaattttaatttactggtgtcttttcttgcaataacaagtttcttttttagtttccaaaaattccaaggaggctccagaaggtttacttatgttttccaaagtgactcatttttgagattctaccagcatgaagaattttgactccaagggaaataaaatttaggactaagtagaaaccaggacttagaaagggaataaggttgcaacctggaatacaattccattctcgtgtactagtgcatgggcacagaaatcaatcgcatcagttcaaggtgttccatacctttctttccaactgatctcctgaatatttcagcagctcaacaattttggctagtatttgttcttcttcatctgtcggggaaaattccagttatttcttttaagagaagcaaaaaataatcttacatttttccagggacaatgaatgcttgtggcttggtaagggctggaggaagaggcatgctaattcttttttttttttttattttttattttttagacagagttttgctcttgttgcccaagctgtagtgcaatggtgcgatcttgcctcactgcaacctctgcctcccaggttcaagagattctcatgcctcagtctcccaagtagctgggattacaggcgtgtgccaccacgcctggctaatttttttgtatttttactagaaacccaggtttcaccatgttagccaggctggtctcaaactcctgacctcaggtggtccacccacttcggcctcccaaagtgctggaattacaggcatgagccactgtgcctggcaagaagcatgttcattcttatcaagtaaatcttacctcgcctcttctgcccagacacaaaccatactagggatttctcctacagccccttcctttccttctttccccttcttcctttgctcagtcccccagctctcactgtgaaattcatcgctgtagttaccttaagcttgttgt

SEQ ID NO: 11877 - DNA, 1024 bp, Homo sapiens
atctgtaacgcactttccctacagcagctaacaaaggcaggatgatggtatctgttctgaacgtttgaaacaacatcaccacttatctttacagatttcctcaggttctcaatggagggcctgaaaaacatcactgtcaaggatgatgctgctacattttatgagctggagacgaacgagacctctcctgatgcctctccagtcacaggaataatggttttgaaaacgtcaatgctccatctgccttgtacgttgtaatctcctgtagtccatctgaggccaacgtgcacaggaccacagtagacaaagagtattcctgatgacaaatctgatatttcagtctacttcttcatgtgatatcccaagtattttttcctagaggggaaaaataggttcttaaaattccaagttagatttactgttgaagtgaaaacatatggctgctaactctgctctatcccaggcgtgacccgaggctcaggagaccatgttagtttgggggagggtttggagaggtgactggcattcttggtatgcctgcaaggaagacatcagctaaggtcttacgttacacacccagagctaacaggctggatctttccttgaagatgggagggcttcaagggtgtatttaaaatgtaataaaagtgggtactgaaaggtcaatgactatgaaggttacaactctctcctttcaaagtgctacagaatgggtgaggttgcaggactgcagggtaactatgtgaatggtgctccacagagagcacaaagagccaaggagtaaatcagaatctcgtggtagcttgtttggcatgccttgtagatagagttgctattcattcatttgatcgattcattcaccgttctacaagtactggctgaacatctatggtgttatgtagaggaatgggagctatgggagattaaaggagccatcataaaaacatgatctcacccttacagatttgcagtttagttgggaagatgagatgtactcatatgaaatgtggaatactgagatagg

SEQ ID NO: 11878 - DNA, 2064 bp, Homo sapiens
tctttctgttacccactgtgaatgttaggctgttttcaaattatccacaaattattcttgtaatcacccaatatttttatgtgggtcctctcttacccattatggattaagatagtttaacaaatttaacaatgaggattaaatgagaaggcaaactgttaacttctcagctgtcagaatttgggtggaagggaataatggaagcctcttttgtgatctgcctgacctgctgtcatgtatggtactggggctgctacatcttgagctatcagggctgacctgtggaatgattctagcacttgctctgccaccttgccagaagttcgtttcctgctttttacacatgtgtagcacttctctgctaaaattgaatggttttaaactaatgtatttttagcttaagaggtgttggtcagttaattattgaattttttttttttcttttttaattctgtcttgccaaggcctctctgggtttcagggcccaagagaaaacagtggaagaaaggattcagaatttgggcaagggtgaagtaactgttcatgcaagttaaaaatacctaagtaaagtttttgaagataaaattgtggtttcagaataatgctgattgttggagactgtaagaatcaggtgcacttgattttgcatataagcaaatggtaaatctatcagaatcctaaaacagacaagcatgaactcttcccattgctggaactaagtgcccacagtgtcagacaaaatggacattgaacttggattctgtgatacacagggcacttgatgcttaaatgaagatggaaaggttagcaatacctgggtgtcagttagaatttgagaattctatatgtttacatatttaaatgtgcatcttgatctggtgggcttcccatgtggagacttgcactctaattaactaagaagaatattgccttgttggatctcagtccacgtgcttgcactgcgatggcaatggcctcttcttcaaaatactaatttgtgtgccaatttgtttaaaattatttgaaggcagttcagcctaatctcagtgttctctttctggggtagatgagatggattcttaatatttctgggagtactttttaatgagagaattgtcaaatttggaaagatttattgagccttaggttacatggacagttaagcttaagtaaactgtatattgattatcaaacacaagctgtaattggaaaagttgagaggaaaagcatgagatcacaaattagggggaaaaaagaaaagggatttttaaatttggtgtattaaattcattgtccaagggggaaaatgaataatgtttcattagattccttatatgcaaaagtatttattttgaacatgtgtcctaaaatatatgcactaactgatgtgattaaaattgtccaagaaataaacttgagcataacatactttgtgtgcaccacagtaagctattctgcattgaagtggtcttttataactaaggcctggactttgctccaacagagtcgtggtcttctgaatagtgacttaaggagttttgtttgcttaagtcagataatagcacattcacagggaaacaaagagagttggtggatagaattttctgactattaatttttcttccatgaaattttattatgcctttggcactttctgccactcttacagcatatcacaagatatctgtttagcagaagattatgtagttactttaattttaatataaaagtagcttgtgatacattaccaagagatctctgattctttagtaagtttgagaacacctattctacagagatgataggtacttagaaatgaagactttaaagtacattttaatctaatataggccagtaattgggggaaggggctttgagcagtacaattttaagatgattttgagggttgtatttctttatcatttaaaaatatcctaaagtcagtaatttatatgaaggaaactcattcattattgaaggtattaaaaatagccatcatctgtattaggtagcagttttggaggatcatctttttcttttgctataaagccctattaatgaaga

SEQ ID NO: 11879 - DNA, 1081 bp, Homo sapiens
tatgctcgtgctttcccttccccttcccttccttctcattgaactggttactaggttgatcctttctgtctagaagtctacaccttaaattctggaatgttttcttgtgttgtttctttgataatttatttttcattttcctattttggagctttttatttttatgctgaaccttcttgactgtagctgtatttttctcacctattatccatctctttgtgtttttgttatactttctgaggagagcttctcaaatttgtctcccaaccctcttgttgcatttttctttgaaatttttggatatcatgtttttaatttccaagggctcttttttgttctccaaatgctctgcccctctgaagacagcctattctttaggttttttgttttttttttaattggtatttatttgttttcttctgcttttgtgtctttttctccaagttcctttgttgtgtttgtcttgggcttcaaatttaaagatagaggttttctttaaatatttggtgatccttagctgtttgtatttagtatgaggcttaaaaatactgagaacattgctgtgtaatttcttacacatattttcaattagtactcctctttcagccccagccacataactcctacctttgttccattctaaaatacctggtgcttccactttctgagctaattaatttcattgttagcttcactggctgtaggcctttagctttctctgggctactgtgtcattatccctggtctatctattctccagcttccaaaatttatatcactttcctgctctcttctgttcttctgccttctttgtccttatgggtttataccttcaaaattattttctttttctttctttcttttttttttcctgagacagggtctcactctgtcacccaggctgcagtgcagtgtgaacttggctcactacagccttgacctccctggctcaaggaattctcccatctcagcctcctgagtacctggactacaggcgcatgccaccatgcctggctaatttttatattttttgtagagatggcattttgccatgttgcccaggctgatgtcgaactcctag

SEQ ID NO: 11880 - DNA, 1049 bp, Homo sapiens
ttccctttgatctggtgatttcctttgtagatagctgtcttagagaaagaccgatgtaagtgtataagggtatttgctgagcattatttgtgatagtccttcatggagaaatacattctatcagtgtatggaatattacagtcattcaaaagaataaggtagatctgtgtgcactaacatgaatgatttttaaaaattaaatttcagaaaaattcttaagatctagttttgtttaaaatttgaaaccgtatagtatatacactgtgtatacacagtgtatgtatatataccgttaagaaatgtgggaactcaggccaggtgtggtggctcatgcttgtaatctcagcactttgagaggccgaagagggtggatcacctgaggtcaggagtttgagaccagcctggccaacatggcaaaatgctgtctctactaaaaatacagaaaatagccaagcatggtggtgggcacctgtaatctcagctactcggcaggctgaggcaggagaatcgcttgaacatgggaggcggtggttgcagtgagtcaagacggcgccactgcactccagcctgggttatggaacgagaacgagactgtctcaaaaaaaaaaaaaaaaaaaaagaaaaagaaaaaagaaatgtgggatctcagatctcagatcttcagatctcaggttcttcaacaaagagagagagggaaagagagaagggggagggagggagggagggaggggagagaggagaggggaaaagaaacagacatacatgtcagtattttcctcaagaaataagcaaatatatctcaagtctggagcattagcatactaaaatgttgagactgcttactcctgtatcatgtacatttttgtatgtttgaatacatttataattattttaatctttttttcacattttttttaatgtcttcaggttcaaatgcctcccttccattatgtattctctgattccagacagttaggcacacacttacgcatgtatagttacacgcctggtatagtatattctttccctcatctgatctcctctgtctc

SEQ ID NO: 11881 - DNA, 1646 bp, Homo sapiens
aatggtagtataatggttacattcatttatatggtaggcatgatgacttgccataatcttaagcacctttagaaaattgaccactaattaagatctgtagcattgtggtcacagcttttccacttgattactgataaattttaaaagtaaagtcattctgctgttagtagaataaatttttggtgcattagagttttaaaatttctcccctgaattggcagtaaaacttgaagttgcatttattagagattgacatcaaatttttctgtgcttgcaagttatgtgaattttaataggaaatagtatgcctcttggcacttctggatcctcttgcccctgacaaaaaccaaaccaaaccttctttctggatagggtttagacttatgccatatgacttagttgttaatgttcttttgcagaccatcagcagagcctttatgaatggcagtgcactggaacatgtggtagaattcggcttagattatccagaaggcatggcagtagactggcttgggaagaacttgtactgggcagacacaggaacgaatcgaattgaggtgtcaaagttggatgggcagcaccgacaagttttggtgtggaaagacctagatagtcccagagctctcgcgttggaccctgccgaagggtaaacagctttacatgtgcattctttgcaactgcagtgtacatttcggggaacatggcatagttacagatgatattcttaatgttttaaataatacgtattaggaatctgagaactaaatgatagatgaacttttaaaaacactattgatattttgctgatttgaatgaataattattagctaattttactcttgtcgtaattaactttaggtgaagaaagaggggaatgggttaataaatgttactgatgagtatactgatatgttaagtatatataccaagaggtattatccatctgtagttgcttgcactccttcccagttatactagattccaagcctattgaagtaaacccaccgaaacaatgttgtgagctaagaaaaaactacatttaaaaagctttattttggagtatttattaattcaaaatggatagtttggtttgatcattattataaactggcagtagctttgttattacaagatagaataaactgttcacaacatgatgtttttcaagggcgagtgttcctttttacaagagtcagcaaattttttaaagccggcagctaagaaatctgaaatctaaagaaaaattccacttataaaagaagtcaacaggccgggcgtggtggctcacgcttgtaatcccagcaactttgggaggccgaggcgtgggcagatcacaaggtcaggagttcgagaccagcctggccaacatggtgaaaccccgtaactactaaagataaaaaaaaattagccaggcatggtggcatgtgtctgtagtcccagctactctggaggctaaagcaggaaaattgtttgaatctgggaggtggaggttgcagtgagccgagatcgtgccactgcactccaccctgggcaacagagcaagactccatcttggaaaaaaaaaaagaagtaaacagtgtgaacatataaatatgtttactgtatttgctacttaaaataatttccctgaagtgacattgattcca

SEQ ID NO: 11882 - DNA, 1048 bp, Homo sapiens
aaaacattatataatttcaaagaggatactgaatgtttccaacacagaaatgttaaatgtttgagattatggatatgctgattaccctgagctgatcacggtaccttatatatattgcaacattgctgtgtaccccacaaatatgtgtaattattatgtaccagttaaacattttttaaaacagagactttaaaagaaatagcaaatgaaaatggggcttaagactaaactatttttctgtggatgcacacttacaaaaagcaataaaactataaaggcaagaaagtgactaatagaaaatcagaataattgttacttctatggagagggagggattgggacagggttcatgcagggccttttgaagtcgtctgggtgattcacccagatcaagtttttttccttcatctgagtgaattcgtggttacaagagtgtttgccttatagtaacttgttaagctatatgtttgttttgtatgtttttctctgtattggctttattttttaaaaaagattaaaaatagtcttgagcatgatattacctgtaggtttttttaataaagggattttatcaggttgaggaagttcctttctattcctagttcatggacagatttaccatgaataattactggattttgtccgttcctttttctgcatctatggaaatgattatgtggttttattctttattttatgaacatggtgaatttcagtaattggttttcagttgttaaaccgatcttgcatttctggggtaagttctacttggtcgtggtttatacttcttttgaaatgttgttagatttggtttgctaatattctgttgaggatttttatgtctttaatagtgaaggatattaatccgtagtctgtttttcttgtgtttatttggttttgagattagcataatatcagcctcatagagtcggaagatatttcctctttctttgttttctggaaaagtgtgtgaccagttgatacaacttttcctgccatctgggcatggggatttctttttgggaagatattaattacaaattcaatt

SEQ ID NO: 11883 - DNA, 1046 bp, Homo sapiens
catgacttgatttattttttagggttgaataatgaagggattatccattagctttggtacatagtggcatgcaaatacttttattcattactaaaatcttgttaggttgactcactcatttgtaacattttatttcaccataaactagacactgagttacaaagttaaatgcttagattagttacagttaggaaacctacctaaattatattgtacaagaaagacaatagcccttattgcattttctgtctttatagtgtgcaaattgcttctggtcagcccagcctgtgatggcaacatttcaaactttgtatcacgtaatctcaagtaatgcatgttgcacacacggcgcagagtatagattagtagatattgcagtgagagtaacttcttatttctctacacttgtttgtttaaagatactggtagttttcattttatgcattaatagagaaaagatgggaggtggctaatgaagtgtgctgtggacttgtttttaactgtattactctatcaagatggaaatatcaattgatttgtgtattaaagatatcctgaggagaaatctagttcatatattataatagacataggcacacaaaaccatttcactgtttctggctgtccctatgcttaggttattaaccttttgtacttctttctcttcttgtagcatctcatgtgtcttcctttacccatttcagtgtgcactgagttgggggttagaggagaaattgaaaatggaaagcacaaggtctggattcatctttatttaaaaaagaatacgtgcaatgtgccagtcattgtgatgtggtagtgacacctagtctttacctttgagttctttatagtttatctacaaactctgataagtactatagtatataacaaaacctgccaagagctcagaagagggaataactttgccttagtaagctgggaaaggtttctaagaaaagttacctttgaattaacttcttgaaatagtttatgtttcttattcacgttttaagcaactttactgagttagaatttacatgcaaaaa

SEQ ID NO: 11884 - DNA, 1043 bp, Homo sapiens
ggtgggacagaatggttagaggaggctggagttaagtatttctcttcttctgtgtagacggggagagggaggtggagctggatattttccttcccccaggttggttaggctgtagtaagatggattttcttgagggcagaccttaccagtactatagctttacaagaactctccttgcacaggcagcagtgggtatttttctcaggtctctctctttttttttttttttgagacacagtctttctctgtcgcctaggttagagtgcaatggtgtgatctcggctcagtgcaacctctgcctcccgggttcaagcgattctcctgcttctgcctcctgagtagctgggattacaggtgtcctccaccatgcccagctaatttttgtatttttagtagcgatggggttttactatgttggtccagctggtctcaaactcctgacctcaagtgatccacctgcctcggcctctcaaagtgctgggattacaggagtgagccaccacactggcttggatctttactgtgagaacctggtagagctcctggaggtaaaaccaaaaaaagtgtccctagagtttttaactttcagatttgtctatactaagcctccagcaagtcatcaatcgcaatttaggttttcctactcgggtgctggctcctgtagagaggtttttgtctgtggatttctgctttgataaattatgatcctttgttatcaccttgtctgtctatccaattgtgggggcagtggtttgccctgtgaccttacttctctggtggatctaagaagagttgttgatctttgttgttgttgttgtttagctttttactcactattaggatagagtaacgatttccaagcttcttccccactgcgtccaccccggccaggtggagtctcgctttgtcgcccaggctggagtgcagtggcgtgattttggctcactgcatcctcccatcctccacccactgggttcaagcgattcgcctgcctcagcctcccaagtagctgggattacaggtgcctgccaccacaaccggct

SEQ ID NO: 11885 - DNA, 1021 bp, Homo sapiens
aaaaaaaaaaaagaaaaagaatagggtacctttatgagtataggctgcctgcacttggggattttgtctaccttcgatgtattccagagttgatgactcttcagaaattacaatgaatctttaagattttggaaggaggggtttgtcagctaatttgtgaactaggaataaaatatgactgtttttatttttgtaacaattgatattgatactatatttcttttagaaattttcacttaagcttattgagttttgtactgtttccattgtcctaccacttggaccgtgcctttccttcctccatcagctctttaaaaatggaacagtttaaaagtgcattattttctttgttctttttctgagatcatatccgtttccagttggcttttgcatagaagcagatagccaattatttaaaatctaaagctttagactggatcttgctttaaagcactgtccctgtgtatgaaggatcttggtgtaaacaacttacagttttgaaggatgttctgttaaattgggaaggtctgttttctatcccttgaatcctagaactggaagggaatcttaaggatcctctagctaaatgccttccttcccttctttgggtgaagaaaccaaggcctttgaccaagataaatgagagggagctatattcttagttgaaatttttgaattccgtgtttggtgctttttttctttgtgaaaggtatcttactgaagccattgttttttgttttttgtgttttttttacgagttgaattactttaaaaaattgaacatggtagctttgtttaaaggaccttttaaaataagtttcatgtttttaggtttactcagtgtagcaatttcttattttaccattgctttttgcatcccagttaatccatttggattcagcttccttttgtttgaagtatgcccttcagtgtttctttcaataagcgtctgttaatagtaactcttggtctttgtctaaaaatgtatttattttgccctcattcttgaaatgataattag

SEQ ID NO: 11886 - DNA, 1019 bp, Homo sapiens
gcctggccaacatggtgaaaccccatctctactaaaaatacaaaaattagctgggcatggtggcatgtgcctgtaatcccagctacttgggaggctgaggcaggagaattgcttggacacgggaggcggaagctacagtgagccgagatcatgccactgcactccagactgggggataaagggagactctgtctcaaaaaaaaaaaaaaaaaaaaaaagtctggacacaatggctcatgcctgtaatcccagcactttgggaggccgaggtgggcagatcatttgaggtcaggagttcaacaccagcctgacaaacatggtgaaactccatctctactaaaaataaaaaaagtagccaggtgtggtggcacatgcctgtagtcccagctccttgggaggctgaggcaggagaatcgcctgaatctgggaggtggaggttgcagtgaactgagatcatgccattggcactctagcttgggcgacagaacaagactgtctcaaaaaaaaaaagacttaggcagcaagtaattgctgttcaggcctggtgtatgaactttaagccttgactgggcacggcggctcatgcctgtaatcccagtgctttgggaggctgaggtgggcagatcacctgaggtcaggagttcaagagcagcttggctaacatggtgaaatcccgtttctacaaaaaatacaaaaaattagccgggtgtggtggcatgcgcctgtaatcccagctactcgggaggctaaggcaggagaatcgcttgaacccgggaggtggaggttgcagtgagctgagatcgtgccattgtactccagcttgggcaacaagggcaaaactctgtctcaaaaaaaaaacaaaccacggaactttaagccttaggcacagttatactaactgtaataaatatttgtcatgtttttgcacctgcccagtgtccttcccctttcttctgttaacactatcctgtgtttttgttgagggtagcgtatgggacagtgaggagatggcggaaaag

SEQ ID NO: 11887 - DNA, 1144 bp, Homo sapiens
aaaaccacctcaaatatttcctccaagtctgtggtttatcttttcattctctttaacggtatcttttgtagagcagaagtttttaaatttaatgaagtccaacatcaaatttttctttcatggagtgtgcttttggtattgtatttaaaaactcatcacctaatctaaggtcacaaggattttcttctgttattttctagaaattttatggttttatattttacatttaggtctgtgatccatttagagctaaattttgtgaaaggtgtaaagtatgtggctagatttatttatttattcatttttgcaaatggatatccagttgttccagtaccatttttggaaaagactgtcctttctccattgaatcccctttgctcctttgtcaaagatcagttgactctctttgtgagggtctatttctgggtttactattccattccattgatctgtttgtctattctttttctaataccatacttttttgattattgtagctttacggtaagtgttgaagtcaggtagtatcagtcttccaactttgttctttagtattctggactgttcttggtcttttctgcatttccatgtaaattttaaaatcagttggttgatatccaaaaaataactttgggcttttgattaagactgtatttaatctgtagctcaagttgggaagcactgatacctttttttttttgagacggagtctcgctctgtcgcccaggctgcagtgcagtggcgcaatctcggcttgctgcaagctccgcctggggttcatgccattctcctgcctcagcctcccgagtagctgggactacaggcggccgccaccacgcccagctaactttttgtatttttagtagagacggggtttcaccgtgttagccaggatggttgtgatctcctgacctcatgatctgcctgcctcggcctcccaaagtgctgggattacaggcttgagccatggcgcctggccaggaagcactgatatgttaacaaaataaagtcttcctatccatgaacatgttatatctctctatttattagctcctctttgatttctttcaccaggattttgtagggacattctaaaatctattttggtaattatatttcactataactggcttcctttggaatc

SEQ ID NO: 11888 - DNA, 1007 bp, Homo sapiens
taaaaatacaaaaattagccaggtgtgggtgcctgtcatcccagctacttgggaggctgaggcacgagaattgcttgaacctaggaggtggaggttacagtgagccaagatttcgccattgcactccagcctgggcaacaagagcgaaactccattttaaacaaaaaataaactaaggggaaattagtgagaggtgacagcgcactggcagccctcacacccctcactcactctcagcacctcctctgcctgggcttccactttggcggcacttgaggagcccttcagcccgccgctgcactgtgggagcccctttctcggctggccaaggcggagccggctccctcagcttgccgggaggtgtggagggagaggtgtggagggagaggcatgggcgggaaccggggctgcgcacggtgcttgcaggccagtgcgagttccaggtgggcgtgggctcagcggaccctgcgctcggagcagccagctggccccaccgcccgagcagtgaggggcttttagcacccgggccagcagctgctgtgctcaatttctcacagggccttagctgccttcccacagggcagggctcaggacctgcagcccgccatgcctgagcctccccgaactccgtgggctcctgtgcggcctgagcctccccgagcgccgccccctgctccacagcgcccagtcccatcaaccagccaagggctgaggagtgtgggcacagggcgtgggactggcaggtagctccacctgcagctctggtgcaggatccactgggtgaagccagctgggctcctgagtctggtggggacttggagaacctttatgtctagctcagggattgtaaatacaccaatcggcactctgtatctagctcaaggtttgtaaacacaccaatcagcaccctgtgtctagctcaaggttcgtgaatgcaccaatcaaccctctgtatctagctactctggtggggccttggagaacatttgtgtctagctcagggattg

SEQ ID NO: 11889 - DNA, 1130 bp, Homo sapiens
cacatacatacagagtagtagaatggcaagagctaattattctcaaacacaaattcttaaagataaatgtaaaatttttttttaatttttaaatttttttatttttatttattattatactttaagttttagggatctgtggggttttaagccatggttagtgatagcatgtcatttgaagatgtacccccttaatgacttacaggctcatagtgattttttcttttttgttgttgttatttagattagatttgggtaagtctccgggttggttggaaggactcaggtttatgtggagttttgtcttttagttaatgtgccagtaacagagtttgcccgtttgtgctatgggatactcatgaggtgcccccaaacccagctggctacatatacagcctcttgcttcctcttcactgtctcctgggctcttcctccagctctcctcatgccaaactcgtgactgcatggacacaacatagggaggtgattaggaccatgtattttggaggcaaactgtctgtatttgagtcctgcctaccctggttattagtgaagtggtttgagtaagttacttcaaacttctgtgcacttcagtttcttgatctggaaactgaaggtaatatacctaccttacagggatattgtgaggattaaaatagataatgtaaaatgaaaaaaaaagaaaaaaagtaaaccaaaaagataaaataaaaataagtaaaatagataatgtccattgaacaccttgtaaagtacctgactcataattggctgttaataagtattttaaaaattgttatctgaagttcctccttttttctgtcctttgagctggactctgtaacacctcttagtattacttccttctttttagcttttgtaacttctcatcctcactgcatctttgcccttttcatttgcagttctctctcccctttcttaacctagattttagccttaattgcggtaatggccacctgcttgtttccagttttcatcatcattgccttctcgttctttattcagaaacctgaagaggcttcttagttttctgcgttaaaaaggtagccttggccaggtgcagcgtgtgtaatcaatcacagcactttgggaagcggaggcgggaggat

SEQ ID NO: 11890 - DNA, 1084 bp, Homo sapiens
ttacttttttatctttttgtttgaaaataattttaaatttacagaaaaaaataaaagaacagcatctactattaccagtttgccccctttgctttattacttgctctctcttcatatttatatatgatacatttttctgaaccataagttgtacacatggcccactatcctcaagcacatcagcaggtctccgaagaacaaggacagtttcctacccacagtacagttgtcaaccccagtaaacctgacattgatttaatacttctaactagcccacacgtgtatttcagtcctgtaagttgacacaacgacattcttcatagcattgtactgtctagtacagtcttagtttgcttgggttgctataacaaccttagactgggtagcttataaataacaaattgacttcttatagttctgaaggctaaaagtctgagatcagagtgccagcatgatctggttctggtgagggccctcttctgggttgcagagtaccaatttctcatcgtatacccaagaaagagagctctctgggggtcctttttatatagcatgaatcccattcatgagggctccacctcatgacctaattaccctctaaaggccccagtttcagatactatcacaatggacttagggttttaatttaagaatttagtggggacacaaatatttggtcttgcatacagggtccaattgaggatcgtgttctacatttacttgtgtctttagtttctttacatctggagtcatgccttggcctgcctgccctttttaaaaatgacagtttattgagatacaattaatataccaccaaatttaccatttaaaaaaagttgagatataatttcagtcgtaaaattcgtctttgaaggtgtgcaatgcagtggtttttggtatattcacagttgtgtagtaatcactactatctaattctaggacattttcatcacccccaaaacaaactctgcacattaggtcatacaccatttcccactcctcccagcccctggcaactgctgatttacttcctgtccctatgcatttgccctttctgggtatttcttttttttttttttttttt

SEQ ID NO: 11891 - DNA, 1050 bp, Homo sapiens
acacgcatctaaatcaataaagtaacatgtccatcttagttgatgaatttgtcagggagaagggactatgttagtgtgtaggatgagccatgtggccagatactattatgggtggaaggtcatataacatcagagcgtgttggataaagggtagacagaagggaagagtcagtgagagcactttataacataaaaaagtgaaaatttgctctccctattttttttttttaataaaaaagcactgtggccacatatatacacacatatctgttcatacttacttattgtattcaaaatccagggtactgagttattttttttcttgaatgacagaatgggagagatggtaacatatgtgagaggagaacggactgctcttggcagtcatttgtttcatccaggtggggagactgttatttttttcttttgggagagctaagggatggcagaagataaatgaaagaagaatggtaagagtgaatggagtaggcattagtgattatggaaatagctataggcaaaatgaggctgtggacagagagtggagctaagcatggagggcacggaggaagactccaggatcagctgggctcccccatgtgctgggcctggaagaatgggactagggaagtgcgggggtgggtgcaacaggagtcatggagatgcacatataattgaaggatttccatcaaaacacggttaaaataactatactagatagtctgccttttagcaacttaccagtattccatttctgttagtaggaattgtgtattcagttacacaggggaaagcagcagtgccactttttcagtcatcttgatgactgggttgtatccctaataatgatgtcgatggtaaagaggctaaagctaaaattaggttttgggttttgggcagttactcatatttcattgaaaatgaaagactaattgtatttttattttaatagagaaagatatacatatgtgtgtattgtctgtaattaaagtacactcagtacagtgttctcatttttttgccctaggggtttttcagcttggggtctgt

SEQ ID NO: 11892 - DNA, 1043 bp, Homo sapiens
gcctcgcaagtccgggaggcgaggggggcccgaggggagacgccgtgacaactttcgtttccctctgagggaattgggaggtcggcggccccaaaagtaagtggccttggcgggccgcgcggggtgtgcgggcgggagggtgcggggcccggggcgccctcccgcccggccgcatggacgctccgcagcgcgccccgactcccggtgccgggcgccgcgctccagccccgccgtctctgccttcccgggcgtaccggccaccctttcgggaggcggcgtgggggcgaccgcggccgggggccgcaggagcgtttgaagcgggggtgtaggcctggccggaggctggccggagcgggaagggggcgtgcggccgggcgcggggtcgcagtgggtgcgctcccggccgctgcgcggcgcttggaccgggccccgccgagaggagcggccgccgcgggacgcggcacctttgcgggcgaagctgctcacttccaggcgcgactgttacacaacacgcctgccaagtggggccctggcctgactgttcccattatccccagttcgcctttggtgtaagcagcgaggccacctgggtggtgacggtgctgctttcttcaaccaaccaaccgaaaaagccctcaattttcggacaggggctcgggtcttggcgttggggggcccgacgcctagtgacttctttatttacactagctgcaaaacgtgagaaataaaaaagcccagggtctgtgtatcacgtgtagtttcatgtaatgaaacaccacagagggaaatattttcagatgctgggtttatttcctaaagaataccaataatgaaccagagaaaaggcaagtagatctgaaaatgaatggatactgcaaaatcctaaagaagtttaggaaacatcaactgcaaggattcttggcgttttgaagtcgtgggtgtctcagattggagaaagcacacctctaaccagcctgtgatgaataagctggggaggaaaaaaacctgttgcataatctcatttgccgtggggtttgctgtgc

SEQ ID NO: 11893 - DNA, 1078 bp, Homo sapiens
tttgtagttttttagtagagacagggtttcaccatcttggccaggctggtcttgaactcctgaccttgtgatccacctgcctcggcctcccaaagtgctgggattacaggcgtgagccaccacgcctggccatcatttgttttaatattttgttagaatctggatccaagtcagattttgtagtactttctttttgttgttgttgttaagagacaaggccttgctctgttgcccaggctgcagtgcagtggtgtgatcatagctcactgcagcctcaaactcctgggctcaggtaatcctcccacctcagcctctcaagtagctggtactacagttgcacacaaccacacctggctgatggtacatttttaagcttttattaatctgtgaatttctttaccaacacaactttacattcttcctttccatctgtggatcatttgtcttcttattatctgtactggattttgctgattatatttccgtgacattttaccacatccctctgagccccgtattgcctgtaaattagtagttgaaactaaagactagatcagattcaagtttttgaagttttggtgagaatatttcctacgtggtggtgtttacttccttcaggggcccacagtgtctgattgtccctgattgagtgatgttggtgaccatagttcatcattgcctagatgtcttgttccattagaggccataaaacgataatgttctctgtttctccttcttcttttattacctgcaatatttcagtaaagagaaacttcccctcgtttactatttggcttcctttatttcatatagaaaaagccagatacatgcttacttgataccttctctttatttaccagttttcagaatgataatttcattctgtaacatcctcaaggtaaagtggtctgcatcttcgttttttgagtgtaattataaacatatgaatttaaacatatttgatacgtttcagtttgttacagatattattcttattgatgctctaattgccccactgttggccagcgggagcctcttcaagttggtttgttggtccttttgacacagctccagtagt

SEQ ID NO: 11894 - DNA, 1002 bp, Homo sapiens
gtgacatttgattaaatgtaaaataagaaatcccttgaaaattgtttagaagagaaaataaatatctcattactgttaagtgattactgtgggggtttttttgtttttgtttttttttttaacagacctccaactcgggcagtttctatccttcctcttcttggacatggtgttccacgtttgccccctggcagaaaacctcctggccctccccctggtccacctcctcctcaagtcgtgcagatgtatggccgtaaagtgggttttgccctagatcttccccctcgtaggcgagatgaagacatgttatatagtcctgaacttggtgagaagtgactgttcttttgcttttataactatcattttttatgttggccctgtttaacatattgttcaccaccctcagaacttagaaagtaaatgagagggtatcatgtacataactaatatacatacagttggataaatcataggatcttctcaagtaaaagcatcatacataagtatagaaatgtttatcgtgttttaaattaggcttttcctggagatgtcactcttgctgctaatcctttaagacttgtatatctggttcccttttagctttattgtcatcagactagagcgtcattgtatacattcactgactgtgtatgtgtatacaaacatgattgttgctaaaggaggaaatgggttttcaaattagaactctttttaaaaaaatcttaaattaccaaaaagaagtgtttaaaattattggcagaggaaaattttgttagactgtatgagtagctatatatacaagaattttttttttttttttttggtaagaattaagttgttacagtctgagttgaatagcataattttctgtatttctgggtaccatgtagtggagggtccaatcatactacttctccatgttcccttcccacttttcagcccagcgaggtcatgatgatgatgtttctagcaccagtgaagatgatggctatcctgaggaca

SEQ ID NO: 11895 - DNA, 1026 bp, Homo sapiens
tttttttaggtggtttaactacctaaaatatcttatgagggagactggtgttacatttttatttcttctctcctaccccccctctctcttctctttcttgagacccaaagtattattattatccagataaatgctagaaaaatcaaaagcaaaataaagaagaggccaattgataagtcgccaccaaacaatccaaaattgatgcttaaattacagtgcatgagccatatcaaccatgtagctatattaggatcatgtgtataataaataagcaaaacaatctttgatgagcttttaaaattagtttatttccaaacagagagaacaaaataaatgaggtataaagtgaaattttcctataaaatactccagtgtgctacatggaaacattgacctgtacccatgtttgtatagctgttagattttggttttgtctgacaatttactaagaaatttactcttagagttgctagcaagagaatattcctgtggcatttgtgttgaaatgaacataagattggcaaagtgaatctgaagtggaatcttctaatttgaataaggtaatgactcttggattattaaggctaaaagataaaatatgtaaatatttgagcctgtgaaataatttttaacacatttattaatggagaataatcaatattttgtgattaaatatatatgtattaatcagatatgtgttcttgcacattctttaaagttaagcgaatatgagtaacttgaagaagttagaaacaaaccaaataaaactaatagtaaaatgttaaatgcttgtcaattgagttctacttctagacctacagtgtcaatgatggtaagataaattcctctttgtatcacacactttaaaatgctgaaatatatataacacatggctgagccaaaataaatgtgaaaaaatattgaagacgcaagaataatagctggataagggagctctagaacattactggaacagtaagctggaacagacttctaatttcagccttgaaatggaacgagcttgta

SEQ ID NO: 11896 - DNA, 1053 bp, Homo sapiens
gactgctttaagtattttattggcccaaatataggaagattgtttgtggggaataataataacaattcattctttcattctaatacagtattgaatacattaaaaatatttctaagccttgaatgctaaggggattagcaactcagtttctgtcccacctaactccttctcttactctgagaatcttaccctttactccctccttccctcctgtcctgcctctctcctccttgccctccttcttccctcagcatctaccagcattataaacactcctttcagatatacttccatcctttcataatacgcttcccacttccttgaccccatcccactggtcagtgagtagtagagcgagctgaaaagaatgagggctccttcccacaccggtttccacaggtgttagtcatttgccgtgaagtggactgatgaaggttgatgtgttgtttttgagtaatagtttaattaaaaagtgatgtgtctgtgtgtggtgtgtatttttgtttttgatctctgtggaaattgggaggactctgttaaaatcaatactacctgatatttgggccattttagaatttaaaagtaaatactgttctaatcaaaggaccagattaccaaaaggtctttttgcatgtaatatgctaatcctaaattagaataattaaaattgtgccagtgcagtatctaaactttgccttaattacaaataattgtcctgtatctttgattctaaaaagaaaatgtgccttttgagaatttggagactctcacaatgcattatctattaaaattattttacttagatttaaagtgttaactattatgtgtgttttaaatagggaatatgcacaaatgctgttttataagtatgcctaacaatcatgattttaaaattattaaaaagcattttgtcacacctaccttttttaatacaaatggccacaggtccctttctagtattcgtttgtaagttgcaatcataaacatttaaagaccataccattaccctcacaaccatccaccccgtgacatttccattttaacaagggaaat

SEQ ID NO: 11897 - DNA, 1422 bp, Homo sapiens
tatactcagcagtcattgagctaataatgttagggataatccaccacaacaccaacttctctttgttagattctaattgacagttcatcttcttgaatatataaggtgaattatcacaataaattttgtaaggaaaaaaagtaatttttatatactttttctttctatcaccaaaatggagacaatggggctttccaaaagagtcattttagtccttaagtcctttaagtactttagtccttaagtacttcaaataatgcaggctgttctttggaggtaaaatggaccttgggtagattcaccataatgataccttacctactgtatactcataaatgtcttcttagtgtaattcctgagaatcattcaatcaacactatgttgatgctgagttaattatcagaagtagaaaaattttctttgttgaagtctagggaacttctttcgtagaatggcttttatatggaaattatacctttattttcttgtacatgacagatacttgatgatcggaagcaatggtggaaagttcgaaatgcaagtggagactctggatttgtgccaaataacattttggatattgtgagacctccagaatctggattggggcgtgctgatccaccttatactcatactatacaggtgagcatgatttcttagtaaaatgtagtatgtacacatttacgaagttatcactcttaagtaggatttaaacacctttgtgtattgatcattttgagatgtagttggttatatattttttctagagtaattggtgggggagtggcaatggtgagagacacagggaagaattacacatatgttttctgatttacttctagaaattgttcaagatgtttagcagtaggtacctgattctctgaatgctttttttccccaatctgtagtatttctgacatttgaagaaatggtatttctgtctttttacccacagctctgctatccaccaggggcttcctcttgatagaggatggcactgatatcacggcatggtgtccagcagttcaccttcaccagcccttgctttcagtctcttaaatgttctgccactgaccagccttgaacttgcactcatctcaccttacactaatacatgagtacctgttcacctggattacaatatttttcctctcttgattttaagattaaaaggtacttaggatatagattagataggtcaggctctctcttcttgttcattgaaggcccatgaaggtccattcttatggcccatgccacattttcaggatttcagtgaccctggtcagctcattcaccctaacatctgaattaacttgctcttaaactccggaattttagacctgtgccaggctctctagagttaggtctgtaaacaaagacagaatggatggactctctcaggtacagccagtgaacctg

SEQ ID NO: 11898 - DNA, 1049 bp, Homo sapiens
taaaaggtatccatcatatgactgttcttgtcaagtgggccctatgagcgtggcatcatttcaccttggcattctgtttaaaaacaattataacatagaacttagtgttactttttatatgttagaatattttactagaatctgaaatgtttataactaaaaaaatgccttaaaatatgtttggtctagtatcttcattttaaggacgaataaattgtgattcagcaggctccaatctgatgaactctagagcctcattcttttgccgctactccagtggaacttcttaacttcttattctttatccagtaaagtattattcacacagggtatctggcactatagttaaacgatataactcatttccaaaaatgagtcacctcggactctactttggatgtgcagagtaaaagttggactctgaagcaagacctgatatgtctacctgtgtggtcttgggaagttatctctctgtacttcggtctcatctctgaaatggggataataattcatgggttgctctgaatctgaaagtaaataatgtttatggtagtacctactacaaaatagtaagcataatttgtggttttcattttgccaaattgagttcattttctttctgaattgttttctattttgtttaggtttcttgtattcttaaaggttttttcagaggttgaaatgtaagccgagctaccaaagatatgaaaaaaagaattctttgatgcatttatttaaaaaaaaattaattaacagagatatgtagtttaattttataacagtttccgttttcataagttatgtaaatttgtattgatctgctttgtatttaaaatgtgtttaaaagacagtaatttattgtattctatactttttgtgtacttatggtgtttttgttgttactgtttcgatgaagagggtctgaagtagaggaaggataagacaagtttacagacattctgaacaaacctgtaaaaatatatgttgaacctaatatatataatatatattatgtatattatatgttgaaccatatatatatgtgtgtg

SEQ ID NO: 11899 - DNA, 1049 bp, Homo sapiens
ccattttaataacttgattttgccatttttaaattaccatacaagaaatttctgagccagcatgtgaaagactctgcatcattattgtcactgacaccgtaacacttacttaggaagataaatattaatttctctctcctccagttataacagtaacattttacttagctactgttatcagaatactggaaattttatatttttttccaactaggctgtttgtcaaagcctttaagcactaaaatttaaaattgtttttaagggaaataattgtaaagtatattaaatattcccttcgcttgggtgtggcagctgtaatctcttcttggggacaaaggatcatgcatatgcacattagcttatgcactgtgaaactcagggactgcactccttacctttacaccaaatcattcagattcatctcctttttgaatatttagggctgctttttccatgtgactgggtctcaagcctgtcccttttccatgttgttataacacgtgagcttctagcatggcttctggtatctgtaggctgggaaactagataaaaaatgttcttagtgaataggttctaagtggggacttgagagtcttttttttttttttttttttttttttgagatggagtcttgccctgtcgcccaggctggagtgcagtggcgcaatctcggctcactcctgggttcacgccattctcctgtctcagcctcctgagtagctgggactacaggcgcccgccaccacgcctggctaatttttttgtatttttaatagagacggggtttcaccgtgttagccaggatggtctcgatctcctgaccttgagatctgcccgcctccgtctcccaaagtgctgggattacaggcgtgagccaccacgcccagccgagagagtcttttccactagagtctgtatgttaaaatatgcacgtgttaatgtatagacatggtggcatctctaacaaacgctcagaggacttcatttatttaagtgtgggtattattctatgttctgaatagatagactttccagaaagctaacttctc

SEQ ID NO: 11900 - DNA, 1058 bp, Homo sapiens
actataaatgatccttttgatgtctctctgccccattatactatatatttctaaaagtcattatctttcttttttgttaatttttttttattggtagaaatgggaccttactatgttgaccaggctggtcttgaattcctggcctcaagcaatacccccaccttgacttcccaaagtgttgggattacaggcatagtaaatcactgtgcccagcctctcttgccttttttggtctagtcattctttcagggagattttatcctctagatccacccctaatctagttgcccttgaacttcacactttgctgtcttctattgcctataatgtggtcttttcttaaagatgctttttctttcccctaaaatttctttataagcagtgaagcttcaaggaaagtttgtcctagcttttctgtgagttggatgaggtgctagagatttgttttcttagtaggattacctactgacaatctggcttgttttttttatattcagccaagtgtagacagttagtggaactgacttttttgtttggtcttgactcttctttattgcatcactttctagcagcctattaggactgcctctattcttgaagataaatgaaaaatactattttgaaaagagtgcatttttatctttgtgggcaaaatgttaagaggcataggataataggaagaaggaacagttaagaattgagggttttaacttacctgcttagtcgtgaacttttcatagacataaagttatacattttgctcttgatacagtctgatacctagaaaagtatacaacgtattctgttagaaagcaattacattcccccatataatcattctgctggccattggatctgtaaaaccatgtattactaaaatagagcagacaaattgaaacaatggataatccttgataagatataatacctctgtgttcccttatcaaaacaatcaatgttagaatattatggcaggcaggaagagaggaagttgagataagaaatagtgactatcaataaaatatatgagaagtagtttgggggtagtgtaagtatgt

SEQ ID NO: 11901 - DNA, 1028 bp, Homo sapiens
aatctggcaagtacttttgtgttctctttattgcaaatcatattctttttcatctttaagaaatgttgtttcttagtaaacagtaggtcatttatttgacttctccaaaaaataattgactatttaaagaaaaatagttttaaggaacatttaccagttgcttttttatgtagatagtgagtgtaggatgtagcagataggccgggcttcatagtcttcactgtttagttttgggcatgcatgctctctgagccttaaatgttatagttgtaaaaggggtgtagtgttgggattgttaggattaaatgagatagtgtatataaaatgcctcgtacattgtggagcacaaagaagttcacagaataatgtaagtattgttattactgatatcttctcctcattgttgttgtcattatcaccataattatgtgggaaaacctaaagggagttttgtactaatgggctcaaaatggaatgcattgttgatgaaggtctcgatacagtagatcaccttgacaaattgtgtgtagtcatagtttctttgatacaccattcatctcgttaagatgagaatgtccagccagccctagagatatgtcaacatttctggctgagattaatatagacttatgaaaatgggttaattggtcactaatgagctgcattactgggaatagggttagagttttatgaaatgcgtagtttcactttagacttacctactctcaggagtaggcagttatttaagtagtagccagtttgaaagaaaaaaatctaccttttcagtttgtttcctttttatggataaaatgaaaaaattccatcctgaaatcagattttaaggaacagatatatatagtgattaaccacccagcttccttttgcctacacacacacatgcacacacacactttatcttctgtttttcattcagaatatgactgcacaagctgtaggggttagctaacagcacactgaacagctttttgctgccagtttgggggatgattgaaattattgacccttac

SEQ ID NO: 11902 - DNA, 1076 bp, Homo sapiens
tgatgcttctttttctcctataaaggtgttcatagaatgtgcaatcccatgtaaaagctgtgtgttaaagaaaatggtgtaactcttcaaccctcataaggctttgtgagattttatggcatgatcgcatttattgtcatgatagtaattcagtttaataatgttaactagtttcatttggacaacgtatttgccctggtcattcatcctttgttgttttaaacttacatgtactgggaaaccacatataatagctcttgatgtttctactaaaaggcagagaacttgagctattatctagatagtctatgaaaattttaaagatggggcagtgtctttgtttaatttctctttgtgtatttccaaggatttgaaagtgaacaatgggaggtctatattttgctagcaatgattgctacactcacctgacaaaataaaagtgatttctttttctgtggtttaaagaatttttttttttttttggatacatagtcatagatttttggagtcagatggggactgtagagactgtctaattcagggataatacctggtttccatttctatgctgactttataatttagtagtggctgtttacagcaatgttgagaattcccacatctttgggttcagcttggcattaaagagtgtaatgataaattattgatgttttttatgggaacggggagggcccgcacaaacgtcatgtacttgctatcctgatctactctagttcttttgtttttcaggtgaggaaactaaaatctactgaacttagtctataataagcagttaggttgtaaagtgttcttttatactcatttctttgaaacaggtagagtttttctttacaaataatgttaaaaataatggacaattggccaggcatggtggctcacgcctataataccagcactttgggaggctgaggtgggtggatcacgaggtcaggagatcgagaccatcctgtccaacgtggtgaaacccatctctactaaaaatacaaaaattagctgggcgtggtggcacatgccagtaatcccagctacttgggaggctgaggcaggagaatcac

SEQ ID NO: 11903 - DNA, 1021 bp, Homo sapiens
caggctggagtgcagtggtgtgatcatagctcactgcagcctcgagctcctaggctcaagtgatccttaagtcatgggtgggtggatcacttgagtccaggagtttgagaccaatgtgggcaacatgacaaaaccctatctctacaaaaaatacagaaattagccatggtggcatgtgcctgtagtcccagctacttgagaggctgatatgagaggattacttgagcctgggagtttgaggctgcaatgagccaagatcatgccactacactgcagcatgggtgaaagagcgagaccctagtctcaaaaaagaaaaaaaaaaacctaattaaaaaaacatgaaaattacaaataattgtggcactggaactattttgggtattattcaactgctaagaataaaatcagcataactgcagaatacatctgagaaataataaaacatgactttggtcagaaagttcaggaaatttttgtactgtgtccaatttattttgctctgtgatcagattctcgtgaatgctagtgttagacaaaagactgaaaatagagttactatatagagatgttcattgtttggggagaaattcaatagagtcttgaatattctcgtgatgtgcagaataattatatagagattattttaaatcataaatacatcttatatcttaacatcttaaatgttttgctttccagatatactcaagatatttctgtgaaaatgttttttcttaatatttgccaacaagagcgtcttatatttgtgtaatttttccaaagttgagtaataactgtaatgctagtttgcttatttttcataaaactctgagtgattttctttaatatatccttgaaaatgcatttttcatttattttttcttattcttgttgtatgtatatatcaagtgtggcatttattttgagagtcttgataaaattggcaaaagtagagttacaattttatgttaataatgaaagaatgacatataatatttgcctgattgtatctcttattttttgt

SEQ ID NO: 11904 - DNA, 1016 bp, Homo sapiens
tagagacggggtttcaccgcattagccaggatggtctcgatctcctgacctcgtgatccacccacctcggcctcccaaagtgctgtgattacaggcatgagccaccgcccccggccttcccctttcttttgtattgaaattagctctcaatactgccacaaagaattctttgtaatgagttagccacaaaaatagttcagttctaggaagaatttcttttctttttcttttctttttttttttaagagacagtcttgttctgttacccaggctggagtgcagtgcaatcctacggagaatttctagcccattagaagaacacatccatgaccccccttctcctttacctgccatatgcaactgattgccagattttgctgctttcacattaaagttaaccctcgcctttgccccttctgttcagtttttcactgtttcaaggctatatgaccattttcttaagctattccctcctgaatgtctctgtatctgcctctgtcctacttcaattcatgttaattactactttcagatcagtcttgctaaagctgagttcagatgatgtcagtccattgctttaaaaactgctaacaaaggtttccttttcaggcttttcacaacctggtgactttctttaattttagcctcactacccgctttcctataaattactcattagccaaagtgaggtactatacactttcatctgtatacttcagttttcccagtctgtgcttcagtgtccctcttgtctatatttggaataactttttaatttatctctatatacaaatcgaatccatcagttaaggtctactttatctgccattgtagaataatctaccttctttggtacctctcccacttaatattttttttctcaggatcgcctaggcacttattttctttcgtgaactgtaatttatatacatgtgtgttacctgataccaggtatcaagctcctctaaggtaggctccatatctgatttttacttttggacaggccttaaagcctg

SEQ ID NO: 11905 - DNA, 1098 bp, Homo sapiens
acctaatgtctaattttgaatattttgcttgtttgtgatcaaacttaaagatttattttgtttttatttctagctttttcctgctttcaaggttttatcaatactgattcttttcagataccagttcttttctatgctatggcataggcttgctactctctactttgtgtttattacattccaaatcctagttattttcttacactctgtttcacaccctttaccctactgctttttattcttctctctactcccttcttttacatacctcttttaattctgcagcaggtcacttgaaccaaggtttgtataagaaaacatagtatccagaataggaaatgataggtttttaaaagttgtctctttaaatacttgaagttctattggatgaatattttaacactgatttatgtaatatttatatacaactcagctttcctgagttgtgtgaaacatacttggtagttacacggatcatcacaaaacaacataagttaatgataaggtacaaacttttggacatctgtagaggtatgtcgggggaaaaagtggaattttaattaaagtattctggctatagtaaatccctcctgggaattattaatactacatgaaattgtttgcagctgttagtgattgaaaatatttttgtaagaaaaattctgcattggaatagttgcaaacattttaagttgaatatatgcaagaaagtttaagggtcttcagtgcttcactacaaccttttcagtattttctagatgtattcctaaatgggatttaaaaaaatagaccttatttctcagaagttttggatttacaggaaagctacaaatacggtgtctatatacccccataccagcttcccctcttattaacatcttgtattattggtatttgttactattaatgaaccagtatcagtacattagtattaacaaagtttatactttatttagatttccttagtttttaatgtcctttttctgttccaggaccctaccatccaggacaccactaaatgtatttcctcgtaatgtctccctaggctcctcttggctgtgacagtttgttagacttccttgtttttgatgatgtttg

SEQ ID NO: 11906 - DNA, 1032 bp, Homo sapiens
gatacagaaagaatattttgaaatatttaatctcatgagaaaactgaatagctggatttttaccaaggtgcttgctttgttttttttttttttttgtaggctgaatcgtctcaaacttgtcattctgaacaaggtgataaaaagatggaggaaaaaaattcaggcaacttccagaagaaggctgcaaacatgcttcagcaatctggttctaagaatacaggagctaagaaaagaaaaatcgatgatgcctgatatgaatgttactaaattttctaattaaagatggtttatgcatgtatatgccattatttttgtagttagacaatagtttttaaaagaatttcatagatattttatatgtatggatctatattttcagagcttatctctgaagatctaaacttttgagaatgtttgaaaattagagatcatgaattatataattttccagtataaaacaagggaaaaatttttatgtaaaaccctttaaatgtaaaatatttgagaataagttcatacaatcgtcttaagttttttatgcctttatatacttagctatattttttcttttgacataactatctttttgaaagcaatattatactgacagaggctcactgagtgatactttaagttaaatatgtagatcaaggatgtccaatcttttggcttccctgagccacattggaagaagaattgtcttgggccgcacataaaatatgctaacactgatgatagctgatgagcttaaaaaaaaaattgcaagaaaaatctcatgttttaagaaagtttacaaaaaatgtaaaatatttgagaataagttcatgtaattgtcttaagttttttatgcctttatatacttagctatattttttcttttgacataaccatctttttgaaagcaatattatactgacagaggttcactgagtgatactttaagttaaatatgtagatcagggatgtccaatcttttggcttccctgagccacattggaagaagaattgtcttgggccgcacataaaatatgc

SEQ ID NO: 11907 - DNA, 1043 bp, Homo sapiens
agtagcaggtgttgtggctcccacacttcctcgtgaagatctggagaagattattgcacactttctaatacagcagtatcttaagtatgtacaaactcattcattattctttcaggttgtctttatggtttttttttaaaaattgcaacagaataaacggttttgcagttattttgtgtgaacttttaaatgctatagaaagtaatttacctaaaacactcaaactttaatcactataaataaaaaaaagtaacgaaaatattttctttaaaggctttatttgcattcttgtaaattttattatttcaagtcaatgtgttaagaattactgcgcatatagttatttcttttataaatttgttttccgtgattccttcaaaagctttcttattgttggcctttattttctgcagagaagactacagttttacagcttatgctaccatttcgtatttgaaaataggacctaaagctaatcttctgaacaatgaggcacatgctattactatgcaagtgacaaagtccacgcagaactctttcagggtaaatggctattaattttcagttttatatattttaaaaagtatattaaagcctatgggatgcttttctgtcatattcccctaggtccagttgaacatgagaaaagtcagttttctgattagatttctgggtatggaagagagaaaatatagttttctgtaaagatgtaagtgaaagaatttagactggccttttaacataaactaggggtttccagtttcttggaatgggaggactccgtttgaatatctaattttgttatgcactctgctcttatttggttgtgattactaatagttgagaagtctgtttctgctgttccagtggttagaaaccactgttttaaaccaaatactatcaagtctgcaaaagcatgtcaagtcaagtgccattgtgtctaaggacatttgaggtctttagaacttctctcacaacgtagccccttttattcaaaatagagctcatatttgaatagaaatttgtagataaaaaactagacc

SEQ ID NO: 11908 - DNA, 1050 bp, Homo sapiens
ggacgtgcaggtatgtaggactcaaatccagaagtaaatttttagaaagcttttccaaaaaatacatgataaatgcttaataagtctgtatgttttatctttattggatagtatttttagaacaatgtatttttagcagtttgacacttacttgcatatggagaaatttttacttatgttctgttatctgaattgtttctttttatgtgtgttaagataatttgatgttcatctttgcctcctgaatttttaattagtgatttcaaatctataacttaactggattatagacacattttttaacttagtagagctgattattgatgtctctttagagttttttttaatttgagggtacccattacaaattaacttccacatctctaaaatttctagatgtagtataaaacattgcctgctaattttaccatatgtcatttttgcatattttgaatttgtaaatgtaattctgcaatctcaaggtttctcacaccacaggtcgagatgacatgaaagcagactgtattttgtactacggctttggagatatattcagaataagttcaatggtggtgatggaaaatgtgggacagcagaagctttatgagatggtatcatactgtcaaaacataagcaagtaagccacatacctttttataacttttatcaattaaagcaaatatgaaagtatatgacatcgtttttaagttcttactaaatacattggtggaacaccaaagtgcagatccataaaagcagatgttggagggtaggaaccagcacatcaacctgtatgatctgccttagttcaagaaaagatgccctatctttgagataatcctccaaaactacttttttaattgaaggtttttgagacacattgatagcaacttgaaggctttttttctctggcactgctgtacagttacatgatttaataattttgaaaaggtctatggttaagataggcattttgagagtcaagctcagtaacgtgccaccttgccagctcatgtgtcaatgaaataccaagtttctccttaagaagta

SEQ ID NO: 11909 - DNA, 1047 bp, Homo sapiens
atgattaattttattatttatgttgatgtattttgcttaatctggtacatttgaatctatccaacttatttataagattgccatcctcccagttttacaggtagggaaagaggcttggaggaacagcatatgcaactttgcctaacatagtaatttagtcacatagcaattggtgctagacctgttgaatgtttgctgttttttgttacatcactttgtatcttgtggatgtttgctgagtgtcattgctactgtatttgtcatgtatacgtttatgtgactttggacacttctctgaaatctagagagttagtcgttctgagtgttgtgggttattaagctgaaatatagagttttccataaaaaattagtgtcaaaagaaccatgtggttcttatttgaaaggtcactgcaatatataatttactttctaacattttccgtgcttaggaatgacagattactgttgagtgaacatcattaatagtactatttttaaaaacttgttgtcactgttgtgcttttatttttagaaagaaatttggattattttagaaacaaatttggaaagaaaaagaatggcgtccgtttcaggttagtagcaatgattacattttcttcttccttctgttctatttctgtttgtatgatatttgaaaaagtttgttttaaaaattctgattatagaaatgatttttttcagcttttttattgaagtaaaatacacattacaaactttgccatgctaaccattattaagtgaataattcattggcattaaatgcatttagactgttgtgcagtcgtcaccactatccatctccagagctttttcatctatccagactaaaattctatactcattaatccgtaactttccattacttctcttctcctaatccctgatagccactattctactttctgtttcttgactattttaggtacctcatataaatggaatcatataacatttgtccttttgtgtctaatttttaccttatttgtgtccaaataaaggcaatagcggaatcatgcttttgcctat

SEQ ID NO: 11910 - DNA, 1013 bp, Homo sapiens
tttctcatagtgtatgtttgcatattctatgtataaaacctaattcaaaacataagtattggggaaatgtggacctgtaagtgatgaaaattagattagggaatgagttcaggcctatcaagttttctacaattctttctgttggaacatcggacctttgattattctcttttttcccccctttagagattagttcttgctctgtcacccaggctggagagtagtaccgctgtcatagctcactgaagcttcaaactcctgggctcaaacagtcctcccacctcagcctcctgtctttgatcatttttacttacagtttcatgtcttaatctcgatgctttgttgttctggcaggggatgtatggcattgagaatgaagtcttcctgagccttccatgtatcctcaatgcccggggattaaccagcgttatcaaccagaagctaaaggatgatgaggttgctcagctcaagaaaagtgcagataccctgtgggacatccagaaggacctaaaagacctgtgactagtgagctctaggctgtagaaatttaaaaactacaatgtgattaactcgagcctttagttttcatccatgtacatggatcacagtttgctttgatcttcttcaatatgtgaatttgggctcacagaatcaaagcctatgcttggtttaatgcttgcaatctgagctcttgaacaaataaaattaactattgtagtgtgcttctgtttctgggattccttccttaatgattcctgaaagatttcagtcagtctgccaagtcattcttaccacacgtcataaatgtccctaaattccaacatcatctacactcctccctctggatgagacaaaaattcttttttgcaacaggtgccacggtttgttgttgttgtcctgagaatatgattatctttttaaggttataactgaagaagttgtaacggatgtcaatgtatatgacatttacaaaggaagcccgttttaaaaggaagaacccctaaaatggaaac

SEQ ID NO: 11911 - DNA, 1028 bp, Homo sapiens
tccatgttgaaaaatctatccaggattcatcccgtgtcaacaatggtaaaggtaagacaaactaccacaaaatgtaatatgatttctcgcattgtattctacaaaaagattcatttaaagaggctcagaccagataaaatcatagttcaaggttatttctgtctctcaaagttttatgtaaactattctcattttccaacagaagtcttggacagcaagggcagaaaacttagagaatctaagacattcaatagattgttgtcattctttatataattttgcaaattaaatattaactctgaatcttagcacattcttaaagtattgatcatttgaataagtgtaatagagtttcatttaaagttgatgtactaaactctagattgcctttcatatagcacttgataccttagcaaatacagtttaattcaaaagctatggagcaaatgcacaaaacaggtagaaattaatgattttttaaacaaaactaaaattatattaaaatattttgtaagacaactgactcattttccacaagtcagtgtaaatcaagtgtgtcaataattgggtaattactgagtctttgggtacatacataggaatttgtttattctatctacttttgtgtatgtacaaaatttttgaaattaaaagtttaaaaactgacattaaggtatgtttaatataattagttatatagttaaattgaccctgtgaataaattacccacacgaactggtaaagtgttttggaaattgtatttttttttttttttttagcaattcttgggtattccaagcatcttgccttttaatggtctctaactattacccaggacctcataagttggctaccacctgaaatttcttcctaactaaaagtctttaagcaacttaaaatttcatagaaagtaatccattaagaaccacaattaaaagcaatttaatttgaagactcatatatcaaaatttattaaagtgtatttaaatagagcagtgttcaataaaatacgtatataataaaattaa

SEQ ID NO: 11912 - DNA, 1035 bp, Homo sapiens
cacagtacacttcccaaaatcaggaaatgtaaccctgaaacaatattatctaatccagagtccattattcacaagttatcaactgtctcaatagtgtcctctaaagcttttttcctaattcagaatccattctaggctcacacattacatctactatatatccttagcctccttcattctggaacagtttctcagtctatctctgtttctcatgatcttgacatttttgaaaagtcaggtgagttattttgtggaatgcccatcattttagacttgtctgattgtttctttatcattaggttgagctatgaacttttggtgcaaataccacagaaatgaccctatagttttctcatggcatcacatccaaaggcatgtaatgtcagtgtggccaacaattggtgacactaactgtgataactcagttaaggttgtattttgccaggttactctgtgtgaagttactgcttttcctttgtaatttatgagtaatttgtgggaagatgttttgatgctgactaggaaaatgtctgactcctcatcaatttttctctgctaaatttagcatctattaatgatttgtggttgaataaattaccatgatagttgtcaaacatgatctactaattccatcatttattctgtattagttgcattccactgtaagacagaaatttttcatcttccctctttatttatttgttgatatcaatgtggcctcggatttttatctcatgcccaaaatattgtgtcactatcatttgtaatgctcaagttgtcccaggcttttcaaactgactcttacgtctttttttttttaacatgtcccatcatttttgagcactgtcttgcacaataaattgcaccagcctcattttgaactttccccttcccagcactagaatcagctgtttccctaatgagccctgtttccttttagtgaggaatggtagttagaaaccaggatcagggcataggtgtgcttgtgctactggtatatctttgcttctaggccctttgagtagacagagctat

SEQ ID NO: 11913 - DNA, 1050 bp, Homo sapiens
aaacttgcagcgctaaaaagcaaataagcttcctaaaaatattgagtattagaaatccaagttttagtttccagacaaaaccaaacacttcactgccttccttcccttcctaaattttaactttttaagataaaagtaacttaaaattggtttttgtttttgtttttttttttttttttttttgatgtctacctattggagtcactgtttacacttcattttattcctgacaattcattgaattcatagccaaaaacatactttcgggtcatctttattttctgaggcagtttgatgtttggattattgcagtgtagctcaagggagaaaaaagaagccacaggaacattaaacttcaagcccttacaatacagaaaacttaattcacatatatgttctagaagcttatgtatggttaggcttttagagcatgtcatataggttatgttataatgaagagttgcatttaaagtacctgtttttgcttttctttttaaagattattctgtgactgccaattctaagattgtagtggtaactgcaggagtccgtcagcaagaaggggagagtcggctcaatctggtgcagagaaatgttaatgtcttcaaattcattattcctcagatcgtcaagtacagtcctgattgcatcataattgtggtttccaacccaggtattattgtatactttaagtctctgttctgttaagttcagtgttttggtgtttctgttgttattgttttggactaaaatcagtcccagtattcatttacagaagcagtttacatgtcttctttcattggccctaaatagtggtgtttgcaaaacaaatgcctctgtcccaggccagatgttcaaaaaatgtgacaagagttttagctaaagcaatttcatgtttttgcttcatctggcttggttatagattctgaaggcttttaaaacttttttataaagattatcctgggatggagaatgaagcattcgaacatagtttcaatttgtaagaaacattttgacatatttgaccttttattttctggaaaatcccat

SEQ ID NO: 11914 - DNA, 1050 bp, Homo sapiens
atcagaacaacgaatctgtatttatatagccactgtttcttcattttcattttccactgcttcctgggccccctgtataccaaaacggtcgtaaacagaccatctaacaacaataaacttaagtgcagaacaactattcatgtgtgtcgtccttcaaaaagagatgcagcattctttcttctgagcctgtttaaaatgcaggccatgtctgaatttatttcattttaaggtcatctatttgtggaggcacttgcacaacattgcatcttctctctttaacgtccactaggaaactgtaaatgtgatctgtaaaggcgaaagaatctccttttaatttatccttacagatgggaggaaatattttttggaaaaaaaactataagataaaatagttgttacacagttgtctccaaattcagatgctttattccaactttgagtcctgctaactcttactttacgtatacagttaatagactagacttattgcttagtccattgcagattagaattaaaaactagactgggaagctctggtacagtttgagacaggtatggtgacctcagatgcgacataaaaagtaaaaaacaagtgaaaatcatggacattacaatgggctactacaattataagtaataattgtgaagaaaaggcttatttgccatctgtattctctgttcaagaagacagggtggtatatatttagtgtactataaattgccatggaattgatgtttatttcgataagttttgctctttttttcagttatctagaaaacacatctggttatctgatggcacaagtacatttggtgttactgtacagatcgttcattttccaacaggtttcggttttgtttttttttttacattttaggggtctttagtttggatggttagacagaaactgtttcagagactgatagtctcctaatgtgatcccctgaaacgacaatgtattaagtgtctatctactttccaagaagcttcttaggtgccctaaaaggaattcaggttgatatttttgcagactttgaataaaaattatt

SEQ ID NO: 11915 - DNA, 1033 bp, Homo sapiens
aaaaaagaaatggtaacagcaaaccttaaaaatcttcattctctcccaatgagaatgtaaaaggtgactaataataattctaattctttgcatttttccctttgtgaattcaatgtccaaccatatcactaaaattggaaacaacatttttcattgaatattcaccagtatttccaaataatgtttgaccattcttctcttagggtgactcattttctcctccatgtattttctcctgcaaggagtctctttgactccatttaatatgagtcaaaaaatagaccaatatatttcctctttctcgatattatccagcctacctctttctgtaacagaacaaagaaacagctaaacacttttatctcttgagattgtttagcatagcaagtgtcagtaaaaagctgggtcttgtaccatatgtaatatttagaattcataaacaatatacaaaatgtggctcatgaatagtctcttaaaccattaaaacaaactatttgggatatttatcattagactgctctctgaggtatggatacattatcagaaatcagtgttgtatccataccccttctctggggtccatttttattcttgccatgttttggggctataccagatatctttttgtgggtagttagtgcaataggcaattactgtagttttccatgaatcattttagcaacaaaagagaaaggcaactttcgcacttcacttaaaagctaatcaaaagaataatccatgtattcttgcttatccctcataattttctaccaaagtgcactgtacataccaagtactcaaatgtttaaacatttttctcacctgctgtctgtagcattaataaataggtaatactttgagagattgctaatgtgtaggcttgtcttctataaagttagagaagtttgaaattgtggttgggggcaaagatagaactaatattgtttctatgaagaagccacagcagtacttgttgtgaaattaagtgttataaattgatagtaacaaatgtggtgcttcccatatgggagta

SEQ ID NO: 11916 - DNA, 1025 bp, Homo sapiens
ttatatgttatcttatgccatgtgttttggtaaattttgaggtaaatatatttgagtgaaagagcttaccgtacattaaaagggggaaaaaactacatttcacaggaaataatataggatgtgaaaccagccagatctggttctgaatcctagaagtgccattttaatagctatgagaccttgggcaagttacttaacttctctaaccttccatttcctcatgcatgaaatggggatgatgatgataacctgtgtttttgggtggttgtaaggattagatatatatatatatgtctggcttatggcagttatttaataagtggtagctattatttttttactttataaacaaccaacttttagctagcagaggtcgttaagcttttaaaattatgagttggttttcaaaaaggtttggaaaaaaccagtatcttacaactagataacataaggtttatctacaagttgacaatgatgaagtcgtctgaaaaagatggaaaaattgcactgggaaatagaacaactttcacactctccttgtaataatttgttcctacagcagataattttaatgctcagccgctttttctttttcttcactttataaccaatcattgtgtgtgtagctatactgcatcaacattttcttttgcaggaatgccatttttcttccaaaagaattccattccagcatttcctctcatgtttttctgtctctcttttttaattgcatgcagtgcatgataatttcttttctttcatgacatggcttagcctcacagacagctgaatgttgtcaccacttatttggaaacctcagggaataattgtgttaccagcgtctgttctgaatgttttctcatttttctccaattttagccatgacagttgaaaaagcaagtccagtgggtgatggaaatttccggaatcgttctgctccaccttgtgcaaattccacagttggggttgttaagatgacacctctttcttttattcctggagcaaaaataactaagtatcttggg

SEQ ID NO: 11917 - DNA, 1056 bp, Homo sapiens
actgaatgtttagatatatcatttgtctaccccagtcatgaagttagattttatacttataaagcataactaatcaatgcattatcaattgatggaaattcctaaagaaacataaaacccagttttgatcataataaaactgagaatgtttaaataggaaaataaaacataaattataatgactcccaactgcatatattttaatctgccagagaatcatttccaaatttgtaggaagttttttagttttagtaattcttaaaagacattcagataagattttctcaaatattttttaattatttagagcaaagatgatctgcaaattctaatgatataaagtgaatagatagtcaaaagaggtactgatcagtgtagaaatttattcctgtatttatcttagtttgtttggtactactgtgacaaaacacttgagaccgtgtaatttataaagaacaggcatttattgactcagttctggaggttggaagtcccatatcaaggaaccagcatctggcaggggccttcttgctgtgttatcacagggcagaagggcaaaaagagagcaagaggagatcaaatctccctttttataatggcaccaatcccacccataagggtggagacctggcctaatcaggccttaaatgtcctacttttttttttttttgagacaagagtctccctctgttgccaaggctggaatgcagaggcacgatcttgggtcactgcaacctttgcctcccaggttcaagtgattctccagcctcagcctcccaagtagctggggttgcaggcgcctgccaccatgcctggctaatttttttttgtatttttagtagagacggggtttcaccatattggtcaggctggtctcgaactcctgacctcaagtgatccgcctgccttggcctcccaaagtgctgagattacaggtgtgagccaccgcacctggcctttttttttctctctctctttgagacagggtcttactctgtcccccaggctggagtgcagtgctgcgatcttggctcactgcagcctttagctcctggg

SEQ ID NO: 11918 - DNA, 1071 bp, Homo sapiens
acctgtgataatttattaggatggtttaaagtctcctgcaggtatagttttagaagaaaaaaaatgaagggtgttatagttagaacttcatataataattgaaaaatgtcatttaacacaaaaatcaatgaaatattatcatatattttgattacaatttattttgacaggcttttatagttgtaatacagaaattatgcccggtataaataattggacctctgaaatacaggtaaacctttttttcttaattttaagcacataacacataagttattttagtaagttccatttaaatatttgtctttttttttttacctccttattgcaattaaaataccatccttattctactacattagttagtattgttcattatttggcaatttatcaactgttaaaatatttagttaaaaataataaaatgacatgttatgtcaccccacatttagatgttcacttcagtaagagtaatcagattaagcagcctcaacctgactaatcaagctctcaataagaactttaatgatctctgtgaaaatttgctcaaggtaggaaccttctgactaaattttatttcatgcgtctataataatgaaattttaagtgtctatattgctgtattgtctgtaataccttacacagttgtgggctgaatcattcttacctacttaccttacctctatcagcgggtgagatactaaagttgtcctctcccccttactatatcaaattataaaagaaatagttttagttaatagctttaacttccataaaaatctagtgtatatgtgtatatttaaaaaaacttactatattattttttgtgacttattgacgattaaatcttattgtctacttaaatattaaaaagtatatcgttagtgtaaaaatacacaaaacaaaagtggaccagttttgttttatttttaactctccatttgctataatataatgtacattaaaaaaatcagcttttaaaaatttttaaataaaaaagtgacattactaatattttctattgtgtagagcctgtactttaaactacgatctatgatcccctgctgcctt

SEQ ID NO: 11919 - DNA, 1096 bp, Homo sapiens
gctgtgtctcagcttaatgttcattttggcttgttagcaaataaattctgactggaaagatgttaatgaggaaagccagtgctgcttctataagtagtgtaggactcagagaaccaggtgcctgcaaaaagtgtattgatcatatggaatctgatgaaccacgtttatggaaattctctcattttctaggtactttgctaaccagcattttggctgtgttattggcagttttcaaatttgaattctcttgccatctttttgagagtgcatagacatttaattttaagaaatttatagaattggacttttttgtctctatacatttgtaggtcagatgcacatttgtttcctgtttcatctttctttaagagcaaaaatgtaaagttttgtatgtagaggataattgtatgatgatgataaactaattaggtattacagttttctaacgacagaaatttgtaataattaggtaacttggttcatattaaaatatttgatacataggccgggcatggtgactcatgcctgtaatcccagcactttgagaggctgaggtgggcagatcgttcaagcccaggagtctgagaccagtctgggcaacagggcgaaaccccatctctactaaaaatacaaaaattacccaggcgtggctgcttgtgcctgtagtcccagcaacttgggaggctgagatgggagaatcagctgagcctgggagcttgaggctgcagtgagccgtgattgtgccactgcactccagcctggctgacagagcgagagaccctgtctttaaaaaaaaaaaaaaaatttcttttatacttagagtaacttggggaaaagtggttattttaattcagtggtctaaaaatttgtatgcctagtgaggacattacataaatgtataatttgtgcttgatgcaagactgtaatgattggtgggtgcctatgcatgtcaattaagagctggattcaaattgaggggtttaaaaaacattttgctagctataacaaacgtttttgatggttgagccccaggaaactagtttatgacactgatgtaattcaagacttgcctcaaatattgcttttctgattcata

SEQ ID NO: 11920 - DNA, 1047 bp, Homo sapiens
agcagtttttaactttaaattctacacaaatatttgtcattttgggaattattaacctgccaaaggctagggatgtgactaagtatagattgcttcaattacattcaatatgtaacacattttagaagttgactctctttttttcttttaaagaacagtgccatgaagtgtttcttttactgctttaattagctggtaagagttccttttaaaatgcactggagtaggaaatcctaattggggaactcatgacaacagctgccaggttaccaaatccatcaggtacttctgtcctcatcttagttctgacatctcagcaatagtgacaccattaattattttcgccttgaaattcctttgacttcatgatgctacaccttctatgttttcctacctttatgtataatcttcatcctccttgatgacttctcatttcttgatccttgagagccatgggtttggaccctctgcccaaagctctctccttagttgaactcatcaacttatatagatctatgtgtctgtgactcccagatttgtaactctagtccggaactttcttttgagctttagacttatacctgtctacttcataccccattttgataagccataggcatctcatacgcgttccacattgaactgctgattttcttcacttttcttattagccttttctgttttaatgaatggtacctttctctatccagttcttcatgccaaatttggtattctttggcactgtcctctttctcaacctccccacatcaaatttattacaaagtccgttgatttttcttctaaaatgtatttctaatccatttatttttttccctcttgaatcttagaccttccatttgggattgttttccttttgccttaaatgtacgctttagtatttcttttgatggtctgctggtggtgagctattttttttgtctgtctgaaaaatgtgtttattttacttttatcttaaaaaatattttgggctggcagctatttctttacagcacattgaagtactctttcaccactgtcttctggctt

SEQ ID NO: 11921 - DNA, 1119 bp, Homo sapiens
acaggttatacctgtggttgaaaaaatgcaatgtgctagtcctcagcagttgtatttatttgaagtcatgactgatagctaatgccttgtcttggcttataagaagttggtttaaaatgaattcattagttttcccttatgtagaaatactggttctgctaatgctctggcactgatatggggaaaggaaactggattaggattaaagcttcacctctagactttcctgaacaaactagagtgcagatcagtcaggaaccaacgatacgagagcagtgtagtagctgggaatgagtgaccacagtgaacgggctgaagtagagctgtcccttaagcaaaagcttcagagtgtgctttgcagtgttttttttttttttttttccattcaagcctggttttaaaaagacaggataagtagcaggtcaaaactagggatcctaagtacaggattctcactttattaagtaacccatcccatagagaaatttgaatataagatgtgtattaggaaaaccaggacttaacaggacttaagtataataactttggttattttagaaatgttttgatagctatctgcatttgactcgtataatgcttagttgcaaagtacttgttttcttcattaaatttttaaaatgaatcaaaaaaaaatttggagaatgtaggagagtagaaggaagagaagattccttatgatctcactattcagggataatccctgtgtacatttcatattttaaatgctttcataaattttaatacttttatttttatgccttatgtataccactaatattgaaatttgtgtgagctgtttagttaaaaattgcttcagttttcatccttttgtaccctcttataacacattggctttggattcaaacaaactgaaattcaaacatgaggcctgctacttagtgcttagtatgactttatgaaatagatgttttggtttttcaaaaaagttaaaactatcataggaaattagaaatcttagagtatgcctgtttttgacttactatttttcttttttaatacttttttacattaaattaaaaaattattacacttggattttttttaattttggggggtacctagtagctgtatatattt

SEQ ID NO: 11922 - DNA, 1076 bp, Homo sapiens
agatgcttcatttatagtgctccattacaagcaatattggacttctctggtaataaaatagaattctgtgactctaaatcattttttaaaattacagaccaatacatggagtgttatatctgaaatttttccttatatacattaccaaattatttgtgttaatattttaagtgtgcttgctttctttctttttttttttaaattagtctctaatttcttgtattttgcctaaagacccacatctctgtagaaggatggcttacagatggctttctctcttttaacattgacaaatctttgccttggaaagaacccacaatatagtgagttataaaaataggtaccaagaaatgaaatcagaattaaagttaaatttatggatataacacataaggtgttcactcagtgaggtgagatgtagaatatcctcttagtctaattctaaaattctaatcatagctaagattagaatttggaaactctgggtctacatttaaaattatatctaatcatatattcctatagatatctgttaaagtaataaagcaaatacagataggtggtttgttttccagcaattgagtttaaaaggttaaatcttatgccttttgagaagtagcattttaaagatgggaagtttaaaaatccattatagaataaaacttctttacttcccatagtatgtttattttaaacatttcatgttcatatatataatgtgctattgagtaataaactgatttaaaatttatttttcagatgaaccagaaactcgagatgcatggtgggcagaaatcagacaagaaataaaatcacatgctaaagcattaggctgtcatgctgtagtgggctacagtgaatcaactagcatctggtaaatgataataacaacttgattttccagacactaatttagactgccatctgaaaggggaaaagcttcatgcaaataaaagaaaagagaatagcgaagtgttcaggagcatgggccttggagtacattagattaaggtttatatgccgtctttgccagttagtgactgtgtaactttgagaaagttatttaactcttctga

SEQ ID NO: 11923 - DNA, 1046 bp, Homo sapiens
gacagatcatgcaagcttatatcagaatttattttgtgccacgcaatttgctaggtctagggtggaaagattgccagtccccctgccttcatgaagctcatattcttggaggatagacagacattaaataatttactgtgtggtatggtgtgatacaagataaagagttaaagaagaaggcttgattaactctgtatgagagaaacttatagaagtggtaattcttgagctcagatttgaaggatagatgggagaatcacatagatttgtattttggtgtttttggacccatgtttatgcatactttgagtgtggttctcaaacttctagcatttacaaaacaatgtcctagccagtactcatttgatgatgtttacatagttacttcatgcttactacgttgcttgccacagagtacaaaatatcttggttagtttagctttttttttttttctgtctccttttctcctgctttgctgccttagtttgtgttaactacagcgttagaattttttgttttggagatggaatcttgctctgtcacccaggctggagttcagtggcgtgatctcagctcactgcaacctccgcctcccaggttcaagtgattttcatgcctcagcctcccaagtagctgggattacaggcacgtgccaccatgcctggctaattatttttttgtagagatggggtttcaccatgttggccaggctgatctcgaacttctgacctcaagggatccatctgcctcagcctcccaaagtgtggggattacgggcgtgagccactgcacccagacctagaaatgtttttatagagcaggaagaagggaactcaatattagaatttatttttaaaatgttacctttacttatcatgctgcttatgtttctggcttggtaacagactttgagaaatgccaggcaggtgagtgttgctgctaggaagcagattgcagcatttacaaatcttatgtgtgacattctaggattggaagtgcataagaattagggtagcccatgggcacatttgcattagatcattga

SEQ ID NO: 11924 - DNA, 1035 bp, Homo sapiens
agtttctgttttagatgctttactttctttcccttcataccaactccattcacattggacctgtgtcatcatgttgctaaaccatatgattacattagtaaattattctgtttgaatcagtttaagtctcattttggtgatattcttttattatctttttttctgtctgttgcattaattattaaatttttctgctctattttctgatatttcaattatcactacaaatttacattttattttctggcttttaatatgcttcgtataaagatcttagtttcatttctatgtttagtattgtatagtctctaaaaataatgttcagattactataagaaaaaccatttttttgtttttaggaacagaatgggactatacatatgctaacctttgtttccttatccaagaacagctaaaaatgtaaaagttaattagttcctttttaagtcgttgtggtaaatttggctgtatgcatcttacgttttgaaagggatgggattaactctagtctgtagagcactggcttcttacctgtcccctgctttctatgattgtttgaccatagttgatctactggcatggtcagaacaataaaataaggtagggaaagaaatttaaaattaagccgtaaaaaatacatgtaagagcttgggaaagataattctttcattcataactatgtacatttgtgatgtgtctattacatgtctgtggttttttgtttacttaaaaaaagtttatgttgatttttgtgaatgagcgttgacatgtatgaaattaatactgttttgtcatgatatgtttagaaatgggaagttataagaaaatagatttgactatatttcagactcacctgaattttatgttttctagagaattttggaatattttcagtgagcacaagtagtgcttttgtctctatatttacatttaatcagacattttatatttctcatttgttagtattcttaaattgttagcatagtaattgttattatcttgattattttaattaaaagactcagcttttaaaat

SEQ ID NO: 11925 - DNA, 1066 bp, Homo sapiens
ttctcttctgttaaatgtatacataacaatagtagtggagagaatgccattggatgacagatgatttggaatggattgggattcaaaatgatcattttattttaacatttcattatggaaaatttcaagcatgcacaaagatagattagtatattgaacctcacccacctttaacagctgtctacgttctactgttcttgttttgcctttttaactcctgcccaccccggttttccttgtggggatattttaaggcaaatttgagatgttatatgatttcatctgtgaattccaaattatatacctcttataaaggaggaccccttataaataaacaaaaccttagatcacattatcacactaatgatatcaataattccttaatattctttaatttttaaaataatcttcagaggctggattattagcttaacatcaacaataaattaaataggggatagggaaaggcataaatgtttcatatccaagtttaaaaaaccaaccagagtataagggttgcagagctatcacttgaccaaagcatatgtaagaatgatacagagattttagccaaccacagactcagtcttaatagtatggtatgtctgatgtaaagaagaacatccatggactgcattttaaaagtataattttctaattatagaaaataataatcctttggtattctgtcccaatcttaatagtgtctataatatgttcccttctggccactatatttgatgaaggggactggtaaattagataatggcatgatatccagaaggtggcagccaaaatagtgagtacgtcttccatgaggaaatcattttgcactgttctccattgtaaatgcctctgtttggcacagtgtttggcatatgataacaactcgataatgactaaataaaaggagagagggtagatgtttatatcatgaacttaatttgtgaacttaggttgttttttcttacacataatgttaattttgcttatggttctgttctctgaaatcgcccttagaaattgtggtgtcattgtgctcaattagcattcttctctctataga

SEQ ID NO: 11926 - DNA, 1029 bp, Homo sapiens
tggtgaagtgctttacatgtgttaacctcattcaattctcacaatgccgtgaaggcaccttttattttaagatgactcagaagtccaacccagagctagctaagtggtagagtgaggtttcaaaccgaagactgcctgactccaaagctattaccagaccaccacacctccatcttacattctcccattctacccaccacccccccttcccaagttaaacatctttgtcatttattgttccctgtgccagcaatgttttccctgctttttttgttcttcttcactgctatgtcctcaacgcccagaagagcgtgtaatagactctcggtaaatatttaccacacatattgcccatttctctgataccacttccttcacccctcagctggaactgaaattttcttctttggaattttcattggactacttaagaaccttgtgaggaccaatttggtttttcttcccctgctatttcatgctggcccttatattgggcagcattgtggctgctgtgccttttctgaggcctatttcataaccattatggagcctgggtaaagtttagctcttgcagggtaaggtgtcattcttcagtgaaagagaacaagggaaggaaagtattgatttgcttgaaagatgctttgatcatgctggggaacctgccaaactgatacctgaagatggaagaaatgacactacgatttttaggcgctgctttgcttatggtttatattaggaccgtgatctttcttttagtgttggaaggcacattctgtagtggttgggatactgcatagctgccctctattggaaaagcttaaaggtctggattaagagaaaacaaattctatttctggtgcctgctaatttgcagatgacctcagacagccttaccatttggagcctctgttttttttcaaacatgaattctttccagagtagtattgaggtggctatgaagcatgttgctgtatgttaatatgagttgcactagtcaaaaaaaagagaataatatatgtaaactttttt

SEQ ID NO: 11927 - DNA, 1059 bp, Homo sapiens
tacggtgtgaaaggagaggagccacatatcaaagaagagatacaggccgaggacatcaatggagaaatttatgatgagtacgacgaggaagaggatgatccagatgtagattatgggagtgacagtgaaaaccatattgcaggacaagccaactgataagggtcaaaagattgttgtgaccttaggacttaaagaagccctaactggttcatccttaccagtggccaagcacattaactttctcatacactgactgttactttaactgttagtcttaaatagttgggacatcagctgactaatagacctcagcctcaaaaggcttggaaagaaaaaacaaatacaacaagcaaacaacaatatcaacaacaagagattgaaataagctatgggtaaaataatgccagtaattcagctgctacatccaagcactgaagtcttacccgtcaacttttttttttttttaaataaactttatggctgtttgttctacaatgttctagaaattctcactcaggtacacagtgccaacaagtggcttgtgaatgtgttttgttgttttgtgctacaatttttaaaaagaaaaaagttttgttttgttttttggggtttctgggttttttccttttctttttctttcctttcattttttttctttgtaatgcacctgacagaaaaaaaagaaaaatgaatttctctttacttctctccaccttctccatctctctactttaaagatggaagtctgtgcatgaggggaaagagggaaaaagagcctgtttttaacttccttgctatccaccacaaaataagcaattattttctttagaggactttatctattgcacaccacactacatctttgagcaagtgccaaatttgtactgaagtgttgaccaagttcattttttctctttactttttccttttccttcttaagttaggacagtgttaaatcttagacaatcccttgaaaaacctgaaataccagcagctggtgagatttgacttttttttttaatggaaactgtaggtgctgttctcaggtgaaaagagaga

SEQ ID NO: 11928 - DNA, 1039 bp, Homo sapiens
ttcgttccttgttacaatatttatatctgtaaaatgagaataacatctccagtcaattcccatttttccatggaggtaatgcaaatgaattgtttctatgtgctgcctctaactattctaaataaatttcttacaaagtctaaaataaattatttttacataggtgcttttaatgtaatatgcaacttttttataaatcatataaaaatattttcttgtatagccattcaaagcttatttatttcctaggtaatagatacatgtccttgatacactaggatacatgtcccttattccacctacatgttgtctacagcaaaattatttcttgaattgagaaaatttttatttgaccaaacagttttatttcaaacttgaatatgaaagtgaattatttttatagacccatagtatcctggaatctttatttattcagcaaatatttattctttgtaagctattgagctaagcattataagaaatgcaaagatgaatcagtcaaggatccttggtggatgatagaggaggttgaaatgaaagagaatgaatgaaatatgaaagtggaatagagtttgaagaaaggcaaacaacctatcattctaacaagtgtatttgaaatgaaaaagacctcacagatggttgaaaacgttgtttcaaactattcaccggactccaagtatgttcaagcaccctccagatagtaccattgacttttatttgttttatatattaagttccactggttaaaattgtttgagttaaagatttctgctgctaagcaaaacttaaaaaccattcttctattccagctccttaattttatggatgaggcaatttagactctaaatagtgacctggctaaaacagatattaacaaaagggtgcccggaatcctagcaactgaaaattaaatctaccttcttcccattttgccatgatattcttaaaaataaatgcatatatttgtatatgttatttttaagttgtttcgtttaaaaggataggaagagaaattgttaattttgcacttaggccatta

SEQ ID NO: 11929 - DNA, 1027 bp, Homo sapiens
ttaaaaaatattgaagccaatccatggacattcttgagttactttcatactaaagagtatcaaataacaatattcatgcaactaacaaaaactctcaaaaccatgtatgctataactttacccactctgagatttttaatggcttctgatgcttaggtataatgtcttcccccatttctccttctctctctgatcaaatccctagaattttatattttatctaaaattgcaaagaggtacctttttgctaagctttttactgccctattgagaaccgtttggaattgatgttctcctattgcccgtctcctccatgtagctgcattagcagccatttgttttcagtcttttccttttcctttctctcactttggttgctttcattttgaaacttgatcagagaaaatggaaaggaaatatgaaataacaaaacttttcaaattaaaactcaatttgttgttttataaggtttttgatgcaggataataaacagtgaaataataataggaaaacagacacaaaggggctttagaaaaatcaaaatcatctgcatttttagaggtaaagatgagagattaaacatggtttataaaaacattgtattttgcaatcatcctagttcaacttaggttaacctactgtggtctaattctgccaagtccctgaaattatgaaccttaagatgttgattccatttttccaatctctctttctgtatgcaaagattaagataggaagtgtggtccttatctttaagagttttgcagcctcaaaatgaaatggaaatgtcttcatgaaggaataattcttggatatttaaatttattttcactgagaatattttagaaagcacaagcaatgtgtgtataccagaataattacaccattttatttatttttttcatttcatctaactggtgtcttccagtagcattaagaagtgctaatatactaaactttgatgttcttttctatttgaaatatctaccacatacacacatatttatggcttgattttttaaaaaat

SEQ ID NO: 11930 - DNA, 1099 bp, Homo sapiens
agtttaaacaaagctgccggaaaattcagactgggcagagcccaccacagctcggcaaagctactgtagccagactgcctctctagattcctcctctctgagcagggcgtctctgaaagaaaggcagcaggcccagcgaggggcttatatataaaactcctctctccctgggactgagctcctgggggaaggggaggctgtggacgcatcttcagcagacttaaacgttccctgcctacaggctctgaagagagcagtggatctcccggcagactgcctcctaaagtgggtccctgacacctgtgcctcctgacggggagacacgtcccagcaggggtcaacagacacctcatacaggagagatccggctggctctgcccctctgggacgaagctttcagaggaaggagtaagcagcagtctttgctgttctacagcctcagctggtgataaccaggcaaacagggtctggagtggacccccagcaaattccagcagacctgcagaagagaggtctgactgttagaaggaaaactaacaaacagaaagcaatagcatcaacatcaacaaaaaggacaaccatgcaaaaactccatctgaagatcaccaacatcaaagaccacaggtacataaatccacaaagatgaggaaaaaacagctcaaaaaggctgaaaattccaaaaaccagaatggctcttctcctacaaaggatcacaactcctcgccagcaagggaacaaaactggatggagaatgaatttgatgaattgacagaagtaggcttcagaaggtgagtaatagcaaactcctccaaactaaaggagcatgttctaacccaatgcaaggaaactaagaacattgaaaaaaggttagacaaattgctaactagaataaccagtttagagaagaacataaatgacgtgatggagctgaaaaacatagcacaagaacttcgtgaagcatacgcaagtatcaacagctgaatcaaataaacgaaagaaaggctatcagagattgaagatcaacttaatgaaataaagcatgaagacaagattagagaaaaaagaatgaaatggaatgaacatagcctccaagaaatat

SEQ ID NO: 11931 - DNA, 1050 bp, Homo sapiens
tatggggaaattatggagatcggctttcctaagttcaaaatcccaaagcatccattaattgggcaaagggggcacttcgaaattcactcttgttttaaaatcgcatttgatggggtgggaaaaataaaaagtgaacggatcaggggaaaagcctaaagatactttaattggcagaggtttgagttgcttttgtttagttactcactgtccttttgacaaagtacatgttgaagaggctttgtaagtgctgttccactgaaggacaaacaagggtacttttcaattgagcccttttaagttttgttcctcacactcccgctgctgttggaggctactcctaatgcattgtggctatgtgttcatctatgcagtctgtcactgaaaaatgtctctcttcttgttgagcaagctagagtctaacctccaggcacccttttcaaaagcaccactgtatggaaatcgacactcataaaatgatgataaagaaaagagtttattttttaaaggtcaggacaagaagacaccctcaaatgctgtagagcctatttcttcaggaataagtgttttaactttagcactgagttagctgagtttgaagcctcataatttttcaacactgaagcgaaacttgttcactgtcatctccttttcaagtggtatccatcatagcagtttatgctgatattgtttatttcattagtgttataggaaattatattttcctgaaatacctctggcttggattgtaaaggctcagaaattctgcttggtaatctttttatatagcaggtcctggagctgagtaccagtgttgtctttataagaaaatcatttgtcccagaaagcttctatttttctttttaactagagcttgtacttttgctaacaaaatgtaatgatatttaagattatagccttcattttcttcatcttctcttaataatcaagccatcattcttttcttatttggctatttgactcaataaaaaaagaatctatttgattcctgctgatacattagtttgtctactatcaggtctatgtaagtca

SEQ ID NO: 11932 - DNA, 1041 bp, Homo sapiens
agaatagtgcaccatacaaaaggaggccactgaggtgaaatggttacaaagaaaattagatttgcatatgggttgaagaagagacagctctctttcattttagccagcctatttttcaagtgattaattaaaatattttgcaacttataaataggagaataatatattgatatatttggcttgcatctttttttctatcagaagttttccctgtcattacacaaaaagctctgattcttatttgttcttatttatccagtgtcactctaactgaatgggatgctaaagtgcatggtctattcatggttttaaatatctggcctatgtaacatagttacattatattttgtgataattatggtctatcggttggtcttcagcaattaaacctaacagttaagagtgacaatgaaatttaatatgacgttatgtgacacataatttctataattcctctatcaagacattgaatatataattatgtattgaagggaaatgcattaaaatatataaattactatatataaattgttaccatgtattaagtgtatattatgcattaactgcaatattaaataatttatataaaatgcttctttcaatctcgatgaaaaccttataaccagggctcctgtgtatagccattccagtttcagggaataccattcacatgatctcaatatcctcattcctattatctccatttccagatgaggcaactgataattaaatatgttttaaagtgaccaagtcagggtcacttttcagcctaaagtcaaccttagactagaatctatgcccttaaccaatacttattgctattccttccaatgagagattttgccaaataatcatttactattatcatttcacacatgtgtatctaaactttaaatattgaataatatattatctgaaatatttaatagtattgaataatagtagtgatcagtagttttctactaaagtaaatttcttatgcctcaatagagatcaattttccagaaaacttttaatgggagattaactcagtttttactg

SEQ ID NO: 11933 - DNA, 1032 bp, Homo sapiens
ctagataacagagataaaactgctgtaactgccacgtggtagcaataaggaaggtgttgtgtaggccatactaaaggttttagattttattctatgtgagaaattgaagactctgaaggattttaagcatggcaaatggcgtgatcagatttttgtctgacgaacattggtctcggtacagtgtgggaaaaaaaatggattgaagagggcaagagtggatagagtcagactaattaagagaaaattatattttagcagcagatggtgatgctttggacttttacagtgacaatgacagtagagacaattacatgattcgagatatgcttaggaaatagaactagaaagacttggagaatcaatagatttgggatggtgagggaggggaaagtatcaagaataaatgacttgtaggtttttggcccaaacaattaggtggatgttgactccatttatcatgatagaatatttggggtcaaaggtagagaggtgatgagtttaatttggggacgtgttgagtttgatatgcctgtaagacatccacgaagacatataaaatttagaagaggtgtctgaaatagaaatagtcttggcaaatagacaaaactaacagataaaattgcctagtgggagagggaaaagtgagaaatctcagaccaagcatctcgaagattcaaaggttgagcgtagaagaaacaatactcaaagaaatcaatgaaggggcagacagagaggtaggataaaaagcaggggtcctgctgcaatggaagtaaagagaagggaatgctgaataaaggagagtatcttggtctgttttgtgctgctgtaacagaatatccaagactggataatgtataatgaaaagaaatttattggcttatggttctgaaggctgagaaggccaagattgaggggccagcatctggcgagggccttcttcctgtgtcatctcagggtagatggaagaatggggtggggagtaggggcggatttgtcctttgataagaaacccactcccgtgataacaaaccc

SEQ ID NO: 11934 - DNA, 1050 bp, Homo sapiens
acacctcacaaatcattgtcacttaaagtgctaaaaaacatttctacagttagtttacttctccaggaaaactttgtctatttttttttaaggccctaagtctggagtttcatttgacaatgcaaaatattattttctgattatgcaagcaacctagtccctgagatatttctgaattgctgagcttaattttcaactttttttttttttcccaaattcctgctaagtttctgggggctatgctaactccttggactatataaaaataagttcctgtatttgaggctccaactctgggtgacaggacaaggtattccacattagactatttcagggcacttttagggtccttgaagtccagcccttctgcatcttttttgccttatgtatatagtggtgatagtaatacctatttatcttggatataaactaggaactaatgtgtgtgtgtgtatatatatatatatatatatatatatatatatatatatatatacacacacacacacacacacacacatacgactttgacctttctaaaaataaagataccttaagagttgttttgctgaggagatgagtacatcagctataggagatcttaaaaatgaataacttccattctgcagctgggcagtggcatttaacttgagtcagaccatatgcaaatgaaggcttctataacatcacaagttttctaagataatctcttttatttatcatcacagtatatactatagagctaattacttccaaatataacatgatataggtgtttctttcctaaaattctttttttcccaaaaatgctttacattgctctttattccatattaaaaccaaaggtttcagatttcttttggctcagggttccaaatttttgtgaacaatgttatcagtatttccaactatgctgtgtatactggcctcgaatctctaattctttttctaggacacattgacgactaaaatccataaattttacagaagcctcatttaatctgctaatttccctttacttattaccctttaagttttttttgttttgtt

SEQ ID NO: 11935 - DNA, 1018 bp, Homo sapiens
agtaaaagggattagttaaaagggtgacgttccgtgcagagagttccaagtattccatgaaacaaaaggctctgaaatgtttttgaagttatttttaattgagttgaactaatttaataaaggtcctacggaggaaaaaaaataaaggaatgtgattgttttatgattcctcacagatggaatggacatttatagcatacttttcctttagtgttccagagaacagtagctccatttacagctactgttagcaatttaaaactgctccaaaatgaagtctttcaagaagttgacagcttataaataaatctgtctgataaaattgaacataaactgcatctgtggttagtttgccaaaattaattctacatttaattagagatagcagtcaaacatatttaataaaaaacagtcttggagagtaaatcaaatgaagtcagattttagcagacgttttgcatttttttgcaaggagtgatgaaatgacctcacctctctgattcccagttatatggcagcgcgagctctgtagagttatggggaagccaatgagttcacactgtttggaaaggttccttgctcagcttaggataaagagagaaaacgatcattttgtgatttctcttgatatcatcattggattttacactgatgccatatgtattaaattcacaagttaataagcgtattactgctaataattacagagagcaggctaaaataattctaactcacataagtgcaagtacatggaatttgtccttaaagtttgttttttgtttacttttttggcaatcttcattgttgttgttgttttttaacttagccattccaatgagatgtattaaaatcatacagtagctacaatgccatttcttccccctaaaagactttttaaaaattcagctttgcttatcaaatatttgtgctcactctgcatggtttaagcaatgtgccatagctgtagaatcctggggaagatgcaaaaacacacagatcaatcagaatgcagcaaaca

SEQ ID NO: 11936 - DNA, 1062 bp, Homo sapiens
gcctcaagtgtaaatcagccagtcatatgtgaggcatgcctaacataatgcctcttatttttaaatgatttctcccaatgttgatggtgagaatagtgctaatgatacaaaaagttttttataaaatgggaaaattctactcaatgttttgttcgctctgaagattaaggaattttagattctttatacaaaacattaatcatccagaggaagtttccccaaactgtactcactgttctaatagttcctgagagaatattcccttcagacaacctaatgcttgtttagtgtctgatgctaataagaaaataccaacttaaatttgaatcataaagtcagaatttttataattgtatgtgaccaaatattaaaaaaaatattcctcattttttacatgaggaaacagacccaaaatagttaagggatacttctaaagatatatcattaatacattttatgactgagatcaaaactctcaaagatttttcagtgcttgtctttccagtctgtagagaattttcacttgcgtaatctcagttactgctggtattaatagaacacatttgtgtaatttaaagttgttctcatattatctgccaaatgtctgtttacagtaactttattttggtattggtatatcctcctgttatgttattcttcttgacacagtaaatgccttgattaaagaataatgtaggtcaattaaattctattttacttgaagcttttttaagtttgaccaagactgtgatgtctgctttcatctacagatgaattttcctgcctacaattgaataattacaattactgatgaatagagatttcctaggctttttttttaaagatgtatgatcatgtcaagtaatctcatctattgttttgatgttatcaagatgtttaatgacctttagtagtttctcgtctatgattgtgtcattgagaactgtctgtgtcaatgaattcaaggcaaataaggccctaagaattttgcatttctatttcattcctttaattaatttatttttaattgacagataataattgtgtatacttatggggtac

SEQ ID NO: 11937 - DNA, 1031 bp, Homo sapiens
cgcctggctgattttttatttttagtagagatggggtttcaccatcttgcccaagctggtctcaaactcctgaccttgtgatccacctacctcagcctctcaaagtgctgggattacaggcgtgagccaccgcgcccggcccatctcatcccttctcaaaaaaaaaaaaaaaaaaaaaaagttagccatttgtaaactgctgatttctttgggtcattgtccccataaacttctgtaaagcatcagtgatttcaccattgttccacccatgcttcgtcataaatttgatatttgttcctgttcggtttcagcaaaattcatttgctctcataggggctcttttcaagctgatgtcttatccttcttagtggcttgaactagattctgttcagacatgtgataacaaattagcatgagtttgttttggtacaaaaaattttaaaatccctgcatagtttttagtaatgcacattttccatgaacttttggaagaatgctcatattcatggatctgtatttattatcagtagtcatcgtaaatatttctgtaacctggagccattttctcttaagttcttgataacttgttataaaataataatgttacaacgtagaatgtctgttttgtaagcatttaaaccccagagtgagaaaggtaatgcaatgagtgaattgggtttagtgtaagaactcagtgatcccaaaatgtgcctagttggtgctgtttttctctggtgccagaccccacggaagggataatgagggagtaaggaccatgggaatctggagatcacctgcatcaaccacaaggactgtaaatttttctcatttattgagtttattgttactcagtcttatttttgttttccaagaaaagtcagaagtctgactgttgaatgtctcagtttttcaacgtttatccaaaaacggtggataaatcaatcaagactaaacaaaacacaaccatgatcagatcaggtccttggatcatccatttcaattctctgccataagaaaaagttacagatata

SEQ ID NO: 11938 - DNA, 1050 bp, Homo sapiens
cccaatatttttgaatactctttattaaatgtgtctcccttgatataagttaggactcccagttgtagtgagataaactagtttgatttcagaacctctctttcactctgcctcttttgtattcttctggttgactctgctccgatttattatctgaggctcaggctgaactcaggcttttgcgatgctggcagccccagctctacattggaatggacggtcaccctccatgtgcaattaaaaaatatccagagaagacctcatttgggtatatgcccatccatccctgcacaattttgttgaggccactgagttcaggcacagtgccaggcatggaccacgtgtactcccaaaagtatgggagaggaacaccccaaagaaaaggggttttgatcagataaggaatggataacacactgggtaataaaattgtagttaatagagtccgtagcattactttaaaaaaattagtaaagggtacattagtcatgacaaaaacaatattcctattgtactgaacttgtttttaacagacgtagactaaagctgttaatatgttgctaatgacaataaggggtttattcaaatgaaaaggtgtttaacattctttcaaaagaaccttcataatggatgtattttcaatattttctctaaattattctttgctttaaattagtatcatccatccaactgattatacccattataatcacaatgtgaagttaagtcatgactgaatgtttgtgtaggttaatagtagtcagatgtccttgtaaatgtgcataattgcgtttaaatccatcagcaaatcccagtgtttctattcacaaagtatatcttgaagctctccatttctatgtgttttccattgccaccttcctagtccaccatcgtttttctcctggactccagcaatagtttcccacctggccactttgcctactctctcttcccaaccccacaaatccatttcctacacaacagcccaaggacgatatcaatcagattatattataatcatatcatgttattcccctgtttaaagccctc

SEQ ID NO: 11939 - DNA, 1030 bp, Homo sapiens
tacagtttttcgtgtgtgtacatctctctggttttaagctgttatgtgcttttaaacttccttagactatactggaacagaactgaagatgcatattattagatgcatattattttagcctgcattaataatttgtgttccatacatttactctatgttttagtttaatttttttctttaagagacacatataaaagacaaataaaaagaaataatggcaagaggagcaacagatatggtggcagatatgggctactctgtaggctctggttcaaacatacctgctctcctttacctgggggaagaggctggaggacagggaagatgaatgacagttgctgagcatgcagggggatcataggaatctatacagtgtgagttcatttagaatgaaaaactggtaaatttctatctgagcccaagaatgtcgtggtttgtttccatgttaattgtcttttctcccattgataagcactttaaatttggatttgtaaggcagcaggatgtatctttgattttgaaaagcaatattttggtatgtcataatttgatggctaggttttgaattcgatatttcattcatgatcatttattgtaatctacagaaagataaaattgtataaaaccaacattaattgtatgccaaccatattacaagaactgcatttgatgaattactttcgaagatacttcatctggttcagaaaacacactgcaccaagtagttatcctattatattcctacagggttaaaagagattttttagaacattttattgttattttatttatacaacaagaaaaatgataaaatgaaattcaaaataatttagttctaagcataaattttgtccattaatctgaaaacctaccctgctagtggcagtaggaaaagcccatgagtcggaagaactgttgttcaattctggctcatacaaactctatcatttccaaactaataagttgcttagcttccctgtctcagttttctgcattgtgaataggaatgattcttaatatatttgactta

SEQ ID NO: 11940 - DNA, 1031 bp, Homo sapiens
ttctccacttcatccctaacacactatttaaagtgctttctaatagcatgtgttgaataaatttggcgtgaagagctgtagccaaatgaatacgatgtgaaatccaatgccataaaggctgcaaaagatctacaaggtgacagtgtataaggcttcatagaaaagagaaagttccatagacaaggcagtatttgagctgggctttaaaggatgcatatgattttgcccagcagagatgttggacagtgggaagattgccaaggatatatttaaagctctggtgtcttatgttcctcttgggcttgagtttggatgcaacacaggggatacaaaaggaaaatagtgactataaaggtaagttgggttcaaataataagaagactttgaatcttatgctaagtggtttgtcctaactccacaggacttggggagtcattaaaactttttgtttgtcttgggaaagtagggtgatgattagggctgtgccttggattaattaattcttatgatgtcactctgaggctgactgatttataaactgtatggctataagaaggaagatagaatactaatgcaatcatgaagtaagagttcaggaaagtcaggcgtgagtggtaacaccagggtgcagatacaagcagaaatctgaagatggaatccatagggtttgatgtcctcctagagtgctaagggatcaatttcaactttgaataatggaaataaaggccttgcaattcacagatataggaaatcacaaaaagcagtttgtttttactgatttattcttttttaaaaatttttgtcagagggcatgaattgttttgagagtctttatatttgagttaccaatactgatatattgaggaagtaagtattccacattggagattctggaacatggcacgagagttgacgatgcagctatatgaatttaaacttgatgctgaaagttgcctccttagtggaagaagggcaatctagactgaggggatagcctgcaagacgagggtgctgaatgccatgtagaattt

SEQ ID NO: 11941 - DNA, 1030 bp, Homo sapiens
tgtgaatatttgagttacacattattttaaaatgatgtcattaagaaaaatctgtacactaataagtgtctcaagttgaaatgttacactgcatattaattggtatggaaaaatagaatggctgtatggaaaacaataggttcaccgtagatattgtttgatagtaacagccacttgataggatcatgtaactttgcagtgaatttcctctagttgccaccaagggaagtgtcctggagtaaatttcagctgtcaatcttgccagtcttgtgatagtattaaaaattagtttgggatagaaaatgaagtgtttttatttctttcttactgatttgaggagggaaaagggtacctcaattcttgcccaaataggaatttgtccaataagacaatgatgtgtaagataaagaattttaatacttgtacatgtttaagaatttaattttgttttctggaaatcttgatattcgacttcaagatacagcatagccaaattgccataaattgcatctttgtacggaaaagtagttgttgttttgggaaatgtggttttacagaatatattgcaacctgacacaatgaattttcagcatcagtattgacaaatgaagaacaggaaacagaggcaagtgaggcgttacaacagacagagtagagaggtcctaatttggagccaaagattagctgcttttgatctaccattaaataactgtaatctggtactaaaatcagggttttaattttgagcatatgatttggctatatcttacaagttaaagaactaaagtgaattttggagatagtttaatattaatacaaccactacttgtagtttttattttttaaaaggaatactcaggcagtaaataggacttcagtgtatgtcacatttaaggatctctttatatagtgccataactttatgtatgtaaaaagatacatacattttgctaaaattagcataaagccttgtatctggagccgtgtattccctctgtggcaatgcagttttattccttatgtcttctgt

SEQ ID NO: 11942 - DNA, 1032 bp, Homo sapiens
tgcagattagctgattttttttcttcttatccatattttattttggaacatgttgatgaagtcacttattttcttaataattatttttaattgagtaatttagacagaattgatagaaggtataggtcaatcataggaaaacatgggtactttctaaatgcctacatggtgatcatttatttttctatgcaattgggaagaaattaaccttttaacaaggtgaagacaagagtagctctcactgagatggaagatggaagtcatgattatgctttattgttacatagattccttactttcttgaaagaaggagtcagcctggagttttaagttgcttcacttgagcataacagtttttcctcttgagcaactcaaaatatcactcaaaaatgggaaagaattccttgtttaccagatatttttgaagaataaatatgttaaataaagacgttacagtgtgtcaccttttgtctctttgcacaaatgaaaaccctgtgaatttagcactgttcgtcatgaatgaataaacttttgaaccagaaaaatgagtcattactgctcctcaagtttaatatacccaagttgtggagaaatatatcatttttcccctaccaattaatgccactgaaatacagctattttgggggatgatcagctttcaaaatagttatacaaaggccattgtgtatctgattatgaagattaacatgttatttagaaaataaactctttccccaaacctctgtttgccaccagttcttgcttcgactgagacgttcatggatttctgatcattctgtgtttgtatagattttgttttgttctcctttctaggttacaacatatgtttacatagtgtcaattttctgtgagtagaaaacagcaggtagttcattctcagaaaagtgatttacagattttcttgctatgcattccttcctttgattttcagttccagttttaattttaacctagctagggaattgattctctccatagtagtatcagtcatcaatagagtttggaggaaaa

SEQ ID NO: 11943 - DNA, 1031 bp, Homo sapiens
ggacagtctgtactgtgttttctcttacatatacatatctttaataaaatttaatttagaaattaggcacaataagagattaacagcagtaacaaataataaaatagaacaattataacaatataccataataaaattatatgaatgtggtctgtctctctctctctctctctcaaaatatcttaaatactggattcagctttcttcttgtgatgatgtgaggtggtacaatgcccacatgatgagatgaagcgagataaatgccgtcagtattgtgacttagtcttaggctactactgaccttctgtattgcagaatctgtgtaaccatcccttgtttccagtaaatggtttgatattactcgtttcaggagatcccttgctgaaatcttcatttaagctcaatactttgaggggcaacacattcccatgagttggaactcatttccgttcatgtcctccacccacaaagttcatagcctttttcgtcttaactaggcacctatcatgcactgtagccataacttttgctgtttcaggtgcaacagtaaaatgagcattaacttcattttccttctttgcaatttcacagataaattagttcttaccgtggaccgtagcagcctctgcataagatttttttctcttaagtcaagaattttcaccttttcactttttaaaggaagcactttaccctttctcttttgcatatccaaattgccagcatcactatgattcttatgctttgggcacattgtgaggtaccataaggcaggagtccccagtccctgggatgcagactggtatcagtccgtgacctattagaaaccgggccatacaacaggaggcgagcagcaggtgagccagcattaccacctgggctccgcctcctatcagagcagccatggcactagactcttgtaggagcgcaaaccctattgtgaactgtgcatgcgagggatctaggttgtgcactccttatgagaatctaactgtgttagtctgttctcatgctgctatgaaaaaaatatc

SEQ ID NO: 11944 - DNA, 1023 bp, Homo sapiens
tagttagatcacagcttctttattagcaagttttaatgactttgttttctccacctcatctaacaaagtacgttacggatattgctcaacaatactacgtgtgtattttatttgacttcatactcagagatggattgagactgtctatgacagtaatattaggacctgaaatttcatcttatttatagagggggcttgaatgttggctgttactgtgtacttccagtttgggctaagagctttaggatgaagcaaagtttaccagcctaactcacaaattggtatgttgatctttctatctttatccattcattctttatcagctgaggggactaatttgggatttaggggaatatagaatttgatgtattttcagggtttttgcttctaatcaggaataatggctttatgtgtataaaaaaaacattaaaatattatgtgcttttattcaaactagatgtcaattatctcagagtttacattcactccacagtggtaccatggctggaaagaggaacaagtcttcttatataaaaatgtggcctattaacaacaaaagatggattaatatactttcttcctatttacagtttatggtctatcctgaagggatttgttgtgttcacctatgttttttaactggcaaagtaagtataactacctttagttcatgaacatcagcagagggatatatctattttactttttaatattaaaaaccacaaagccttttctaaattagcagggggggatttacacagagaactagtgaaaaatgttatgagctttcatcctctgttttggtttgagttgccactttggggcttttacatgtctttccctttcccatctcatctctaggaggcaaacaaagaaatataatttgcattggctatagaaatgcctccgagatcactgctgtaagtgtgctggggatttggagtagaaattctgaaaaggagaaaaagacaagggtaaaagctctgttgacaggagagtttcataggcatgtggggagagcac

SEQ ID NO: 11945 - DNA, 1031 bp, Homo sapiens
cactagaagtagtggtagtgaaagagaaaactacaaacacaagcttcacatttcaaaacactgaatatcagtgtttgtgtgtgtgtaggtgagtgtacacatacttacatgcacacatcatataaacatacataaacacacatacttaggtatatttttgcaaatactaattttccattatttcccagggtacagattccaaattccatcagagggaagctaaaaatttaaacatcctatctagagtagtccctaattaatagacgaccgctcagtaggtaacccctatttgtcagcgaagttttaaacttaggaaattttagattagttgttaaaaattttgtttattttgctaaataaagccaataaacatggaagccaattcaaagagaagtcttcaatttcagtggagtgaatgaggagagaaaggtttgtgtttctggtcatgtaaggaaaagatagctcaagagtatagatgtcagtgttccaaaataaaaaattacgtctgaccaggattggaagcttcagatcaaaagggcaattttagaaaattgtggcgagtgaatgagagcactagtttattgaagaaatcaatttgctatcttaaccaatggcaccagtgctctccctataatctctgaaaatagataggcattttgccgttcaccaatccgtagatcgcatctgcttccttacacctggcaagctcacccccttttcaaataagatagtatcacgggagctttgtgggtttatgaagccacaggtttattagttagataaaatctgtaagcgtttagaaatttaaaactgggctgtcaaactgtatttcagttataatggcaatttccaaagtaaatacaacatagtaacttttaggtcttgtcattctgtttccttgatagtgtgtgatttgtgagcatccaaggcaggtcttcctgtctttgctttcgaacttagctgtacgtagagagtagcaattgaaattctgaaacttagactctgtaattaataaaataccttcaattgcc

SEQ ID NO: 11946 - DNA, 1048 bp, Homo sapiens
ttaggatgaagaccctctacacctcgctgtcagaaggcttttgttgaaattctgtctggctctaaaatccatccttgacctctttgacactctgcctggcatcttaggaaggttccattaacagttaataaggtgaaactcaggaacatacttttttaaaaataaacatactcaaacaaaaatttctgctttttttccccttgtagccatttattcagcaaatagtatttttggagagagagatgcagccatttggtaaacagtaacaatctagatacatcttattaattttccttcatgattgattcaactgtaaaattatatgagaaaccatagcctagctgtagattgtacagtgacctataactttcattttatacatttgtaaatataccttgcagcctcatcattcagtgtctttgttggaggactgtgttataagtgagatcattttctaacaaattcctcctgtacaaagtctaggacagctctgtgtcataacagattccatgcttagtggcgcttgtagaaaccacaaatagtggggagatgagcttttgttcttgggaagaagccagtagaacttgtatattcataaagagcaaggtgtaagtaataaattcaggctgtgttcttaaaccaagttatgttttagaagtttgatttcaagcaagcttagctgacaccaatgcattctttgggtgctcttttattctcattaatacgctgaaatcttggattggaaaacacggtataaacgaatggtggaattcagactagagcccattgagggtgtggtttattgtttcttttccaactcttaaataattctgaacattttaaccagccaaatagaaaaatccctctaggcttttttgtatagttgttttgtttctcttctgctactcccagtaacattacataagttacctggaaattgcgaagttagggtaagctgagccagacagtcaaaatacctggaattttcacttccttagacctaagagtgaagttggataatttggggatgctaaggaagaatttgggg

SEQ ID NO: 11947 - DNA, 1031 bp, Homo sapiens
aagctcaatagaaaagccattatgaaaggaagggggagaagttggcttttatgttgctgtcaggatttgggatttattttctttttattctgacaaaactcttttggggtgtgtttttttctcttcaattcaaacagtttatacaagtgttattttaaacttcctagtgtttacatcatcatgtcgtttaaaaagaaacttttttttctttcaattctgttatctgggaatttttaaggacacagccatggtttctgagacacacacactcacacatatatgtattcttctgaatatttctatttttctctgcctgattgagaaataaacaagaacgggctaattcaagaatacttaataagggactccattaaaaatttatgttcatttcaatatatgtatgtgattattttgaaaatttatatgacttcctagtcagagattcgttactttgtaaaacactcaccacataaagatggtttataaatacaaaaatgacacaaagctctatgtcaggcagcaagtcggtggcagaactggatttaggattttgagttctgacttctgtcctgtcatcaggccactaatctgcttgattttctgaaagaatttgaggcctgaggaaagaatatgccagagacacatttccaaagagatgagtcacattgggtggtttgatataataaaatctgtgtttattttgcaaagggcttttgaacagatattagagaaacaaatttcatcatcatgttcaactttatactttgtaacattgtactttctgttccaatagttaacagcactaagttcatagttcttctcttcctgttctcttttgggagttttctatttaaaaaaaaaaaaaaaaaggcagatttttagtgttttatcagagtgactttaaagtgttattagcatccttcgcctggactaggactattaaatcagcctttcatctttccaatgctaggctttgcctgagtcacttccttgctaataaacattctggtggttccccaatgcccagagca

SEQ ID NO: 11948 - DNA, 1028 bp, Homo sapiens
gtttcctctttggtcaagaggcagcaagggaaagggggatagaattgcatattgcaaccatttcagctggctgaggtttccagaacacttactatgtgaatgagacattattataatttaaattgctaagtgtgattttaaaagatcagttataacatgcctgtttttgaaaactaatgtatattttaggttgagtgtttaagttcttcagaataattttttattctcatgtttattgtttagtaagtattaagatttttagactaattctacagattaaggagttaaagcattggaacagaaatataaagctttaaggatacaaaggaatacatttatattattatttttatcttttctagtgttaggaacctaaatgttttgaagctgaaacataaagaatggaagaaaaaacaaaaattatgctgaaaatactaattaaccatgaatgctgcctgatttataattccatgtacagagattataaagaagaaatatagctcacaaaggatgagatgctctaaaattgtaactcagactatataattgagaataatcctgctgagaaagaaaaggagttaaataaaagtgtgactatatcaggagctctttgataagctcagaatttcaaggggtaagtatcaaagacagaggaaggagtacatagttagggcttagtaagaaaggcaggaacttcaggagagctggcaatcagggtcattaactcgtttattcattcataccactaatatttattgggagactttcatatgccagatacacttgtttatgttgagggcaataaaatataatgaagttgttgccctcaaaaatctactgtgataacacagggctgtaatattaaaaactgacatggttggctgggtgcaatggctcacacctggaattctggcactctgggaagctatggtgggaggattgcttgaggccaggagtcagagaccagctggggtaacatggtgagacctggtctctacaaaaataaatttttaaaaattagccaggca

SEQ ID NO: 11949 - DNA, 1045 bp, Homo sapiens
tggcgtgatctcagctcactgcaagctctgcctcccgggttcacgccattctcctgcctcagcctcccgagtagctgggactacaggcgcccgccaccacgcctagctaattttttgtattttttagtagagacggggtttcaccatgttagtaaggatgatctcgatctcctgacctcgtgatctgcccacctcggcctcctgaagtgccgggattacaggcgtgagccaccgcgcccagccttgtatggctttttaactagaatagcactagctctgcaagcgataactcttgaaaaaaattacaaggtctgcttttgcattttgttcattttggttcttctacagcttgcagtaagattcctgatggtaccaccaagtgttgacgatatctcccatgaccttcatctttgaactcttctaagattctgcttcttgttttctttttcttgagtaatgtaaatacaaattttagctcaggcctgtgggatgatgtgtatattttcttttcgttaaaaggtatgtggtatataaattgagtatttatatctcattattttgataacatgctacaaagatcccagtagctgtgtttaatatttgttttaggaaatttgccactacagacaaatttattttagactcacttctctgaaaaacagtgaattaaatggtggggaaaaaacccgatgtggtaaagtaatgtattatctgaattcatggaagccacgtgtaatctttcttttctcagagagtcttttattctctccatattcattgtttgtttctattttctgtgtagtaactgggcttgtgctgattattataattctaagtgaagtgataaggacagattcttgggtgacagttatggcaccttccttctgaccttaggctagttacttcatttcttttctctttcactttctttctttcctagcttatcaaggacacagtgatacatatttcacaagattgctcaaagggataaatgagatgatatatgtaaaatctcaaatgttctaaatattataaatattgtaaa

SEQ ID NO: 11950 - DNA, 1082 bp, Homo sapiens
gacacttcttatttcattatgaaatcatttaggaacagattcttggagttagaagcatatagaaaatggtagttttagtctgaagggccattagtctttttattgctaatgacacttttatcagtaatctgttctacttggaatcagttctataacattttaatttttttgccagacattattggtgaatttgttttagatacaggatctcactgaaaatttaaagtatacccacttggtaatgttgtaaatcgtccttgtcttgtctccccctttcagggagtttgacattatgcatcctgatgaaatggctcctgggtctgtgtccacgttcttcaggaatctggagggaatataaacttgatgcaaagtctgactagtagtgtcttttttgttcatatcagtgcatttttctctgtttcttcagtgacccccacgtagttgtttgggtcagtctgcatgttgagaaggcaatagcttcaaatcagttggttttagatatagtggctggattggattccaagtagtaggaccttaaggcaggacagagaaagatatggagccaggtacccacccaaacctagatcttttggttttctgcaatagtatgagtctgtcagacaaggatagataaattgagtattacatagatagaaaaagggtacaccccttaaatggattattttctacactgcagggaagaaaaagacctccccggctcctgttttaacaagctgtattttttctactttcatttgatatttgctttcattaggcttacgtacaaagttgaccattttgtccaacttttattgtcaatttaaatagttggtctgctgaaaaagtcctcatgctaattttgaggtctttctctgtcctgccttgaggtccgacgactgaaattgctcagaatattcaggaattctactttggagctgccatagagcctgaggcgtactcttttgataacctcagcgggcaaattttcttacttggaaggaaggctttatatttgaaaatggtcaaaagatatttgaccaagtccagtgaataaagcaggcaggcaatgaaaggtgggggta

SEQ ID NO: 11951 - DNA, 1459 bp, Homo sapiens
cctcttaaactgcaaattatgatgccctttcttataggggtattgtttggattatgttagatactacgtgtgaaatgcctagcatagtgtctgtcatgaactaggtgctcaataaatgttagctacactcagctctctctcccagtcgagtctaggttctgatcattaataacgtttgaagtttcattttgtacttactttgaacttatttgagtctaaaaagaaaaaatgtatcactttcttgaggctgagatcaacactttaaaatagtgattcagtggtctgtatatgatctctgacaatgtggttttattaaggtgctgtatttggtgcaagtgtgaattctatcttttattcatataagtgctccttcagtaattaacatttttaccctacataataggtaaggataaataaaaactttaggacctaattctgtagatttttcctcttgttatctttttgatttcctgttagcaaatatgaactagtgaaaatttattgagatttaatcgtttgatagtcattcacctctgcattatattaagttatagtacctgtggataaacagaaagtccgtgtggaaaaagaaatccatctgagttttcaatgttttgctctctggagtcaacagtccttcaaagagaaacttgtaggttggtttgtttatttaaattgggtgcaaggagaaaggcaccataaacataccattgcctgatttgaagaggtgatgtaaagtaacatggagaaattagttgttattttctcttcccaatgaaacagaatttgtctatcagtacaactaagcaaagataaaggaaagtcttcttaaaacagaaaataaatgtattttcttgcattaattggggttcctgaagaagcagttgccaagatgggattagacctgtaagaagtttattaggggagagggcaggacaaggccgggagagccttttgactatgaggcaagtttgacacttatgcaaggagaggggcaagggaagacgattgagtaggaagaagcttgactatagtgcagcctatgaaaggtttggctaggcaaataagagtcagccattggaagagtcacctatcttgaaagaatggcctgtatcagcattcctcactgtcagtcattggctgggagcagctacaggaagcatggcctccgtgcctaagtggtgctagagccataggggaagcagttggggaagtaagtcagttacactctcaaaacaggagatctgaatggtatagctgtggtttggcagtatagcccagtttagtagtacttcacttgctttggacacttgctttggactctgtctttttctgtctctctgtcacacacacacactcacacacatgagacctggcaatttctttgaggtctctttgagttttgagtttctttgagctttgttttcctcaattgcaaaatgagtgtaatggcagtatc

SEQ ID NO: 11952 - DNA, 1049 bp, Homo sapiens
tggtttatcttaaaaaacaccacacaaaactgtctaaacaactctgtaaataaactgttccaaatgcctcaatttgatgaatgaattaaagaattatggttcttaatccaattatgatcagtctggttattccatttcccatttgggggagcttggggagttggaatagtaaatgattctcaaatgtgagtggggtctttgttgtttactttgtgtgtgtgatgtaacgtaaataatcactcatacctaatatttatgagagggatttctgatgtggagaagtaatttcaagatcttaaattaaccaagagttcgtttgcatgaaaagttgccattaataaaggagtaaagtgaagtttttaaaaatatgaagcaaagatctaaccttttgcttaaatataatgaattttgatatttaagaggggagaaatggagtgcttaaggctcagtagaagggcagacaatcaggcacttttagtttgttttagccaggccatatggggacatttctgtaggactatttaataaattttaccaaattcaatttccttgtctttaaaattgagtcagggtcaaaggtaggctaactatgagttagcggaatttcgcggggggttgtttcctccaaagccctgctcctttatctgcctacacgggacttttgaaggctttaccagcgaggaccctgaccttcaggatgggcccttgacagtccattttgctttgatgggcccttctgaattcctgcctcatttgccccatttaacctctggctcataagctaattattttaaagttgctaatagttcattatggtttaattctcaaactagatgatattactgttattttggcagtttattatgatcgtctaattccatagagataaacttgttgcaattacaggtatcaaggaaagctgccaggaggaaatatttacatgcatgaggactttttcaggactactcaaatcataccttataggcaactaatgattttacttgcaattaaggataacattcagtaggggcagcatattgacaaaatta

SEQ ID NO: 11953 - DNA, 1273 bp, Homo sapiens
gtagattgtgacttttttcccttagagatactatttactatctcctatcctgataggtggaaggtttactgaattggaaattggttgactattagtttttaactaaaatgtgcaataacacattgcagtttcctcaaactagtttcctatgatcattaaactcattctcagggttaagaaaggaatgtaaatttctgcctcaatttgtacttcatcaataagtttttgaagagtgcagatttttagtcaggtcttaaaaataaactcacaaatctggatgcatttctaaattctgcaaatgtttcctggggtgacttaacaaggaataatcccacaatatacctagctacctaatacatggagctggggctcaacccactgtttttaaggatttgcgcttacttgtggctgaggaaaaataagtagttcgaggaagtagtttttaaatgtgagcttatagatagaaacagaatatcaacttaattatgaaattgttagaacctgttctcttgtatctgaatctgattgcaattactattgtactgatagactccagccattgcaagtctcagatatcttagctgtgtagtgattcttgaaattctttttaagaaaaattgagtagaaagaaataaaccctttgtaaatgaggcttggcttttgtgaaagatcatccgcaggctatgttaaaaggattttagctcactaaaagtgtaataatggaaatgtggaaaatatcgtaggtaaaggaaactacctcatgctctgaaggttttgtagaagcacaattaaacatctaaaatggctttgttacaccagagccatctggtgtgaagaactctatatttgtatgttgagagggcatggaataattgtattttgctggcaatagacacattctttattatttgcagattcctcatcaaatctgtaattatgcacagtttctgttatcaataaaacaaaagaatcctgtttgtgtggtttcatgaaatcagcattgttgaatgcatgaagtaataatgctaaattaacatttttatgatgtctcaaggtttctggtcaagggaagtaaatgtaggatagtatttttacaccaaaatgacacagagagaattgagcacaccagaaagaccagaaaccacaccactggatagagattcaatatgtttctttttcaaacatttggacaagaaaaaaatgggcatttaaaaattcttccttcccctggttatggatttatctgtagtaaaacttagctttgtcgtttgag

SEQ ID NO: 11954 - DNA, 1059 bp, Homo sapiens
tgtttaaagtattagcttgaaggtgatggatccagctattcagaaaataactttcatataaccatgattttgcacagtatgaggtcttaaatgtgtggaaagagataaattttttatcattaccacaaaccccttttaaagattcaaaggtggaagaaagtgatttattttttctcttcagcatacatatataaaagacttgtcagatgtttaatttggggaggttgataatgaaacatatcaacagagtatagtagttatagtagtgtttgtgggtaaataatttcctggggtcagacatatataaacatatttgcttcaaaatgataaaggcatgaaatcagtcttaaaaattgaaatgggggtgatgggggagaaaaagaagaacaaatttgaagtgccctttcaaatctgctggatacaagtattgaagttttaagtcatcttattctgtctgaaagtgtatttttcattctacaatagacccaatcaacaagacgtataacttgagttgcatgatgttcagtttatgtaatctactgttgggatggtaagaattgatgtaggctgtggtgtaagaatgaattaaaatatagtttcactggcttttctctacatatccactatcacaatggctaggtttcctgttgctcactattggattctggagaaaaatttaatgaaagatgatatcagaggaagaataagtggaggtagagaagaaaggaatgatagaggaggggaaaaaaacaaaacatatttttgtgttatccaaaggagctttttccttattctgtcaagcattgagatcttcttcagctttcaatgtagttgctaaatacaaataatgctactaggtagtgactaaatatagcaaacacttcatcagatattagaattaggtcacactattgaggttataatctgaaggttgtgttacatagaaaccactttagattattatcaacttggactaggctttattttataatagcatagtaagtaatatctattgtgtcatttcttcaaccattttattctaagatccatgaagcttct

SEQ ID NO: 11955 - DNA, 1047 bp, Homo sapiens
cacgaaagccctctgtgttcagcctctgtagactggccagaaccactctgtggtcagaggtctcttatcaggaaagaattcttgttgttgtgttgaaactgcaaaagggaggggcagtgtcaggcaggtggttgataccagtctttcagaagcactggtttctgtttaacttttagagaagaaagcttaattggagtgttactggaaagggataccagtctagaccacaagagaggattcttggatctcacacaagaaagaattcagggtgagtccacagagtaagatcaaatcaagtttattagagaagtagagaaagaaaagaatggctgctccataagcagagcagcactgaaggcttctggttggctatttttatggttatttcttgattatatgctaagcaaggggtggattattcatgaattttcctggaaaggggtggggaattcccagaactgagggtttctctttcttttagaccatatagggtaagttctggatgttgccatggcatttgtaaactgccatggcactggtgggaatgtcttttagcatgctaatgcattataaatagcctaagataagctgtgaggatgaccagaggtcaatttcctcaccatcttagttttggctggcttctttactgcttcctgttttttcagtgggttctttgtgacctgtatctgtcttgtaatgtcctatctcatcctgtaactaagaatgcctgacctcttaggaatggagcacaggtggtctcagctcattttatctatcccctattcaagatggagttgctctggtttaaatagttctgacatattttccccaatacccccaaagggacccttaatcccaaaatttgcagacagatgaagatccatcttctgtagcttcttctggctgaatacaggtgatgatatttttgcgtaactattcagggtagagaggagctcagtgagaaagcatcagtatggtgaaggccattcctaactcccgagttctcacaaaaggtgatatctggaagattaataagtgttcaattta

SEQ ID NO: 11956 - DNA, 1013 bp, Homo sapiens
aacatctgctagtctgtatattcgtcctacattcattggaactgaggtgcaaactgactctttattttggggtactttgctgggcaagttattattgtttattgttgtttgaaacttctagcatatagtttgcagtagccccccagtagcatcattaatgacttcttccttctgattgtcaagattagaggtagcaaacattttctgtgaagcgccaatcagtaaatattttttggctttgtggccatatagtttctaataagaaattagatccctacctcttaccataccccaaaatcaattataattcgattatatacttaaatgtgacaaaatactaagacgtttattaagaaatacaaaatatctctgtgaccttaggtaggaaatgattttttttttttgaggtctctctctggttttttttttttgcccacgttgtcgcttaggctggggtgcagtgatgcaatcacggctgactgcagctttgacctcctgggctcaagtgatcctcctgcctcagcttcccaagtagctagtactacaggcatgtgctaccatgcctagctaatttttaaattttttgtagagatgatgtctcactctgttgtcctggctggtctcaaactcctggcctctagcaatcctcccaccttggcctcccaaagtcctgggattacaggcatgagccacttcacctgaccggagaggattcttaaactctgccattttagtactaaagcagccatagacagcacataaatgagtaaatgcagtgctgtttgccttgcccaattaagactagtcattattttctaagtttacaagtgcagtgcctcccattgtggcagtacttctctgaggtagaaatggttttaaaatttaggggagggagagctgctaattttcattttcatgaggtcttgggattacttggcatggagtgagaatggaggttccccttcccacatagaaaaatggtgaaaataaagttcacagtgggagttaaggaa

SEQ ID NO: 11957 - DNA, 1031 bp, Homo sapiens
ctttgtgtgagcaataaagctttttaatcacctgggtacaggcgggccgagtctgaaaagagagtcagcaaagggtggtgggattataattagttcttagaggtttgggataggcggtggagtaggaacaattttttgtgggcaggggatggatcttacaaagtacattctcaagggcgaggagaatattacaaagtaccttaagggcagggaaggatattacaaagtaccttctcaagggtggggagggtgtatcatacaaagtgcattcacaagggtggggaaatatcacaaagtacattatcgcaagggcagggagggtgtattgtcacaaagtcaattgatcggttagggtggggcaggaacaaatcacaacagtggaatgtcatcagttaaggcaggaacctgctattttcacttttgttgatcttcagttgcttcaggccatctggatgtatacgtgcaggtcacaggggatatgatggattagcttgggctcagaggcctgacagacatgaacttcccatcataaaattagaagagcattaatcaaatgattagaataaaatattaccattattttgaaatggcaagcattgtatgtaaataaacagcagaggaacccactgtagcctagacagggttcagagacgttcctgccaaggacatggcacagggactgaacaaggaaggatgacagtgcctggcaaaggcagggaatgttacaggtatttgggcacctgtgagaaggcctgatgtccgaaaggactgaaataaattaaatgtgtggggggagagagaaagaaagagcctagcaaaaggtgagctggagagtcagaggcagaaggcagaatctgggatgggctgggagcttgccaatcattttgtcaaatgggtgatgtgaagccttgaaggttttttgaccaagaggagatgtcttcagatttgcgtttgagacattttcactggttgtcatgctaagaatggcttaaagagaagcaaggctggggtcagaggagctgcttggaagc

SEQ ID NO: 11958 - DNA, 1063 bp, Homo sapiens
aaaaggggaaaaatatttttccttttttacgcaagaatttctcttgcttttcagctcattagaaccagatctaattatttgaaatgagtttaaaaccttattatgaaaggaagttgaaaacattcgatcacaattgagttttgtactatggactaaaaccaagatgtgctttctgtcagtagctgtgcaactccctgaaaaaagaaaaatagcgcagagcgatctgagctttgtgaaggctacacaatttatcaggcccagagagataggagtgtgagacttcagtcacgtccccccgtacgcatgcgcaggagtaattatttaaagacattttgttcctgactaactgcctcactcattatgttcctggaatttgtgatacaaaaaaacaatgtttagcctatcaatagtttatatagtttatgttattttaatataaattcttctcaacttagaaactgcctcttttttcttttaaaaacccacttgtaactgctgtatatattcagggcaacttgatttggtgtttcgttggttgcagtcctcaaatttgacctcaatatactctctacttatataaattttgtctcagttttgtccgtaggctgacattccaattgttttcctaattatatattttgttccttatttctcatgtctagaaataaagctagggaagtaaacagctggaaaactgatagtggtgttattaacctaactgagagggctgggcttatgagtaaattattcctgtgcataaatgaaagattgtttctaaatggcagctatgttgagcctttgtattagttacatcttttggggtttcaggttgccagcttctttaaatggcctcttctcaactggtataggaagttggaaaataaagaactttctttatttccctttagtgttggtaaccacagtttctttaaataacagatgcccaccccagggaaacccagtggcatgatcagccttatgctcaggaaggtttggttgctatactggagagtgagaatctgggaccttccatgatagacataattgtgccagctatcctcta

SEQ ID NO: 11959 - DNA, 1063 bp, Homo sapiens
tgagtcatgctgcttgattctggactgactgctctctacatcaagaagcacaactgtggtgctggaatcctacttgaccatgctcccagaaattcctcttgcctatcctctatgttgattatcccattttctacattccaaagtgttccatttcctggttttatttttgtttctgtggagcacatcctaacttcttgaaaagggtacatggaaggtaaatgagaccctggatgtctaaaaatggctggctccctctatctgtttgatagcttgtctgagtatagaattgaaagctggaaataattttcttttcaacattttgaagtagttgctcgtctgtttgcttttaccattgctattaagttcaaagcagtcctggtaagtgatcctctgtatgtgatgtattttttctctctctccccagaaacttacagaatcttctccatgaagattttgaaatgttagtgatgtgttgataatggatttatttttatccattgtactggacactcagttggcccttgcaatctggacacttgtttccttcaatttgggaaaaaattttaaatgatttcattcatgatttcctccctcctccattttcttttttctcccttcctggaacttttattatttggatgtttgaacttctaaacatgttctcttccttttttctgtactattttccatttgtcttttttttttaagcatggagtttcgctcttatcacccacgctggagagcaatggcctgatctcaactcattgcaacctccgcctcctgggttcaagtgattctcctgcctcagcctcccaagtagctggaattacaggtgcctgccactaagcatggctaatttatgtatttttagtagagatggcttttcaccatgttggccaggctggtctcgaactcctgacctgaggtgatccactctccttggtttcccaaagtgctgggataacaggtgtgtgcctctgcgcccagccttttatttagttgtatgggggattttctcattttcttcttccaagtgttctactgagttgttcatttctgctct

SEQ ID NO: 11960 - DNA, 1027 bp, Homo sapiens
tcatgatttcatggcttcacattgtaacatccctttaccatattttttgaggactgttttggcagaatgtgtgaaatcttgagcagaagtattacccaaaagtcagaagaaaatcagatttttatttcaagattctgttaaagttacccactcccttcttttacttaatcttatagttgcagttctctctctttttagaaaagaaaaaagaggcccctcaggatttgcagatgaaacaatattgctctttagagatatccatctggctgttagattatttttccacagttttcagaagtggatgaggccattagaatcttgagtattgcccatttccttatgtgtgcctttgactatagataaaatagatgcatgacaattatttataagttgattgatttttcttgtcatttaaatcatcttgaataatagagttggtagagctatcccatttttgaaattattttgttttgtcaataactttttgttaccagcatgtacacttgcattgttgactctccatataatacctttaaaaaatttttttttgtggtaaaatatgcataacataaagtttaccatggtagttttctttcatttgttttgtttttgtttttttgagacggagccttgctctgttgccaggctggagtgcagtggagcgatcttggctcactgcaacctccgcctcccgggttcaagcaattcccctgcctcagcctcctgagtagctgggactacaggcgcccgccaccacgcccggctaatattttgtattttaatagagatggggtttcaccatgttggccaggatgttcttgatctcctgacctcatgatccgcccacctcggcctcccaaagtgttgggattgcaagtgtgagccaccgcgcctagaccatggtagttaattttaagtgttcaattcagtgaccttaagtgtgttcataatgttgtgcaaccatcaccatgttgtctaaccattagcactatctgttttgagaacttttttttatcatcccaaatta

SEQ ID NO: 11961 - DNA, 1050 bp, Homo sapiens
gggattttaccatgttggccaggctggtcttgaactcttgacctcaggtgatccacctgtctcggcctcccaaggtgttgggattataggtgcctagcccatggtgcctagccctaacctacatttataaactatcacttgctgctgtgtggagactatattgtgagattaacagcagggatacctgctaggaagcaattgctgcagattgcctgagacaaaatagttatcatggactagggggatggtggtggtggtggtggtaggtggttggatgtaggatatattttgaagataggtaaatggtgcaagattatgggtcagttttaaatgcttaagtaaattttctttgtaagacattttaggatgccatgttaagaatctctttataactgtcatttaaaaaaaaaccacatattttcttagcataatttcccatagtaacattactatgtcaaaggctatgaacatttgaatgactttagataaatactgtaattgctttccaaaaatattgtgcttattatgtcaccagaaatgtttgaattctgtctacaattcagtcttgccagtatagtacatttcatttagaaaaattttttactatgtagatggaaaaaataatattttagctgggagtggggggactatggggaataactttccttcatttaatattttattgtgagttagtttaagttactttattttatcgtagtttcctaaggctacaaattagtaaccttggtaacttatgtacctaatttaaaagtttacttttttgaaaggctggaaatactaattaaaaacgtaacaccttcatccttgtctttgctccattattaactagtttcattacagaatctctgtgttttaaaatcagatgggttttcataaccagtactttctcagagtggtaaatttaaaaaaatatataaagagaataaataatatttgttgagaatacttcaaataatgtgaagagttattaacttacagcaggagttggcaaacttttctataaagggccatatgggtctttgtcacaaa

SEQ ID NO: 11962 - DNA, 1062 bp, Homo sapiens
tctgagtgggtatgatgagtcagtgtctgggaagggccaaaacattttgtccctttctataatttgtcatgataatgctagtaatgaatctgatctcccttcctattttaaaaaccttttagtgattttgtataggatgaagtttaaaactccttacttaatatacacatgaccctccgtaagctggcccctgcttgattgtccagtttcacttcttggtgcttattctaaggcctctaagccttagagatcctctaagcctttgagatccccaaaccctggactgcggactggtacccacctgtgtggcctgtgaggaactgggctgcacagccggaaggaggtgagcattacttgccttagctcctgtcagatcggcagcattagattctaataggagcgtgaaccgtgttgtgaactgcccatgcaaggatctaggttgcatactccttaggagaatctaactaatgcttgatggtctgaggtgaaacagtttcatcctgaaatcacccccaactcggtccttggaaaaattgtcttccacgaaactggtccctgatgccggaaaagttggggaccgctgttctaagctaaagttatatggagctccttggttctgtgtcctcaacatgctgttctatgttttttacattctgtttgctccttcctgcttggaatgtccttcccctccccgtctttcttaatgcatacaaagttgatctctcctgtgtgccaccattgtacttcgtcttgcatatggtgttacattcattttattttaattatttatttacgttcatgtctcttccactcaccttagttgcttgaggtcagaaactatataatgtgtgacacggaatgtgacacctagattttcaataagtgtttctatgatacaagggagactgatgtgggtagatgggaatgaactcatcaacctctgtttacataccctaaattccctgtttcttccctattataattctgacagtctacaaccgtctttgatggcttataaacggaaagtgcggaacacatcattctacagtgaatttaaataac

SEQ ID NO: 11963 - DNA, 1035 bp, Homo sapiens
gtgcagtggcgccatctcggctcattgcaacctcggactcctattttccccagagatatttcacacattaaaatgtcgtcaaatattgttcttctttgcctcagtgtttaaatttttatttccccatgacacaatccagctttatttgacactcattctctcaactctcatctgattcttactgttaatatttatccaagagaactactgccatgatgctttaaaagtttttctgtagctgttgcatattgacttctaacacttagaggtgggggtccactaggaaaactgtaacaataagagtggagatagctgtcagcaacttttgtgagggtgtgctacagggtgtagagcactgtgaagtctctacatgagtgaagtcatgatatgatcctttgagagcctttagccgccgcagaacagcagtctggctatttagatagaacaacttgattttaagataaaagaactgtctatgtagcatttatgcatttttcttaagcgtcgatggaggagtttgtaaatgaagtacagttcattacgatacacgtctgcagtcaactggaattttcatgattgaattttgtaaggtattttgaaataatttttcatataaaggtgagtttgtattaaaaggtactggtggagtatttgatagtgtattaaccttatgtgtgacatgttctaatatagtcacattttcattatttttattataaggcctgctgaaaatgactgaatataaacttgtggtagttggagctggtggcgtaggcaagagtgccttgacgatacagctaattcagaatcattttgtggacgaatatgatccaacaatagaggtaaatcttgttttaatatgcatattactggtgcaggaccattctttgatacagataaaggtttctctgaccattttcatgagtacttattacaagataattatgctgaaagttaagttatctgaaatgtaccttgggtttcaagttatatgtaaccattaatatgggaactttactttccttgggagtatgt

SEQ ID NO: 11964 - DNA, 1021 bp, Homo sapiens
tagttctgtatctcttaagtggaatatttaggccatttacattcaatgttagtattgaaatatgaggtaccgttgcattcattttgctatttgttgcccttgtactttaggttttttattttttgtttttgctttttaacttgtatttttgttttatgggtcctgtgtgacttatgctttaaagagattctgttttgatgtgtttccaggattcatttgaagatttagagctccttttagcagtccttgtagtggtagcttggtagtggtgaattctctcagcatttgtttgtccaaaaaagactgtatctttccttcatatttgatgcttagtttcactggatacaaaatccttgactgttaattgctttgtttgagtaggctgaagatatggcctcaatcccttctagcttgtagggtttctgctgagaaatctgctgttaatctgatcaattttcctttataggttacctggtgcttctgtttcacagctcttaagattgattccttcgtcttaactctggataacctgatgacagtgtgtccaggcagagagctttttgcaatgaattttcccaggtgttctttgtgcttcttgtatttggatacactagcaaggccagggaagttttccttgattattcccccaaatatgttttccaagcttttggaattctcttcttcctcaggaataccaattattcttaggtttggtcatttaccataatcccagacttcttggaggctttgttcatattttcttattcttttttctttgtctttgtttgattgggttaatttgaagaccttgtcttcgagctctgaatttctttcttttacttgttcaattctattgctgaggctttgcagagcattttacatttctataagtgtgtccaatgtttcctgaattttttattgttttttctttaagctctctatttccttgaatatttcacccttcactttttgtatcttttttggggtttccttagattgggcttcacctttctctggtccc

SEQ ID NO: 11965 - DNA, 1033 bp, Homo sapiens
tgtatcaatctggtgacccgtgtaactgaaaccaagatgttaacactgtaagaaaacctagcttatgtttgcagctcctgagaataaatccctttatcttgaaatacctggaaatccctttttaatgtccagtggagtcatattgccaagtttgagaaatgtgtctagaccagtatttcccaaacagcccaccagacaacaccagcctgtaagatggtgatattgtttggatgttttttccctccaaatttcgtgttgaaatgtgaccgccatgttggagttggacctagtggaaggtatttgggtgatggggaatctcttgtgtggctatgtaccttccctgcagtaatgagttcatgaaagatctggatgtttaaaagagtctgtgatcttcctcctctctctcttgctcctgttcttgccaggtgatatgccaactccacctttgccttccaccatgtttggaagctccctgaggcctcaccaggagcagatgctcgtcccatgcttcctataagcctgcagaactgtgagccataataaactgtgaattataaattgcctttatagcaatgcaaatggaccagtacagatgggatgctgggaagacagttgtttccaccttcagtaaagtccgtggaacacagttgtgactatattctaggccagccaagatgcttgtactcagaaaggagtggtctcaggaccataagaaagtgaaaaaataaaaataagaaaataaagaagggattgtcaatgaatcagaattcatcaaggtcaaagtcttaggaaattccttcatgaggaagtctaggggggctatggaaatgaaatttttaaacaaataggtatgtggtgctggcaggaataaattatggacttatgaatataacataagattctttattacctggtctcacccgtctttccacctctgccccccttcttgcccgactctgtgtatcacccataataaactacttacagcttcctagtgttaaatttaccctaaagctgcctccttcaatatttt

SEQ ID NO: 11966 - DNA, 1060 bp, Homo sapiens
gaagcacaatggatttacagctctaggaacttagtactttggagcttttgcctctcacactgacaacataacaggatgtgattgccttctctgggattcagacaggctctgtcaatgtggagcacaaaaggagattttcatataacttgttaaaaacatgttctaagtcatgtataggctaagattttaagaagatctgggggaataaaaagccaacagtaagccccaggaaagggttttttgagaccatatgtatgctattaaaatatattgagattaatacatgaaaatgcttaaaagtgataggaattattgagaaacttatgatggtggcattgccttttataaacatggagtgaaagccatttgactcaacgtttgctgtgcttaaagaattgcttcaggacccgagcgtttttatgtatgctgttcctgcagttaggaaaaaaaaatccaagaaatgtattgaatactcaagaaaatgccacatttcaattacatatttaaaactgtatctgtaagggcttttcaaaatgtagcaagataaaaatctcttattcaaattgtttttgtattaaatcatgcactcagaatttgtcgagggagagaataacctggtgtgttcaggttattcttagagactacacatttggaatagcagagcaaaatatggataatgaaagtgttgggaaaaaagtgatgtgacagggagtgaagacacttgataccagactctgggagatactctgcaagttgacctggcctctcccccacaggaacaaaacactgcctccagagtctttaaattctcagttatcaacgccaaggtttaaggtctagatagggtttgctatagggtttgctctgacaatttttaaagcttttggattgttctaacatagcttaagctattggttcctaaaaatcccaaatcaagatctatgtagaatataaaggaagcctgaaccaatccttccacatactgttaagatgtagacttggaacaaagctgttgggacccagagcaatgaatttttgaactgaagctactggtactccc

SEQ ID NO: 11967 - DNA, 1034 bp, Homo sapiens
atgatagtaattactaagcccatgggaaaggcaaatcctcattagtatctgccatttcaatgctataatgaacccctttatcatataaaattgttagtaaaaatatcaacagtaaccatggtagctattaaaatgactgtggtgatggtgacagctatgtgacaggcaagatctgttttctaaaatggctcctgcttcctaaccacacagaggggtttgctctttttctctgtttatggaaattcacttttaaaaaaatcccttttttgataaatatattctatatgatgctggacagtaggtagttggggaatattaactcaaaacggttgtggcccaccagcactgggtaagagtgagaaaatccgctgaacacacactctctcttttcccccagatgacagaacaaaggaagaataagcagagactgggcttcctcggatcaaacacaccccatgtgaatcatcacatgccaccacactgataccatggggggaagccgtgactagcctttcatcagtgtcctgcctgatcactgaataaagaactgagatggaggggagtgaacagtgcctattgttgaaaagttaaaaacaaccaagtgccaagatgttgagtgggttagctccgagaacaatttataactgtgttttcatggttgcgaagacctaacctcaaatgcatctgctagaaagcgtacatcacacattcgcaatgcatcaggaagaaaaggcttgcccaaaaggctggagagggcagggagcggcaggatggaaggagacacggggcagggagaactctcttctgctaaatcgataggagtcagttttgtcttaaatgctgactacagccactgacatggttggctggaatttctttcttttaattgtggcatataggtttgtgacacaagaagtcatactttggtggctaagttttactaaggaaaataactgaaaagattaaaagtgagagctgaaaagagaaatgataatgcttccaaactgtagctgtcacagggcaatttctttatt

SEQ ID NO: 11968 - DNA, 1025 bp, Homo sapiens
catgagtgagtgggcagagagaggccaaaggtatcactagcggaagttcctccacctggggcacatgaggtaaggagaagggcacttccctattgacctttctccattgggagctttatctcattacgtagtaaattgtcattacctttatccttgtcaggttcatgtttctgtgggagatattgtaggactccttgctttatagtatagaagaagtatgtctcaacttgttttcccacagaaacatatctgatgaataacaaaccattagtattggtatctcattagctgctaccactaaactatgcattactcccagtttcactggtgccaaatccattcttttctctgtgagtttgagaactattaatgtagatacgtttcagtcaagactaaggaatatttctataaaatgaatatttggaattgattatctcagtaagtctaccagtatacctgaactgaaagggattccccaaaatgccaaatattcagctataccagaactatactgattggtggtgtaatgtttgtagaattttcagaatttgatgacacttttaggcattctatcatcatcaacaacagcaaacatttctcaaaggcattcttcctacaaagtgcaatgccaagtctgaggacacaccaagaagtataagttgtctggacacaagaagtttgtactccagtatagaatgtgtgccacatgagtacatgtgaaaagtgaataatataaatgtaccctatactacctgctaagtggattacatgagcattacaggcagaatgttaagccatgcaccaaagacacttttgacaggtttgggatgattgtaaaccatttcctaggaattgttcataaagcttaagacactagaagtgagtgttaactttgcaggaatagatcattaggggctgtttggtactaggatatttcataaagaaggtagaaattgagccaggcttcaaatatcccaggactgagtgtttggttcccttgtccactccatctgcattcctcttat

SEQ ID NO: 11969 - DNA, 1037 bp, Homo sapiens
attaagttcatgttaaactttattagtgaatatattactatatagtacatatctgttcatttcctttttacattttctctacctatgactttgtatggcatatggataatttttttagactcatctgagtctctcttcaagtctgtcttctttgcagttttctctaccaatttacttttaaacttcagccactatatttttttatacctgaaatttcatttttttcaaacctgaaatttgagttttttcaaatatatttggtcattttttatcatgctttgttgttttctaatttttgtgattccctatggctgttttatggtctgtatgtggtaactcggagatccgatgtacttgagattttcttgttattctcactcatgttgtgtttcattatatttttgatcatctttgattatgcgctcatatcttttttcaaattgacttcatttttagagcagttttaggtttagagaaaaattacacagaaagcatagagttcccatatagtccctcttctcctctctctttctccgattgttaacatctagaataagtgtggtacattcattataattgataagccaatattgacacagtatttttaaactaaaatccataatttattaaggttcattctttatgttgtttaactatgggttttgacaaatgcataatgtcatgtatccaccattgcagtgtcaaacagaatagcttcattgccctaaaaattctctgtgcttcacctatttgtctctccttctggacccctgagtccctgccaaccactgattttttttctctgtaggtttgccttctccagaatttcatataattggaattatataacatgtagcttttccagactggtttcttttacttagcagtatatgtttaagttcttccatgtccttttgcagtttaatgcctcattttttgttattgctgaataatagtcccttgtattgtttatccattcacctattgaaggacatcttggttgcttctaaattttggcaattatgaataaagctgct

SEQ ID NO: 11970 - DNA, 1035 bp, Homo sapiens
cattacactttgtacacaaatgccaattctggctgctgggtttatataaaagacacagaaaagctgaatttgtaagcattaggttgttcagagaatttatattatagtaggctttttcactgaaaactttccagtcaatattaactaattatggttgagaagtagtacaatttctttttttgcaatgttgaggattaatcacctctgatttatctcaacagtttagaattagaagtttttctctggaggaatggatattagaagctttgcatggctgtgatttatgcagtgtctgacttcatgtttttcaagctgtaatggttcacaattttagcacttctcatcaccaccaaccaaatccagaaaatgtagcatttttaatttgaggcctctgagctggccatacatggaaatgtcaagtgaggtttgtggcgaccacgtgccacaggcatctgagaatgtggtatgactgagtgaaccctcccatttcattgacgacatgtgttacaaattactatggatctggcctctggattttaattccttggtgacaggatctatatttgggggaaagaattgtctgggctaactttctgtgtagtaatcatttggattaaaggattattttccatgcaaatctaaataagatgcagacactgtgggtgccaaggatttgtgtgtgaatcaggggtaagaataacaaaggagcctgttctgtattagtagtgagaaagcatctcttggaggcaaacacgtatacatacttgaatcaagtctcagataaaggtagtggttaaatatcgatggctcaaaatcattgccaacaaccagatgtgcctccctgcagtccatgtagcaagcagggggagggatgttgaaatactcaattgctatgattgtttgagaaccacagacaatgaagcattctgcctcaaggctattctgatagaaaagaggggctggctcaaatccttttgcctcaattttgtccgaacttggaaattacacttatatatacattttgtcgtgtttttt

SEQ ID NO: 11971 - DNA, 1038 bp, Homo sapiens
acaattcctatgacagggctgagtgataataaggtggatttacaaacatgcatctctgtttataatgctaaagctttgaaagatgaattcataaggtcagattccatctttagcaactaacattatagccaagccacttgtgaaaatattctgtgttaaaaaatgaaaacatcttgatgtttgtggtcatgtggttcaagcaattctcctgcctcagcctcttttatttttacaaatacagatgaaattataaggtgtcaaagagagaatagatttgaaggctgtgctccacagcagagcttagacggatgcaaggaaggccaggcacggtggctcacgcctgtaatcctagcactttgggaggccaaggtgggcagatcatgaggtcaggagatcgagaccatcctggccaacatggtgaaaacccgtctctgctaaaaatgcaaaaattagctgggcatggtggcgtgtgcctgtaattccagctactcgggaggctgaggtagaattgcttgaaccagggagtcggatgttgcagtgagctgacatcgtgccactgtactccagcctgacgacagagtgagactccatctcaaaaaaaaaaaaaaaaaaaaaagaaagattcaaggaaagggctgccaaagtatcacgccagagaaggagtgaatgccacgccagtgtgggaacctgtggagtgaagtggataagagaatgggttttcaagttagagtatctgtattcaaatcctgccttgaccatttataaggtacttgtcttctctatgatttttcttttctcatctgagatatgaagatggtaataacaatatccttctcacagtttccttgcaagaattgagggaatgtatacaatatattcaatggactttcaacagtgcctgtctcataagtcaatacaaagtttttatgacgattgtcttgggttggataccctaaaaacaccctgatctagaggcttgtttgcagaaggtatatcgaagagtgcacttggatatgtacctgtaaggaagtgaggaag

SEQ ID NO: 11972 - DNA, 1029 bp, Homo sapiens
tctcaaacttcgactttgctttctgccccttaccactgcctagctacaatggccaccttctgttgatagaacataagcttggttctactacctcagggcctttgcactggctattcccactgcctagatggcttccctttaggtcttccaatggctgcctcgttctcttcattcccatcctagctcaaatgtcacttcttcagcataggccttcaagaaacatttattgggcaaatggatctaatcaataaagtgattaatcacattgccctgtttggtggctttttaaagataaaaagtatatgacattttaccattattttaaagaaaagatcttacagatcattccagcctattcacagaaaaggaatcaatccaagtccatctaggatcttcaggtaacaacccagatctcatgtctcatgaatgaaatatcaggcagtcattttcttttctataattatgcccaaatcattggctatgactttaagtaagagatagaagaaaagcctctgttagactgatgaaatccaaagttattgtgtcataaaagcttattttaattagatttatttttcccacttagcctctgttagactgatgaaatccaaagttattgtgtcataaaaacttactttaattagatttatttttcccactttggaaataggtatttccaaaatacctatactgataattatttctaggtgtataattttttagtagaagttcaaaaacgtatatgccagtatgttttcatgtctttcctcaaaaagctctatttattgaaaaatttacttgcttttcttttgagaaaatttttagtgaaccttctgttgtgaataaattaatcaatgttgttgaccctaatagaacctgttatttgtaagctgtttggcagtgcattctgacagcctttcttctttgcaggaatatattgctaagaatttctgtgtcatgcagtcccagattggctatgatattttggcagaagatactatcacagctttgttgcacaacaacagaaaa

SEQ ID NO: 11973 - DNA, 1296 bp, Homo sapiens
gattgtatgaaaatttgtgtgaaggataaaaggaccagatgtcagatcaataatggggactcctgtgcagttatttctagcttcgaatatagcaccaaagatccatgcagtgtctcaattgtgatttatttctgcttcctagattgttgtaggagataaagttgttttgatgcctgtgaatgcagggcagccactacatgccagcaacatagagcttcttgataacccagggtgtaaagaggtaagttcaagtggaaaaggaatgaatgtgttcatttttctcatgagacagagggagaaaaaagtaatatagtttctttcattgttttcatgagcataatcccagttattctaattaatatccctaaggtacatatagctgtgattagttattgctatttttggatggtctctcaaagatacttgtattgagctatatacttcattatccaaaattgtctttaatttccttttactagttgaactaataatttctggtagagaatggaatctgtagtcttataactttgaacgtttcttcattaataggtgaatgctgtcaattgcaacaccagctggaaaatcactttattcatgaaatatagttcctatcgagaggatgtattaaaaggagtaagtatgtgctacacaggacatttgctgggagaaatgatggtagtcttactgaaattctagatgcaaaacctatgtattcactggtgttcataatttagaatgtgactacacatgttaatacttactctaagtgttttactgaatttcccccccacatttttaaatgtttaaataagcattaaataaatttaaataagctttaaaagtcaaatagctagtagaagggcccagagtagcaaaaccagaaagagacacctgcttctcacatctgtttgttcagatgtctcttgacctttttgctagggggacgttgttagattatttcatgcggaacaagagaagtttttgacttgtgatgaatatgagaaaaaacagcacattttccttcgtacgaccttgcgccaatcagctacttctgctactagttctaaagcactctgggaaatagaggtatgtaaatgttttttggcacttaataaatatttagatcaaaaagagaagattcactgggcttgttgttttattgttataggcatcatttatgatagaatcataaaatagaataatttttgtgaaccaacttgtgcctattcattgctgtgaccaatttgaaaggaaactgtttcctaagcctgtcttctctgtggtagctctcatttt

SEQ ID NO: 11974 - DNA, 1079 bp, Homo sapiens
tttttttttgagatggagtcttgctctgtcacctaggctggagtgcagtggcatgatcttggctcactgcaacctctgcttcctggtttcaaacgattctgctgcctcagcctcttgagtggctgggattacaggcacacgccactgcgcctggctaatttttgtatttttagtagagatggggttttgccatgttggccaggctggtcttgaactcctgaccccagcctcccaaagtgctgggattacaggcatgagccaccgtgcctggcctggccagtggttttcttaccatctgtatttgctaaatacattaatagatgctttaacaattcagtctttaattgactaaaatcacatctattatgggaaagaggcagttagtatttggtaataaaaatgataactttttgaggagatcttgccacgatgatcaaatcaaagttggggtggagaagtcagaaggatgctgtctgaggatatttagggctgttaagtagaagccagattagatttgttctaaatggccttgaggtacatgtagaattacgaacagcatttaaacagagacagattatgcctcaacatgacaacctgctcccagtggcatctctgcatggctacagtacactacgtagggttcagaggatcttggttcatatttcatctcaattcctcatgaagaaaagtctcagtttccttctctgtaacatggagaaaataaccctggctaactcttgagagtcttgtgaagatccagtgatctttattatcaatgtgtagtgctgtttatagtttacaaagcgctccatggtagtaaactgtattgaacaaaccaagtgtggcattggtgtccctaccactaagaggtcaggcagtcacttgtcagggcattcaagcatcctatgtgtggttgaacttcttcatatttataatattctaatctggaaatactatcctgaaggatctagggaattcactttttgagtttttgcttctttgcttcaaggaagggaaagattggattttatctgaggcttctttgagtgctaacattttatcagtctacaagcctgtaa

SEQ ID NO: 11975 - DNA, 1029 bp, Homo sapiens
atgccaagctatctgaccatttttgatgtgttcttcctccttgccctgtttataaaatttatcttccatttctttaaacatttcataatagttattttatattttttagttgataattacaatatttgttgttgtttttggtgactcatgcatagtaacttgtttccttgtgttattagtaatttttaaaatatttgagttcatatttctttgaatttaatctgtagtatatcaagtataaaactttttttggtcttttttttttgaatggaaagttttttcttgatcacaactgtaaattctggacaaaatataaaaaacagctatgtgtagccactggagagtgaccaaaagcagacagaaacctggggtgggggaggtgtctgtacttggaagaagagagtgagactaggtgggtttctgatttgtatggccttttttcctgagagcacctgcaaattggtgtcaaccaggtggtgaaaactcagataggaatgacagtgtgatggtggtaaagatctggacctgaacttgtctagtgagtcactttttctagcaccaatgattttctggctctttgcaggtgattgagaactggtagtagttaaggtcagctcagccaccactaaataattgatctcaactggtagagatgcctgtttatattctgagaaaagtactttgcagatgctttgactttcatgagaactgtaatggacaagctcagacaaaatgcttcacaaactgacttgcaataacactgggttcaaagaggttgaggaggcagggtcaagaggatcaagaaaaggaagttattttagatggagaaagagaagcccagaagaaaaagtcacgatgatttttctttggctggattaggactgtaagctttcaaaatatacgggcaaatcctctctgaaatcattgtcagatagatgtgtttctctttgaaaggctatgtgtaactcttttagttgtttttccccttagtttcaccagtactgatactctgaagataatcgcttcaca

SEQ ID NO: 11976 - DNA, 1055 bp, Homo sapiens
ttgttttgttttttagcttttcccttttctggtagttctcagaaagattctatttactagttgactcagaaacaacagtcatctgcttggaaatttcacaaggtaacttaaaattatttctttattttttatttatatataatagttgcacatattttgggagtacatgtgatattttgttacctgtatataatgtgtaatgatcagatttacagcctccaagtttctggtagtatgagtctagtttctcatgctgtaatgattgtgggaattggtctacagttgcccgaggtttttctggccagggaagttctcttgccaactatttcctcctaggaatgtttctcttttatgtctgatcagtcaggaagtggtagttggttctcatgttcatctctttttgaagaaggaggcataaaggaacagggaagaggcaggtccttaggctacagaacgaatcactgactgcattgtagtgtgaagatttcaaaggaaaaaaatgttttggctaactgatgttctgttctgtctaggagctcttactaactggattattttcagaggtctcctctagccatccacttgtagaatatgtaattaaatgttactttatggtttgctgagggtatgagccaaggacaaacagctatatcattattacatacttgctccatctttcctacctataatctttctttctgctatatcatcacttacctcattttgtcttctgcagtttgttttctttacctttaaaatatcaatggattcatttaacattttttttttttgcacttactatatgccagtcactgtgctgggtattgaggagataaagattaaaaatatactgtactgtccccaaggagctcattgtttattggagacatgtagttagaggtatcatacaataagataacagcttgaagtataatacaatacaataatagcatgtcaaatatggtgggatcataggagaccctaagcctctggaggatgggtgagtgtggggtttttagttaaacataagttcagtgtaagccaagataataata

SEQ ID NO: 11977 - DNA, 1043 bp, Homo sapiens
gctctgttgccagaggaaggacagtggatgatggataggcggagacaacacatgtacactgtggccaaataaaatcacccctttaccttcacgaagccacatttcctaagtccttacaagcaggatataaaaattggaagcctttaatgattttggtatttatactattcttatttccagttcattgttctggggctttattttaggactctttcaggtggcgtacacttcctgatggaaaggagaattatccgagtccttttacatgccacaaagcctcaaagctctggtctggtctaaacttcaccttgacatcagctaatgaaaaaaaggattctaaggaaatcaaggatgggggtaatggtgaggggtcaaagaggaaaggcagcagtttggtgtggctaaattatacctcagtaatgctgctacgagatttaaaaagggaggggagtttctgaaacaaacttcccaaataagcacattattcagaatcacagaactttgataaatgaatctcattcatgaaagcatatgtttatgaatatttctcacagtaaatttgtgaatattcccacttttagcttagatgcaagtagcttatcttgtgtctatgaataattgtggctctttatgtgtacacaacaagcatgaattaataattattgtgatagagatgaacacaaagcaaggtgttatataagcagggtttaaaattttcaaaatttaaaatgtaaaatttaaaagtaaggaattgttaatttagatctcagaaattagaaaatcttactgctaaaatgctttttattaaaaattccccagtaaaacaaatataatttattttatgctacaactaaatatgaattataattaataattaacataatatttgaaatgtgatctttatgtaacttttttgaaaagtcaaagtaagctttttgcattcttaaaagtcagtatcttcaaccatttttgtttcttctgttttaagtatttaaaactcaggtccatgttgtactattgaagacgttggttggttatgacat

SEQ ID NO: 11978 - DNA, 1051 bp, Homo sapiens
aagtgtttttgttctctgatgaaactctaaaagtttagagttaagtttctgatttgcagaacataaatacatctacacaatacatagactagagaataaatgggaataaacttattaatcttatttgtaatttgaaattcagtgttattttgttcctatctttaaaaatcagaattgtgcaatttcttctgaagatcacatcatttcctaccttttaaattttaatttaagtatcttctttttttttatattttacagctaattcctgaatcattgcattattattatgaaggaaaagggaaacttgtatttaattcattaatttctgttacctggttttagattgagatttttgattagtccctaggtttattttatgagattagccatcttttataaaggttgatatgcaaagttagtttaattattagaccattagacttctaaaaatttgaactttacatttcattatttgtccctctaaaagattaaaaggaatcttagagcgtggaaaagaagaattggctgaagctgagattataaaagattcgcctgattccccagaacctccaaacaaaaaaccccttgttgaaatggatgaaactccacaagtggaaaaatcaaaaggtaaggtacagctgtggtaactaggtttataaaaagttttccaggccgggtgtggtggcttacccctgtaatcccagcactttgggaggctgaggcaagcagatcacctgaggtcaggaattcaagaccagcctggccagcatggtgaaaccccacctctaataaaaatacaaaattaggcgggcatggtgacacacacctgtaatcccagctacttgggaggctgaggctagagagtcgcttgcacctgggaggcggaggttgcagtgagccaagatcgcaccattgcacttcagcctgggcgacagagcaagactctgtttcagaaaaaaaaaaaattttccaatgaagctctgttttgtacagtgttatttaatattgttgtgtatgtgaggaagagttcttaagtatttgtgggtgttgt

SEQ ID NO: 11979 - DNA, 1072 bp, Homo sapiens
ggagttgtcatcaagcaggatgggaaagagtatggaggcgttctgggaggtttggagtttggctttggacatcttaagcataaaatttctctttgacagtcacagctgcatgaatccggggtgagaggtctatgctggaactgtgaatttaggagccatcaagcatagaggtggtatttagtcatgagactgggtgagatcaccagtgagtagagacactgcacagaataggtataaggactaagcccagtggctctctaatgttaagaggtcagcgagaagaaacaaaggagactgaggagcagccagagaggttaaaggaaaaagtgtctcctcaaattccaattagaaattatcatcttcatcagtattttactaaaaaatgttctcctatttcactctgacaatgaaaaaaggtagtgaccaccaaaattatggatctacgattgtccatttttcattgaagcaattttttttttttttttgagatggagtttcactattattgcccaggctggagtgcaatggtgagatctcggctcactgcaacctctgcttcccaggttcaagcgattctcctgcctcggcctcccaagtagctgagattacaggcacccaccaccatccctggctaactttttgtatttttagtagagacagggtttaccatgttggctaggctggtcttgaactcctgacctcaactgatccacctgtttcggcctcccaaagtgctgggattacagggaagcaatttatttctataaaattttagaagtcaccttgatattaaagaatataaaattagagcagaaattgtgaggttataaattggtttttaagaactttcttatataaaataaaaatatagttgatagatgaaaaacaatagatgtcttagtttcctagggttactctaacaaattaccacaggctgggtgaatgaaaacaacagaaatttatttcctcacagttctggaggccagaagtctgaaatcaagcaggcttggtcctttctggagcccgtgaagaacccattccatgcctctcttgcagcttctggtggtggcta

SEQ ID NO: 11980 - DNA, 2253 bp, Homo sapiens
ccttatgtgggaagcaatgagcttattctctgaaagggtccgttcttcacatgcatgcatcgtaactattttcaatacttagatttcttgaaagccttttacaagaaagccacatatgtattttgtgaaggttaatatagttaaactagagaatagaatctataagttcacctcaatggcatattgctgttggcttcagagaatatggagtctcaaggtccagtcctgtagcctagggactcccagtcttccactctgacctggatatgtaggtcttgaggtatggggccatttacagatggactgaatggtggtgccagtgtcagtattaaacagcagtcagcctattcttgctttttaaacttaatttataaagaggagttctcatatatttgttctgggtcggcctaagttgtgcagcattttagagtccagcagcaggagaagggtttgggaagagcagatagttggttggttcctctttcctgatacatgaggaaatcacatgtcacagtgtgcagtggcatgacaggacatgctttgacggtaaaaatctgttaagtggactcactgtttacattgggttcatggcttaactttgaatgccttttacttgtattttttattttgcagtatgaaatcatgaagtcagcaatgtagagctaacaggtgatttagagcttggagatataattcaatgtcattttgagggttaggaaactgaggctcaagttcacagagctagtgaatggaagagcttggactattccagtgtcttctaaatgattttgttaataagtgcagagcgttgacctgcttggttcctcccacccaccttctagaacacatccttcaaagaagattgtattgacagttaaatgaagaaaattagaattcatttctagttgccaacatattccctggttgttactttaaggctttgatgtatatctgtgttcagatgttccaagaaaccaactctaacttggtaaagctgttgtttactcttagtttctttttgctttttcaggaaacctaaagatttttcatgatgatggtgtattctgggtcactttctcttgcatagctatcctcattccagtagttttcatgggctgcctaagaatagtaagtgtttcatcaaaagttagatttattgattatgttatcctgtgtgttcagctgatcacttatttcatcattttgcatgttttattcactggggagggctgtgttacctgtatcagatgactgattctaaatagccttgttactgtgaaaacgaagttctatttatgattaccacatggtgtttgtttttttcttttttttccaccaaatggagcatcacagtcaatatgcttttaacagtgggagcagagaaggtagtgcttactctagtacaccaacctgatgggtcattagtttcaactggcttcagaagagtgattcttcctctaattagattttattgttgaagttccttcatatggaagatattttccatagtatttggataagctgaactgtgttttaagaactcatatggatgttgaaggttgttttcagtttatctttccagggaacttctgttcagctctgagtgggtctggtcctttttcatgcctgagggagcagatgtgattgcctgtgattgaagccagtggagagttataaactatttttgttctaacatggatgatgcctaaactcttccactcttccacagctgaacatactgacttgtggagtcattggctcctattcggtggttttagccattgacagttactggtccacaagcctttcctacatcactttgaacgtactcaagagagcgctcaacaaggatttccacagagctttcacaaatgtgccttttcaaactaatggtaagactcttaaatccaaaaaccagtgtgacagcacagtaggagtcttgacccacctatgctaaccagagcacttggaaactaaatttaaagaaagtcaactgggacaaaaggagggaacacagcatacaatgctgtgagaaccctctgttatgataactcaggatcatgggagtaaagcatttaaaattttaagatgaagataaaaatctactaaatgaatttcattaagaaatttccaagattatttaggtttacctggtcattctcagaggggagaaaaatactgacagtaaagatgtttgagacttatgggtggggatggaataagggatgagaatgacaacctgatttaatgtta

SEQ ID NO: 11981 - DNA, 1068 bp, Homo sapiens
gtcagttcacttagcttttttgatgaaggttcgttctataaatattaatacaaagtatcaaattggatgtattatccactaaattttcattattttttaggaagagtgtcttccaaagtgttcttcactctttttgccctgcttggtttcttcatttgtttctttggacacagattctggaaaacaggtattatgtccaatgtagttgctatttccattttgcagtcttttcagtgttgctggggaatgacctgtgaggagagtaagcacttacttatctctactatcttcatagatttgtagctggggtcttgtagtcgtgagtctactgagttgcaatgcatttttatttttttctattctccctacagcggagtataaccttctcttattaacaggggaatacaattatgcagtgaattttatcagctgctagatctgttagttgactaaagataaccgagattagacattggttgtcagggccgggctcagtggctcatgcctgtaatcccagcactttgggaagctgaggtgagaggactgtgtgaggccaggagtttgaaacaagtctaggcaacatagtgagatcccttctctaccaaaaaattaaagacaaattggggctgtgtgtggtggctcacacctgtaatcccagcactttgggaggctgaggcaggcagactgcttgagctcaggagtttgagaccaacctgggtaactcggtgagaccctgtttctccaaaaaatacaaaaaattagccaggcttgatggtgtgtgcctgtagtcccagctacatggggaggctgaggtgggaggattgcttgagcccgggaggcagaggttgcagtgagccaagattgtgccactgcactccagcctggatgacagagtaagatcctgtctcaagaaaaaaaaaaaagaagttggttgtctttgtaaaaatatgtgtggatattggtgatggcgattgacttggtttcacatgaatcaggctatggggctgcagtgtacagtgagtttgaaatgtctgctcagtcctgagagattcagatgccaaagggaat

SEQ ID NO: 11982 - DNA, 1137 bp, Homo sapiens
ggaggggttgttgttgctgtctcaggggtggcagaggtggaaggggaggtaggagaggcaggcacactcagtgtgacttttactgaaaaaaagtctgtatgtaagtggacccatgcagttcaaacccgtgttgttcaggggccgactgtgtatgtatagatacgtacacacacacacacacacacacacacacacacacacaattttcttctctgaaccatatgagagtaagttgcagacataaagacctttttgccattaaatacttctgtatttatttccttacataaccatagtaaaattatcaaaattacgaagctaacactgatacagtagttatttaattcacacgttagcacatttactagttgttccaatagtgtcctttataagtaaaaaaaaattatttttggctgggtgcagtgtctcacgcctgtaatcccagcacattgggaggtcaagatgggcggattgcttgagctccagagttcaagaccagcctgggcaacatggcgaaactccgtctctacaaaaaatacaaaaattagctgggtgcggtggcacatgcctgtcgttccagctacttggtagtctaaggtgggaagatcacctgagcccaggaaggttgaggctgcagtgagccgtgattgtgcttctgcactccagcctgggcaacagagtgagaccccgtctccccgtcaacaaatttttttttcccctgtccagggttcagtttaggatcccacattgcatttaaccgatgtgtctctttatagttgtataatctggaacaagtctttttttttttttttaattttaatcttttaagaccttgacttttttgagaagtacagaatatttattttttttagaatgtcttcaatttgggttactttgatatttcctcataattaaattttgattatgcttttttggcaggaatacaaaggaagtgatgtgtccttctcaggagacacttgtctctttatttatttgtctctttactggtggtgacatccttgatgacttggttattggtgtcttgccaagtttctccactgaagtaactgttcctttttttaagtgtctttaggggaggtacttcgagtgtcagtaaatatcccattctcaaactct

SEQ ID NO: 11983 - DNA, 1032 bp, Homo sapiens
atagatttccagaaagatgagaaggtaaacttagcttagactgggcaaggaggaatatagactttcataaaacaaagccaaagtactctggactaaaaaaatactgaacttcagaactaacagaaggatacaaactgaaaggccagagtcagaagagaagggcaaaagtccacaggcagtagcagacatgaaaattagctgtcggcaggtgagctgctcttctatacacctctctatgggtaggaacttgaaatatccactatctgtctcctggcagttaaagcatcttcagaagtacagtcaagatatctgtcaatatcatgtgttttacatgtcaaacggaagcaaactagcatgttacagcttaaacttcttaaaacatatgtgaaaagtgtaggcagattctactttttaaaaatattgttttgtgagttaacggtatttttatcaaaataataaatgtacttaaaaacaaatatgaaaaaatagtagttcctactgcaccattcaccagtccccaaaagcatattgtaatagtcaactcttcattttttatctatttcttttagcatatttctcaataatatgcttacattgctatttttgatttactggttttaaaaatgtattgacttcctttgatggagaataaagctcatccccaatttcatttttcaatagagctcacaacttggggtaaatcaatagtattattataaatatgtaattattgtttactattgtgataaatgacttatgattatgattttgggtttcttctgtttgctttacatctctttatttttcctagagttaaccactgccttattttttcatctgtttgattttcttttttttttttttttttgagacagggtctcagcctgtcacccagactggagtgcagtggtgcaatcatggctcactgcagccctgatctcctgggctcaagcaagcctcctgcctcagcatcccaagaagctgggactacaggtgcgcaccaccacacctggctaatttttgcatttttgg

SEQ ID NO: 11984 - DNA, 1034 bp, Homo sapiens
tgaaatatttacaaatgagcctaacgtttagttgttagagaaaaatctaggctgctatacaaactgtcctaggctttctggatggataaatgtctatattttaaagaggtgccttcaaattatttaatcaattataggaagaaagtaaaacaattatgtccacgtaagcacttggactgttttgcaaccagctattgtatttcagtccactgacaggaacaatttttcactttctataaggagtacagaaaatctgattatagaatggaggaaaggaacaaataggaaatcagaaagattaatagagataagagccaaagagtcaattgttaaaacatgtagcaggaacttagtaatgagaagaattagagaagttaggaggacaaaaatatgggtaccattctttaaagagtaatagattcctcagatataccaagatcaaaaagatacagaaaggttgaaaaactattatagattaaagaagcttaaaaagacatggcaagtaatgctatatgtgattctggactgcattctgtatggtaagaaaaaaatactgcaaaagacactatttgaacaattaaatttggaatatggattgttgattaaatacaagtttgatattaatgttaattttccagaacctgataactatactgtagttatatatattcatgttcttacataccgaaatatttaggcataaagggtcaagatagctccaacttgctttcaaataactcagaataaaaataggaataggtatacatatatatccatatataaatttattttcctatatatgtaaatatttttctccataggaaaaaatattcattttatcagtgaataaaggatatatatcagttccttgtgctagtcttccaatttttaaaatgatttttaaactataacaacatataaagttaccaagagttaacacagagtggaggaactaagcagtttcttaaacaaacagcctactgtattcttaaacactcctgactaccctgacatcaaagtcctcatccacccat

SEQ ID NO: 11985 - DNA, 1035 bp, Homo sapiens
aacgatgaagaagcccaactggagtgttgctttgaagatgacgccttcttatattttcatagcaaatgggtggtatcaaaatcagacattgcttcttgctgataaaaagcctgaaggaaataagtgaaactacatctatgggaaaaaaaaaaacattgagaagtgcaaatgttcgcatccttttgtttttaaaagatatgatgtcagaataaaatgtggaaaacatacggaaaactagtctagactttaaagaattgtgatcaggtcacattgttaataaaaaaaaaaaacgggctagtccctatgttatagccatattaatgttaagccatattgacaagaccagttatccaataatttggtcttaaaaagtaactacttttctttgaactctggttattgacttatctaactgttgaagatagagtcttagaagactaaggtaaattctcacaggggcagatatgtaggtgttatgtaactagggtgtcattcacaaatggtatagtagaatcttatacacggaaaagaaagcacatttttttaaaaaagatgccaagttttttaatctaatcattatattattggtgtattttgggcaacatagggtgagttataaaaagatccgctactgatagtgaaaattaccggtttgtaaaacattaagagaaaaaataggatattttatacatgtggtgagtggagaacagggtaactttaaatgaaagtgtaaggcaaattgtaagcaccacaagatatatcagatttgagaggtgccatgttaaacattgtccattaaactataaaactgtattatgaagtatttgcattcagggtgtcctgaatatgattgattctgtattagattgtgttctaactttcttactatttaaggattggttctaaatcttcacattataaaagattaaaaacagtgagagggagctatcacacaggtactattaaaagctgtatttggaatatgtgtaccaatatcagttttccttttgtagtactgaatggcagtagaagaat

SEQ ID NO: 11986 - DNA, 1049 bp, Homo sapiens
ccccaccaattttcagaacaacttttcctccactgaaagtcattcaggctagattcttgtctgatagggtagaaaatatcccagaaaagaaacaggtaaattctgaatatccatcctccctatgcagagttttaacaagtgtcagataactacagtcatctgtactagggtgatttaatttgatttttaaatttaattttttgaagaagatgctcacttatgctgttacttcataaaatgaatacacctgttaacaaaaaaaaaaagaaggaaatattatttaaaacagctctctgttcctctcagagtaaaatcctgggtggtgagagagatcattgaagtaaaatgtataggttgagcatcccttatctgaaaatctgaaattcaaaatgctccaaatttggagcattcaaaatactccaaatttgagcattgtcaacacgatgctcaaaggaaatgcttaagagtgtttcagatttcaggttagggaggcctccctggcaaataaaatgtacatattctaaaatctaaaatttgaaacttctgatcccaagcattttggataagggatattcaacgtgtagtattgtaatttggttattcagaaaaactttgttgtttgtttgaaaataatagtaggaacactgttagactgacaatatgattggagctagtaataatttatgacagtagactttctttttagtagtaagcttgaggtaatacacttgactgtgaacacagaagaatttacgagaccaaactaccaatcattccagtgcatcaggaaatgctttattgagcaaggttttagtatactttatgttgaatgtcagttaatacatttccctaatcattgtattgccttttttaaagtgcctggtgttttgctaggtaacacatagaacaaattaaacaatgtttagacctactagggcatattctgaaacttgacaatggtaacagacagttaattggttataaagaaagaaggctcctttatggagagtttctattttcagttttttagttaattgctagaattagta

SEQ ID NO: 11987 - DNA, 1034 bp, Homo sapiens
ttattccaaactatacagtataaatatgagttgttattttacataggcctgttatactaattttctagatagatgatgcataagtttttaatcttctgcttgcacatctagaaagtacttattttatcattatggtgggatggtaaagtattatgagattcacatttgctttctttttgtgagtacctatgtttataacttttttccaagttacatgtatgtatttttcttttagagtagttaggctcacagcaaaattgagcagaaagtagtgttcctatatacccgtcccgctacaggttcccccattatcaacaacttgcatcagattggatatagttgttataatcagtgaacctatgttgacacatcatcatcaccatagtttacattagagttcgttcttggtgttgaacgtacattctgtgagttctgacaaatgtataaggacatgtatctaccatactgccatacagaatgatttcactgctgtaaaaattatctgtgctctgcctgtttattcttcccttcccactgtgtataacatttgtacttaccaagtttgaactttactacagatgatttggaatattagttatttgaagaaatagaattaaaagagataaaataggactacatctaatgacacaaagttattgctgaaaattgtaggagttaacatggctcaatggtagaagtattgtagagagaaaaatttttgtagtgaaaatcagttacttgtggtatgagtttatactgagtaatgtaccatttcaagtccatcaagtccattgtgtagccccttatttgtcctactctttgtatctacaatatttcattcagtgtctgacaaagataagaattttgttaattgtgcatgtatgcatgaaagatgaattgagatacttaagtgagtagaagccctactttggtggtcctgatggcacatccattactgatggaatcaaacaagcttatggagctcagctattagacctcttagccaccctgcctcatttgctttcaaggaaatg

SEQ ID NO: 11988 - DNA, 1035 bp, Homo sapiens
tcatgattagatgcaatatttttattttaaaaatcagttttatgttttgagtatcctaaagatgcatatattaatattttagttaactttattgatcttcttattttaaaagcagtgcaagaaaaggtaagtctcatctcttgatcagaatcctagttttgaacctaagaaatgcctccattctgaaattttaatagacttttataattacttttatataatgttttgttattacttttctaagggataacaatagaaaacaatacaggaagttggccaacccaagacaaacgtagcattccagctgttgaccaatttcgaatggaaaattcggacagaaatacaaatgtgctgccagccatgcttggagagcctaggttggttggtagctgtgctgcatctgcaatgtcatggccctggctagttagtctgcagcacccagacaacattattatagaggctccctggccacaaaacagtgggtcctggcagcagtgcattctaactttaggtctgtgcctgtgcctgtggtgcagggtctctgagactgcttgttcaagggctcacaatgggtgtacccatctgctctccctatgtcacaagaaacattaaagtttatgctcccgctgatatagtcttcaccttgcaaatcaatgaacatattaggtgaatgaaactttctgtccttcaacaatacacataccactaatagtttttcattttaaaagctgcttttggccgggcgcggtggctcacgcctgtaatcccagcactttgggaggccgaggcgggtggatcatgaggtcaggagatcgagaccatcctggctaacaaggtgaaacccgtctctactaaaaatacaaaaaattagccgggcgcggtggcgggcgcctgtagtcccagctactcgggaggctgaggcaggagaatggcgtgaacccgggaagcggagcttgcagtgagccgagattgcgccactgcagtccgcagtccggcctgggcgacagagcgagactccgtctcaaaaaaaaaaaa

SEQ ID NO: 11989 - DNA, 1035 bp, Homo sapiens
gagctgggcacccctaattctttatggaagtgtttaaaactattttaattttattacaagtattactagagtggtggttctactctaagatttcaaaagtgcatttaaaatcatacatgttcccgcctgcaaatatattgttattttggtggagaaaaaaatagtatattctacataaaaaattaaagatattaactaagagaaatgtcctactttattatcttaatgttcagacatcatgagatttattatttttttgaaaaatatattgaaccattgaggaacctttatgatgtatcacagaaatcttcatagattctaactagatggaaaaagagctctatttatttgtgttcctaggcttaatgagaattctgggcttagaacatcaacgattaatacccagaattctttgttttgagaatattatggagaatgctctaaaaatctagggtaaagatctaaattcaaattttaaatatatatttatatttaagaaataggaaaggcaaagttgaactcacaatttgacatttatttttagtgttatttatttcataacttataaaatatttaatatatacatacacactcttcttttttctctgtacaaagtggttttaatatcagctttcaaaactgatcttataaaatgtaaatctaaattgtaaaatagttaagttttaacagtccctcccaaactttgtgttgattattcacttgctaaagagatgtgaggaatcagccttcagttttttggcagtagtatattttggaagtgaagaaattggaacacctgtttctaatttggtcttcatcattagagacaaaaccaaaacactccaggcagtactgtttatagtgctgagccaggtagcacacagacatagtagcctaaaggctcacataattcgcatgctcaggccagggcagggtaaaaatagccttctgcttctttcaacccagtatcaggaagcactaccccagtgttattatttgttttgtcaaggtaagtctaaataaacaagaaaaact

SEQ ID NO: 11990 - DNA, 1111 bp, Homo sapiens
gttttgctgcaaaatattaggagatttttatttttgttatgatggataacacaggagctaagacttggatatgcaatcaaggatattcacaatacagcccctatgagagagaaaactgcctcttttcattgcagtattaccccagagttctactctgcccaaccccatcctgccacatttcctggtatccaggagtatctttcatggggcaaattaaccagccagtgccacctttctcttttggtcagattgtcccagggaagtcttctttatcctgtctttttagctttcagcatcctattatatttagcctcctctgcaggatcaattgatccatgctaagcagaatcacctgagaggcttagaatcctaatgattcctgggccccaccaagacctgctgaatcttatcagtcctggcattctgcactttaccaaacacctggagagttttacgcaccagaatttcagaagtgttgatttaagagagaagtaaagacaaaatattttagatcacggaggattattatcagtcgtcagctggtgatgctgtttagcagttaaggaaattccagatgctgcagggcaataatattgccaaattctggagcagttttacgcttacctgcactttttacctatgcagggatccccaagagttccatcagtgccggttgaaccctctaccagaagctctgagagtccttgttgttcttggtgtctttagtatcacatgagttcttaaagggattcagagttttctgtgactccaaaatcaaagtgtgtctgtgcctgattggacaggatatatactgatgttcgattttatctatttttcaccaattatgggctagttaactctggcctttcaatataactcagagaaatgacccatggacttggtcagttcagagaagaaaagttattttaatatttttcccctttgaaattgacttgtcaattcggtctaaatggctaaattaatacaatgctatgaatttaggtatgataattattagattaaaaatctattgtggggccaggtgaggtggctcatgcctgtaatcccagtactttgggaggccgaggcaggcggatcacgaggtcaagag

SEQ ID NO: 11991 - DNA, 1032 bp, Homo sapiens
gctctagcccttctgcccctaaccaccgcactctactgcctccttgtggcccacctgaaaactgggctacagcctgcagcatcactgcccagtagaaatgagagccatacatgtaatttacatttttttaggtagccagattttaaaacattttaaaaagtgaaattatttttaataatatttatttaaccctaatgtattcaaattattttagcatgtgattaatattaaaacataatttttaaaatttaatgtgagaaattgaaaatattactgagatggtgtgcattcttttttttttaaatgaaatatttggaatgcaatgtgtgctttacacttacagcacatctcaggacagccatatttcaagtgttcagtagccacatgtaatttgtggctactatattgtacaacacagatgtttattaataaccttgacttcgaaagaaatatgagtctttgtccaggccagaagctctaaataagacgtgactctatcagagcatccaaggcaatcttatagcaactcatttgaattcttggaattatatgacagacggcttcagacccattcatagcagcagacttcactgagtgttatccaaatatatctggccccttttatgaccatttcactggactttgcagctaatatgtcatgatgctgtgcagcacatttacagtgtgagaggttgataagaagcagctttccatgccagcattcttaatttatattaattcttgttggctttggttagaatttaaaatgtcaaaaaaaaaaaaaaaagaagaaagaaaataggcaagattagcatgaactttttatggatgaacagagcggaagtccctgatggctcaacagaatataatagaatatttaaattcaggatatgggaaaaatatttctgtgaatgctctgttaaaatagctgttggtgtttattactgaaatggaatataaaaagaacttcttgaagaaccatgtcatacctcccttattgccaaaactaccttttgttcacataatagaata

SEQ ID NO: 11992 - DNA, 1035 bp, Homo sapiens
acttttcaggttgtatccacgccatgcaagtgcgctcaacaaccttggaacactgacgagagacacagcagaggcaaagatgtactatcagagggctctccagctccatccacagcataaccgggctcttttcaatctggggaatctcctcaagtaagtgggacgtttaccatcgatcaggtggccttgcgattccaagaaactctttccttctcaacactcatttgattgtgctgcacttgcctctctctggagctgaataattagggttttcagactttgggagggtgtaacatgcatctcaatttcttttccttatcagtcaaaagctgtatttcccagagtgtctttctggaaatagtagttctggaagattttcatagattgtctctaaagaagtaagaatggaaaagtgttacatggtcagataaattgagaacatgctgagctaagcagattgtttatttatggcaagaagctttaatatgctaatattctttgtgaatcttcaagaagggactgtgggatagtcatttttgtcttttctttgtgtgtgtgtggagggaaggcatttccaaagacaaatattccataatatactttgggaaaagcagcattctctgaaggtatagacaaatggttaaccatacttctacccagtttgtgttgtaggtgagaaataaagtggtgcttgctggaattagtagtcggaattagtagtgatgactttggtgcttaggaataattctcagacataacctctagtgtttgctttttacttgctgccctgataaaggttgatagtgtgattaaagttactgaagactacagtaaagggtgcttttgcatcttgtgtgtttattaatatagtctaagcatgttggtgatggtccagacaatgatagtagtaacggtggtggtagttatggaatttagcttctaaacttaaaaaaaaaaggttaacaaatatcagaaatggaaatttaaaaggtaaaaatgaccagaattggagcgtaataatatgtttatctgtgc

SEQ ID NO: 11993 - DNA, 1040 bp, Homo sapiens
gcataaaagtattatgttcagtagcatgattgtaattaacttcttttgttcgttcttttttcttcaatttaaaaatggaagcaatctcaagaaaatttgtccttgggaaaagaacaatgatttaaaaactagaaaagacattcaaatgtgtgtgattacataatgccacttagctctgaatgtttgaactgtgctgaagcttgtctgttctcttgtcttattccaatgtcattgttccaaggccacttttcttttcagatgcttgaaaatgtcactgaatcaggaaaccaagtcttggttctgccatttattggttgactgaccttgaacaagacacaaagctttttttgcccccagattttctcatttttacaatagagattttagtaaactcgctaaaattaacactttggactatgatactgccttttaggaaagttcattcttcttctataagtatgaactttcctaaaaggcagtatcataaaccaaaatgttaggaggaaatgagtgttttttatttatgatattgtactagaaattttaaaacacttataattagaagtgaatttcataatctttgattccttcaaaccaaatacctaatagctttcttaacactttgcagcatgtggttttgacttggttaaggggaaagcagcccttaattgtttactgtgtcttcagcccaatttgggaaggagatgagtgcttgataaatactattcaataaggacagaaatacaacacaattctttatattctacgtggtttaaggtaagagtcttgtgaaggcttgccaataatagggaatacacctgtagtatagaagaccaaaaagtggcatcaatctgtgttctaaatatgtttttgcttagaccagttgaatatatcttagcttttctttgtagtactgatgattccaatggaatcattcttcatttgatagatattcatagagcccctctgccataaatgctctactaaaatctagtgctacacaagtaagtgaatctcagtgtctgccctcaaagagttaa

SEQ ID NO: 11994 - DNA, 1046 bp, Homo sapiens
gactactaaaaataatgctactgtacatatttgtgtacaagtttctttgtggatatatgttttcatttctctatagcatataactaggagtggattgctgagtcataaagtaattaagttttcaactttttgaagcactgacaaacttccgtagtggctgtaccatgttgcattccctccagcaatgtacaagagctcctatttctctacatcccaaccaacacttgttatttatcttttgttattttaattaaagctatcctactgagtctgaagaggtgacttattgtggttgtgatttgcatttccttaatgatcaatgaagttgagcatcctttcatatgtttattggccatccttatatcttctctggagaaatgtctatttaggtctttgcccattttttaattggattgtcttttttgttgttgagttgtaaagaattatttatatattcaggatattaaacccctaaaagatatttgatttgcaaatactgtctctcattccgtaggttggccttttacattcctgataatgtcctttgatgcacaaaagtttttattttttattttttattttttttgagatggagtttcgctcttgttacctaggctggagtgcaatggcgcaatctcggctcactgcaactccgcctcccgggctcaagcaattctcctgcctcagcctcccgagtagctgagattacaggcacccaccaccacgcccagctaattttttgtatttttagtagagatgtggtttcactgtgttggccaggctggtctcgaactccagacctcaagtgatccacctgccatggcctcccaaagtgctgggattacaggcatgagccaccatgcctgaccaaaagtttttaatttttgtgaagtccaatttagctatgtttttctttttctatcatgctcttattgtcaaatctaaaaatacatggccaaatccaaggtcatgaagatttatgactgttttcttctaagagttttgtggttttagctcttatatttaggtcattgattcatttttga

SEQ ID NO: 11995 - DNA, 1082 bp, Homo sapiens
tgcacaagcaaaattaaaagccctgggagacttacttgctgcaagtttgaatccattcttcaatgcgtgcacgagttgagcagcagagattggaaaattcactggcttgagttatccatgtataacctctgcccaaatcattggctgatcacaaagccatgttggcacaagagaaatccccagaaatccaggcaaaagaaaaaagaactgagtaataatttcagcattctgcagagaaacagattttccagtttgagtctatggaaactcatcaaatgtattcaaacaggaaaatcaacaatttcagaagaacaaaatagaatccagggtccctacaatgtgtggcatgcaacacccagtttaaccaacgattactagatatacgaagaaacaggagtgtgtgatcaaactcagttttttaaaaagtgtcaataggaaatggaatagaattgagaattcagggctaaatccacactaatgggatcaactgttttttgacatagttgtcaaagtaattcaatggagaaaggatggtcttttaaaaatgtaactgaatatctgtaaggaaaaaatatgaatcttaacccttaccttatacagtatacagaaattaattccaagtggatcatagtcctaaaaataaaagcaaattacaccaaaatttctaaaagaaaaggagaaaatctttgtgaatttgacttaagcaaatatttcttagaacacaatgtgaaaactgtaaaagaaaaagttgataaattggacatcatcaaaattaaatatttttttcatcaaaagataatgtgaattaaatgaagaggcaagccacaaattgggagaaaatatttgtaaaacataaatctacaaaggccttgtatctgaatattaaaagtgctcttaaaactcaagattaacaaggcaaaaactaaaatggagaaaagatccaagtagaccctgcacagaagaagatatgcaaagtttttaattaataaatacatgaaaagatgctcagcatcattagtcattagagaacttcaaattaaatccacaaagagataccattatactctcactataatgactat

SEQ ID NO: 11996 - DNA, 1052 bp, Homo sapiens
tccttggaagtaacttgaattcagagtttaaaatttctggaaggaaaatttatcatagccttagaatggggtattgaaggtcagtctgagtttctgagtagatagaactgaaatatgcatcattgttttcttagaatagtgagctcctttccttcagaatctttatttgaatatcaaaggagacatcaaaggttgttcgactcctccatggaatgcctttgcctattaaggtttagacgaggcacttcatgggttcaaggaaagtacattaaagagagaacccataaacacttaagtttcctttattgttaagtgtcaaaagacacttaaaattcttttgttgtttttgttaagcttttgctttttttctgatgtgagctgtgtctttgctatattctgatcaactgagaaatcttttttcttgagtttcaaagagaagcagtaaatctgcatttctgttgaaaaagctctgattccaaaacatttttttgatctgaatatgtgactctttactaatttcctttttgcgttgaaagagcaaaggaagttaagtcaattaagattgatgttctagaagaaatttcatatatcactgtttatgatttgttgctataatgttaaacagttacaattcattgtatctgagatgtttgctacctggagctgacatttaggcaaaaattatcaggtgtttatagattctgagaacagctggaaagactaatttcatatcttcattgaaatcattagtattccgggtaagggaaatggcactattaccatttccagtggaaagtggtttttctcttccaacttgctgccacattccaaactgtgagcacttttattttgtaccctgatctaccacgagagggtaaggaaaacacagaaaaagaaaaggggtaggccgggtgtggtggctcacacctgtaatcccagcactttgggaggcagaggcgggtggatcacgaggtcaggagatcgagaccatcctggctaacacagtgaaaccccgtctctactaaaaatacaacaacaacaacaaaaaaaaa

SEQ ID NO: 11997 - DNA, 1081 bp, Homo sapiens
gtttaaataccacagtcctttgaaacaagaaagaagggtgtggggaagccaggtaatggggaggtgacctggacaagcagtgtaagcaaggataagatttgctgtgcagatttcagtgggtgccctctccactgatgcgtctccagtgactgagtcctccttttcctggtatagatggggagacacacttacaaatggagagttcctctgtggatgtaaatttctcttaccaaagagtgatttgtattctgttttcagagcttttcctgtatctgcagtttctcaaaataatcagctcaaaataatccttatgccaaggcagcttattttggagtagcatattctagtctcttacactagaaactgatgactagagaagagttccccaagtttgaccgatgggccacctgtgcacccgggatttgaatggtggtattacaccacggtggtgatagagtcagcccctccagtagcatcctcccctacaaggtgctgtcatctgtgtttggcctctgctctgaactcccatcagcctggtgctcatgccttctgaggctgctcattcttctggggtgaggactcttcttccatcagtagacctgtaggtatttatcggcagcattttgtcctcctgaataatttgttttccaggataaacaccctcacattttctagcttttcttcatataacatataaatagttttaagttttcttattattctggttcttttcgttagatatgctgcaatcaaaagatgtctctaaaagtgagaggcccagagttgaattctcctggaagtggagtagaaccagcaccttcctccttatagactgtggatccattcatctagcctagtgtcaagtcttgtataacagacaggtcattcttggatcataacacatgtgctgtcagcacactcttcaaggtgttatattcctttttggcttcattttcctccacttttgccctctacctatggagttataaagtcttaaattagaatatcaaaaaaaattgtccaattaaatttcagtgtattagattaggcctctaatacactcacaaggaaattagagtat

SEQ ID NO: 11998 - DNA, 1073 bp, Homo sapiens
ttgttttttgagacggagtcttgctctgttgcccaggctggagtctggagtgcagtggctcgatctcggctcactgcaagctccacctcccaggttcacgccattctcctgcctcagcctcccaagtagctgagactacaggtgcccgccaccacacccggctaagtttttgtatttttagtagagacggggtttcactgtgttagccaggatggtctcgatctcctgacctcgtgatctgcctgcctcggcttcccaaagtgctgggattacaggcgtgagcccctgtgcccggccagctcttggaattttatattattctttttccattttgaactaacgtttttattccatttggcttgtagaattttattttaattttatacaattttatgttttcattagtcactgtattatatttctttgcaataaaaaaatctataaataaattagtatgatttttaaatttcccatatccttaggctctaaatattaaaatttcttctgtattaattatgaatatttttaataaacaatttattaaaacagtattaatgttattttttaatctttgagacagcatagtgtagtagttaaaagcacatactctggagcctgagtaaatggtttcaaatctcacctctaactctagttgctctagacttttcgttgccttatctgtaaaatggaagttcaaaataatgctagtctctgggtgtagtggctcatacccgtaatctcaaagctttgggaacctgaggcaggtggatcccttgaagccagcagttcaagaccagcctgggaaacatagcaatattctatctcaacaaaacaatctttaaaaattagccagttgtagtggtatgcacctgtgctcttagctactggggaggctaaggcaggaggttggtctgagcctaggatttcgaggctgcaggaagttataatcttgccactggactccattctgggtgacagagtgagaccctgtttctaaaataataataataataataataataataataataataataataatactgagtttggctgtgtcccaatccaaatct

SEQ ID NO: 11999 - DNA, 2036 bp, Homo sapiens
caaccagtttaatttttttctctttctcttttttaatgtaacctactgatagattgtggagggattgtaataaaagctgtatcagttcatcttaacattgtaaacactcaggggatatataaataattttttcatgagaacattattctatgctaggtaatatatcattgtgatttcagataatttggtgggctttccaggttgttgcttggaaaattgtctggcacatgttttgatctggtactatgtattgtagactcaatatgacagaaccttaaaaatatacatgcttaaatgaaatttttttttttcaaaaattgaagaggtttggaaggacatttatcctcagaagaaaaccagaattttagaagtggaaatgatttgaaaattctcttaaaattcagaagcaagcatgatgattgtgattttcatcatgatcaacattatgagtaccactgtagcacttcccaatggccaggaaccatgcctcaaattttacaggtggcttacaattttgattcttgcgaaacgtatgaggttggcagtgtacattaccagtaaagaacatggactcctgccagagtgcctgggctccaattctgcccccactgcctaccaggcatatgatcttttacagattgcttacacgctctgtgtctcagtttccttgtgtgtaccacggcagaagtaatactaatacctatcccatgagattattgtgaaaaacaaatgaggtagtacatgaaacagcttatgatagctcttaattgtgggttttcataaatggtagtgctaggatttaactcccctctcccatgtttattttatgcgaaagccaatgtggaagaattactgtttagaaagcttttctttttacaccattcaccttttctttgctgtgttaatgaaggaaagttgtatagtctttgtttgactttatggtatgtggttacctcattttatgagcttacactattttagagggaaatagatgataagagaaaaacattcatgtagcaatgatggccagtccatcaaagtttaagaggataatagaatccttatgataacacttaattcttaactgatgaatgccatccttgttatgtctcaaaaggcatatttagagttattcttagtttctgagactaacagctgaccttttttaaattaaaaatttttgatgtattttgaatatcatcactttaataaacaaataattaggttgaaaagcaaataataaagacttaatttactagctttttagatagatgaccttatagtcatatggtaggatgtgtttcattttgtagatttgtgaatttttgatactatttatattattcaaaccatgatgtttataactttatatataagcttggaaatgcatattgactttgacgtcaccctaagctacagtcttcatgagcgacctgtcattaaagatttgcccttagtgatttaacctatataagtcttggtaaagtgtttaaaataaacataagtatagacttttaagagctgaaggcaattaatatatataatttggaaaaataaataaataatacaatcaaacccaaacagccagccagagttggatggaaggaataatgtttgtgtcttttgttaagagctagacatgctctaggtaactaatcaaaaaccaatatatttcagtgtttgagtgctagagcttctggttcctgacagtaaagtctttatcagagattttttttttcatagttttcatttggcttccttaagtaatttttccttgtgactatgaaaggagtgtgattttgtgaaaggaatgatgattcacactgcaattatgatggaaaaaagctttgattttaaaaagtggtctctttcattataaaacttcagtttggcttgtcatgcagtcagggagaggttgtgcatttatccccaatgtaatttgtttcttctttataactgccaaggttataaaggtaaaccattcagataagtcgaaattgggtgccgatctccagacttttctaagcaggaaatgt

SEQ ID NO: 12000 - DNA, 2051 bp, Homo sapiens
ttggatagacttgcacgtctcaggtttttgccatgcagaatcaatggatttatgcggataacagtgccttctgttgtacatgaattatcagaaaaaaatttttggagtgcattgcaattttttttaaagcataaaacatatttctagatacaacataaaccttggttatatgtcaactattctgcattttactctgtgaatttattgttaggcagttactgcaagtcactctggtttcaaaatcttcacggctccctctgctcaccctgctgctggggggcttttttcaggggttgtattataaaatatgcactggctgtggtttttcataagatgttttgtggctttttaaagaagtgtcttactccctcttctctcatttttttctgccttgaaaaggggtggtatttcttttggggtcaacaaatacacatatcagtttcactcctaaccttgtaagttcaggactcattttcttggcagcaagtggcaggggctctttagtcactggagttaacagtaagtctgagtatattctgaataatgtaattatgcaattaattgataatcatacctaaagcacattgaacttctaagagacaggtgctacgtaagcacactgtctttctggatggggacttgtattttaaataacttatcattccagctatgttggactagggtccaaagcattttataatatttttttttaatctaggaaaaagacccaaacaaatctaacttcttgctttctcacctatttgaattttctcctacctaatttgtttgtgtctttattatagctcagtttgacttctcaaacttttcaagggttggggcagctgcacttttaggttgcctataggaaatattgcatatggagattacagtgtttttctgacctagttcaagaccagaacatgggtcatagggtttttattcagcaaaatgaaaacgtatcttcagaacttaacatattactggatgtgatacagattttgctttctgtggaattgaaaattcacaaaaattcacagcttaaatttcccatcagtgactggaggaatttttttcaggtgcttcctatattaccatccctcatgcatattaactctttagaattttaggttaagtgatgtctatagaagtagcctggaaaaccatgagttttggagttcagtgaccccctgctttcctctgctcctcccttcccaaggcattgaagctgaatgtgccaactggcagttagaagcgaaagatggcattgggagaaattttagagagctttcaaactctttattctcatgttccacatggtctaattttaacataaataatatgccttcacactggattgtaaaaggcatgtgatttttgagattttattttgtgatgtattgtcttctgcagtattaaagggaaagagatattaatgtgcattaccctatcttgtttttgaagccagggtagttgtatgattttgttaccagcagtgctaacctgaatgtgacctggttaccttggaaatgcaggaacttatatgaatgtactataaaataaaatgcggactgattcccaggattctgaacttttgtgtgtgaaatgttttctgaaatgtggaggtgctttaagcagttgataataacccatcagtatgttttcctgacacctggtgacctgaagcaaggtggactgtaggtctgggagggtgaccagggcttatcaggaacagctaatacatggggagaagtaggaagtgaaagcccatctcatgaaccaggaggtccgcacagaagagtgttggagctctggaaaggcacagggcgttcaaccacagcaggacctcgaaggaaaggaagatgtcactaaaatggtgcaattttctgatgggtctactatcaaattattactggtcaaaactggactggtaatacggtaatggatatgttcttagaaatgcttcatgggcattttgttattgtgtgagcatcctagagtctgcttacacaaacctagatggtgtagcttactacgcacctaggctacgtggg

SEQ ID NO: 12001 - DNA, 1055 bp, Homo sapiens
ctaatatatgtgaataatatttgaagagtacttgaatataacatggtagatataaacagtgggatactattcagccttaaaaaggaaatcctgtcatttgtgacaacatgggtgaacctggagtacattatgctaagtgaaataagccaggcacagaaagacagataccacaagatctcaaactcatagaaagaacagaatttagttagcaggaagtggagggaggggagatgttggtcaaaatggtgaccatagttagtaaccatgtattatatacttgaaaattgctaagagtagattttaagtggtgtcaccacaaaaaggtatgtgaagtaatggatgccagatttagtcattccacaaaatacatatatttcaaaacggtgtataaatcatagatacaatttttatttgtcaattaaaaaataaatatttttaaaaagtacatctttcagtaaaaagaccagtggttgccagggcttggggatgggagagagggaaggatgaagaggtagagcacagaagttttatgcagtgaaactactctgtatgatacaataatgatgaatacgtcactatacatttgtcaaaacccttagaatgaacaatgcagagtgaaccttaatgtaaactgtggcctttaattaataataaaagaatttctgaaagttctgttttggcttatttcacttaacatagtgtgtccatctctgttgttacaaataataggattttcttttttttttaaggtggactggtactccatcatgtatatataccacattttctttatctgttcatctgtcagtggacacttaggtattttcatatcttggttattgtgaaacatgcttcagtgaacataggagggcacattatctcttcaagatcctgattttaattcctttggatatatacccagtactaggatgacttgatcatatgatagttctatctttaattttttgaggaaccttcatactgctttccacagtggctgtttttactctctcaccaagagtatacaacagtttcctttttctctacatcccctc

SEQ ID NO: 12002 - DNA, 1023 bp, Homo sapiens
atatttttcttttacgaaaatgatagcatgctatacacagtttttatttgccatttttaacttaatatatcttgatgatccttccatgtcaatcaataaagttatatatttttaatggttgcttaatattcccttgtatgatgtgtcaaatttatttcaccagtcccggtttagtggatataatttaactgtctcttgtttaaatgggcatttgattgctagtaatcacaaacattgctgaaatgaatgaatggccttttatgtgtcattttgcacacataatatgtgtgaagggtaaatcccttgaagtggaattgctggtttgcatcgtcatttgtatgggtaagtttgaaggatgttgccaacttgtccttcattgtgtataccatttacactccagaaatcaatatacaacagggtctttcttcccagccccataattgtgatcatttccagtcttaataggtgaaaattgttaatgttgcacttggaatttgtactcttaccatgtattataacgaacatctttttataaacacaggcaaagattataaaaaaagaaacacatttgttttctattgtatttcaatttttaaaaattcactaattttatgtaaggggaatttgatctttgtgataccatttgaaaatatttcactcatttttttttacttccccatgccccatgcaaaattctttaattttttagtcagatgatttcattcttttcatttcttatttctgggctttgagtcactttcccttttcaggattatacaataattctttttattctatttttttatggtttatttcttcacactgaaatcttttatctattaggaatttattttggtataaaatatatggtaaggaactaatataaattgttatggattttacccccatttctgtcagtctatttttcaaaattttctgattattcttgcatgtttagtttttcacatgaagtttagaattgtcaagttaccgtctcaaaaatgtcctcttgatatttttatt

SEQ ID NO: 12003 - DNA, 1023 bp, Homo sapiens
actggtcctcaactggaaaaagagaacaatgtaacccacctttctaattttcatctaaagaaggagaaattggctcttgtccatgacttttcatgacacctgattgtgatctgggagactttcctgatatttgattttattcaacaaaaatttgaggccctgatatttgtcagactctgtgctgggcgttagtgaatattggtgaacagtagatatagtccctgtcatcatagatgcagataaataaaaaatagccagggatggtggcttacgtctgtaaccctagccctttgggaggaggattgcttgagttcaggagttcaagaccagcctggacaacatagagagacctcatctctattaaaaaaaaaaaattagccaggcatggtggcatgtacctgtggttccagctattcaggaggctgaggtgggaggatcacttgagctcaagaggtcaaagctgcagtgaaccttgactgtgccactgcaccccagcctggatggcataatgatactctgtctcaaaaacaaacaaaaaacccaaaaatactttgataggggaagttcaaggtggcatgagcccatatgaccacccagtcctaccttgggagactggccaaagataaatctgagataatcatgtggtataattgtctgaagatgccctgtgaatcagttgcttttccctataccatgagaaactccagtgttttggagagctaggagtgccacctccgtcctcttttcttctctcaagcaggatcagagaatcctgtagttttggtaagtgttattgatgcagtctatactgaggtcttgcaaaaagccttactgagcctttcccatctgagaaaatgtgcttgcccatgcaaccttcaaccagtctatttctcattctgaaaattttatatcttcacttactatctttctgtccctagcagtagcacaaatcatatttattaagttgcttccacatcccctaggaagggattaattatgccacagtgaatctttttcatgagg

SEQ ID NO: 12004 - DNA, 1032 bp, Homo sapiens
tttagagacaaggtctcgctctctcacccagcctagagtgcagtggtgtgatcataattctctggaggcttataatcctgggctgaagggatcttcctgccttggcctcccaaaatgctgggattacaggtgtgagcagtcgccctggcctatttttctttatagtgaactaaaattctcttctccattcctctggaataaagaaaaattcttctaggctggagacatttaccatcctaattcttggctaagaaggattacaaatatggttagaagtatacttttatgatatttaaaattttctgtcttctgtctttactcagagttacccagtaacaatttagtttttcattcaggcctatatttttctaatatatggtattcttttcttctttttagattaaaaacgtgtaaaaaatgcctaccttgtgccaggcacttatgcagctccacttgatttttacaatagtctgggaagttgctataaatagtccaattttacagatcaggaatctgagactcagagcaaaagtaacttattcttttttttttttttttgagacggagtcttgccctgtcgcccaggctggagtgcagtggcacgatttcggctcactgcaagctccgcctcccgggttcacgcgattcttctgcctcagcctcccaagtagctgggattacatgcgcgacttattctttttaagaaaacttttattttaggtttaggggtatattatatgtgcaggtttgttataaagttaaactcatgtcatggggatttgttgtatagattattttgtcacccagttactaagccttgtacctaatagttattttttctaatcctatccctcctcttacctccaccctcaagtggctccagtgtgtattgttcccctcttatgtgtccatgtgttctcattgtttagcccccacttatatgtgagaacatgtggtatttgctttctgtttctgtgttagcttgcgaaggataatggcctgcaactccatccatgttcctgcaaaggacat

SEQ ID NO: 12005 - DNA, 1004 bp, Homo sapiens
tttcaaaaactgtaaagaaggtcacgtggatgggtgatgaagctggagggggtaggtctttgtacaccatttgaaaattactttttcccaaaggcatcagaaatggtacagatatgtttaagcagggaacaactacagatttttagttaaaaaaatcactttgcaatgtgaagtatggtttggagatagtgtatggatgtaaggaaattagaaaagagttgcctgtagtgtaggtgaatgattatgggagccctactaaggcagtggcagaggaacttgaatcaagtagctggatttgagaggtaaaatcagcatggcttggtgactggatgtaggagtagagggtagagctgagagtggtttcaggtttcttgcttgaacagtggatggatggcaaaaccatttattaaacgtgggaccactggggcagaaggaggttttgggaggatggagtaggataaagagctcaattttgtactactgattttaatgtgcctgggagacatcagtgtctggtaccagctgtttaggtaaacgagactggagcatggagaagtttagccgatagaaatatcacctgtatgaccgctacttgaaaccattagaggagataagactgtcttggataaaagtatagaaggcagaatagagaagcctaggacagaatcctgaggaattctgacatttaatgtttggacaataatggctaaaaatgcggtgtgcttattagggtcaggcatcattctgagtgctttatacatatgcagtcatttaaattgtacagcatctttgtgaggtaggttctattactcctattttacaggtgctaaaagcaggtgagagagaagctaatggaaaaattgctagtaaataagcagctggagaaatgggagaaaaatggaagttcagtgttagtaaaaacaagaaatgtctgtagagcaggagtgtgcctttttgttgaaggctgctgctaagtcaaccaaaatgagagctataaaagatcc

SEQ ID NO: 12006 - DNA, 1029 bp, Homo sapiens
ctttcttccaataggagactcttgcatctacattgaaaatctgttgtttagtgtagccagctccatcaattatcttagctagactttctggctaacttgatgcagcttctacattagcacttgttgcttcatcttgtacttttatgtgatggagatgacttctttccttaaacctcatgaaccagcttctgctagctcccaacttttcttctgcagcttcctcagtctctcagccttcacagaataaaagagagttagggtcttgttctagactaggttttgacttaagggaataccactcaaatcttgtgcacgtcagcaatagcatttgttttcttattattcatgtgttcactggagtagcactttcaccccacacaagctcaacctcttccactatcaccatctctcatcagagaaatacattttttactttctatgaatctacgttgacacatcatcatcacccaaagtttgtagtttagagtttgcattagggttcgctcttggtgctgtacattctgtggtttttgtcggtgtgtgtttgtttttaagagacagggtctctctctcaccaggctggagtgcaatagcacaatatcatagctcactgtagccttgaactcttgggctcaagtgatcctcttagcctcctgagtagctaggattacaggcgtgagtcactgcacccagctctatgggttttgttgaatgcaaatgtatccaccattgtaatatcatacagaatactttcactgccctaaaaattctctgtgctccatctactcattcaccaattcttttgttgttgtttttaatatcgtggcagtgtttccactatacatggtctttaaagtttggttgaattattgtgtgagaaactatctgtgcctgcttctctttgaggtgggacctctttgaaaatatgctctatgtttttctttggagattgatttttgtttagatttcttttggcatcagtttttaaaaacttcattgaaaatcacctatttcattcagtttttaaaa

SEQ ID NO: 12007 - DNA, 1086 bp, Homo sapiens
tcgtgtccacccatgaacctttgtgcatagctccaaaatgtataaagcaaagatgataggacaagtagacaaaaaataacccaaggattgagaggtgcactttccaatatagtagccactagccacacagtatagccagtagtcactaggttatttaatacttcaaatatggctaatccacgttgaaatgtgctataaagtgtaaaacatacattggatttcaaagacttggtatgaaaaaataaagtaaaatagctcgaatattttaaatattgattatattttgaaaagatcatactttagatatgagttaaataaaatctattaaaattatgagaacttatgaacacaaagaaggaaacaacgacactggggtcttcttgagggtggaggttgggaggagggagaggagcagaaaagataaatattgggtagtgagcttaattcctgggtgatgaaatgatctgtatgacaaacctctgtgacatgagtttatatatgtaacacaccttcacatgtaccctcaaacctacaataaaagttaaaaaagattgcaacctaaaataaatggataaataaaatctgttaaaattaatctcatcagtttatttttgcttattttaaagtggtgactagaaaatttaaaataacatacgtgtttctcattgtatttttattggacagcactgaagaggatttaaatgaacacaaataacaaatatggtataataattatagaaaagaaacattttgacttatcagattttatgttcttttcagtcatgcaatatttataaattgatcaatcacctgaccataggaagatctcaaaaacatgtgaaaactagttttggcagaggctgtgatatccaaacacaatgcttttcccaactcaaatggaaatcattattgcctataccaatttctgttgcccttcccagtgattatggggaggtgtctatgcaggtggggtctgcagatagcatgaccctgatggcagggattctctatccctctcaggagtccatggcaccagaggtcctactctgcctgttggccccagctcacaagatttattgagtcaga

SEQ ID NO: 12008 - DNA, 1034 bp, Homo sapiens
tctgccctcaaacctgtctccatctccccgccacactgtccacctcggttccccacctcagttggctcccggctcctggctcctgttccgcccacaggctgatcccccaaggcacccccggctgagaagtccccaccagctcccatgccccaggcaccaagcccaaaaactcttttgcatggcctcggtgctcttactgtctggccttaacctgactttttggcatcatcttctggtactttcttccccccacacctcggttttttttttttttttttttgagacagagtctcactcggtcgcgcagcctggagcacagtggcgtgatctcggctcactgcaacctccgcctcccaggttcaagcgattctcctgcctcagtctcctgagtagctaggattacaggcacgcgccaccacgcctggctaatttttgtattttttttcctgggttttaatcactttgaactaagtagttgcttcttcttgaaaacagtgtggttacctagtaactcaggcactattagcagagtggtaaacagcgtgaactccagggcgtggcgcggtgtccgagtccaagccttctgtttactggctgtgtggatttggataagcaacacagcctctgtgggcctcagggaggctctctctttttcctgcccacctttcacgcattgttctctctgccctttctcttccgttgaactcctacacaccctctaaggcccattttgagattttgagtgtggcacctgctctgtcctgggcaggtgagttcatccctctcctgcatgcctgtggtgctgctcacctcacagcagcccttgacacttggggcagggaaagtcccctcactcccctcagaacgcggcccagcacacggcctggtacccgggagccgccccagtgagtgtgagactcagtggatgaggctctgtagagggctgtggaaatggcatctgctcccctacctgcctctgtctgccgagcttctggggcaacagctagtgtttctctttcctgctttatggctgt

SEQ ID NO: 12009 - DNA, 1033 bp, Homo sapiens
aagtttatgtgagtcctcgtgttagatgagtctcctgaaggcagcaggtagttggttggtgagtttttatgcattctgtggttctgtatcttttaagtggagcatttaggccatttccattcaatgttagtattgaaatgtgaggtactgttgcattcatcgtgctctttgttgcctgcctactttgtttatttttgtttttttgtttttgctttttaacttgtatttttgttttatagggcctttgtgatttatgctttaaagaggttctgttttgatgtgtttccaggatttgtttcaagatttagagctccttttagcagttcttgtagtgatggcttggtaaggacaaattctctcagcatttgtttgtctgaaaacgactgtatctttccttgacgtatgatgcttagtttcactggatacaaaattcttggctgataattgtttggggaggctgaagatagggcctcaatcccttttagcttatagggtttctgctgaaaaatctgctgttaatctgataggctttcctttatagattaggttacctggtgcttctgtctcatagctcttaagattctttccttcatcttaactttgggtaacctgatgacaatgtggttaggtgaagatctttttgcaatgaatttcccaaatttgtgcttcttgtatttgcatgtctaggtctctagaaaggccagggaagttttcctcaattattccctcaaatatgtttcccaagcatttaaaattgtcttcttcctcaggaacactgattattcttaggtttggtcatttaacataataccaggcggtcttggaggctttgttcatatttacttattctatttctttgtctttgatggattgggttaatttaaataccttgtcttcgagctctgaatttctttcttctacttgttcaattctattgctgagatgttccagagcattttgcatttctaaaagtgtgtccaaagtttcctgaattttttttattgttttttctttaagctatctatttccttga

SEQ ID NO: 12010 - DNA, 1046 bp, Homo sapiens
ggtacaagtttgttttcaacaagcaattctcttgggaactaagagtgagaactgagtcacttctgccataagggcagcaagcctttcatgagggatgtacccccatggtccaaacattgcccaccagacgccacctccaacactggaaatcagatttcaacatgagacttaggccaaacaaaccacatccaaactggaacacctaggtagtgggaaaggctcatgaaatgtgcctgtgctataagagaaaacattatcagagactagattgttctgtccccaaaaccctatatgcctcactctggaacagcgcaagatgcaccctaataatatttacttctctgaaccccagtttcttggattattatgtctatcttgatatattactttagctcattaagccacaccgtagtgggggtgggacatggtgtttcttcacataataggttgatgtacttagtcaaactaaattttcagtggtgtttgaaaatggggggactagaactcaggaaggtggtaaaagctggatatatggatttgatcacccctgggaaacaacaacaacaacaaaaaacatctaaactaaagctgtggaggtagtaagattactgaaaggaaaagtttccaaaaggaaggaggtatccacatataaaagaatgaagtaggatccttgtcttatacaatatatccaaattaacttaagatggattttctaaagttaaaatgaagttaaaattaaaaattaaagttaaaagctataaaactataaaactggtagaagaaaacagaggggaaaagctttatgacattgcatttggcaatgattccttggctatgacaccaaaaagcacaggcaacaaaaaaaattggtgatgagttgagggatttgtaaaataacataaaaatagatgaattggacaacaacaaaagttacaacttctgtgcattgaagggcaggatcaacagagtgaaaaggcaacctacagaatgggagcaagtatttgtaaatcatctatctgataaggggttaataaccagaatatata

SEQ ID NO: 12011 - DNA, 1035 bp, Homo sapiens
gggggtcacaagagccaggggggaagtggggctggctctcagttcccgccttgcggtgtgtgcctccccccctgcgatgggggtcctaagagccaggggatgaaaaggggctggctctcagtcctcgcctggcgggagtgcctccccccccgcgatgggggtcctaagatcctgggggggaagaggagctctctctcagtccccgcctcgcggggggtgcctccgactcctgcgatgggggtcctaagagccaggggggtaagaggggcaggctctcagtccccgcctcgctgcgggtgcctccgtccctgcgatgggggtcctaagaaccagggagggaagaggggctggttctcagtcctcgcctcgcggggagtgcctccctccactgcgatgggggtcccaggagccaggggggaggtggggctggctctcagttcccgcctcacgaggggtgcctccccccactgcgatgggggacctaagagcaagcgaggggaagacgggctggctccggtagattgtaaatgacctgctttctttcttttcccgggctgcgttcggacccctgtcgattgtaaatcccaagtaaggtacctgccgtgggcagatctgagctttcttcttggacaccccatacccacagtcctccaggtgggtcctaaggatcttaggaaccgcgatgggggtcctaagcccggggggaaggggggctggctctcagtccccgcctcgcgtggcgtgcctcccccgcttgcgatgcgagtcctaagagccgggggtgggagggactggctctcagtctccccctcgcggtgggtgcctccccgccctgcaatggggatcctaagagccaggcggggaagaggggctcttctctaagaatcaaaacactgtcacctttagcagtgaaggatccagtgagatccagtttaacggtcataaccgcctactggtccaacgttcagaagtaacacaggcacctggacaatacacagtagatgtggaaggacgcggttgtacatttatccaggt

SEQ ID NO: 12012 - DNA, 1031 bp, Homo sapiens
ttctgttcagaaggtgattttcaaaagcgagcaatgctgccaatgcagcttgcttctcttgacagattgagaagtccagcttcaaaagttacctgccatttaagcaaggagtttgtcaagagatcatggttcattttattgaaaagactttaaggagttgtaggatttattcatagattgctgagaacaatggcaatatttttatttttacagagtttgcacttctgatttcaggttaaacgctaacttgtttttagtctgcttaggggattgtgacttgaaaatttttatattctgatgagcttttttgtagtgtccacaatgtataaaatatttcctaggtgagatctatgttctccatttattgatgcattgcagaccaatttgagtgatgtgtttaaggaaaattcttcctagtttaataagtaagctaaaaggttttttttttatatttaatgtttaatctctgtctcgtgttatttaaaattagcctgcagatactttccctcacttctgtaggctcctggaagataaacattcaaacagcggaacaaacaataaattaaataaaaaataagaattatattttcttaatttctgcctcagaatttgcgttttgtctttctgccttttttttttggatgtcaaaatagatgagatcgtatactctatggagtataaattgttactgaagtctttatttttggtaatgaatgagtaagaataagactatctctgtgattattaaaatacatggaattatccaggaaattttccttacaaggaattaaaatattcctgtattaaagagaagaaaagcctttcccaagcggctggcgaagacggcagaggtgcaggtcctggtgcttgatggtcgaggccatctcctgggccgcctggcggccatcgtggtaaacaggtactgctgggccggaaggtggtggtcgtacgctgcgaaggcatcaacatttctggcaatttctacagaaacaagttgaagtacctcgctttcctccgcaagcggatgaaca

SEQ ID NO: 12013 - DNA, 1028 bp, Homo sapiens
ggccagacacttttaaacattgtttaagtaaccctgcaaagtaaaaaaaaatctatttaccggtaagaggaggtgccaggaggtcatgtaacttgaatgaaagaatctgcttttcttatttgaaagcctttgttctctaaactgtctcctgtctgctgcagtaatgctgtcctaaccctcattggaaactattccctgggtctcttcttgcctcccttctttctgaaggctgaaatgaggggcaagtttaacttttgcagatacgttgatctttaacttaaatcaaattctgttttttaattttgataatgttcaaagtacctattatctgtctttttgtggagaaaactgctggaggtttagtgaaacgatatcttaaaacaattcatcaaggtggctgctctgcagtgaacaatagaaggtaccctgggagctcttctattcagcgtccctagaacagtttcctagtgccccagatttagcattgtagtggccaggcaatcatttttgtgtgatgttcagtgaactcggaagggaggagaaagccaaattagatcaaagatagataatttcacaggctcatgttctcaaagaaagggatctgcgggttctgtctaacaatttctcaagctgtggagtttggttactcattgtagtcatgagaatgctttaggtatcaaataccttacaccctggttagaaactgcttgttattgtatgttgactagggggtcttagacaaacttagttgcaagctttagcatgaaagaacttagtcattcagtttagagagagacaaaagatttttttgcgaaagcctgctctttatctgaaaggggaaaatgatttattctgttttacagcatttattctctaaacttctatggcttatattagcttaactgtgtctccaggtattggcttttttttttttttttttttcagacagagtcttgctcttgttacccaggctggagtgcaatggcgtgatctcggctcactgcaacctccgcctcctgggttcaagc

SEQ ID NO: 12014 - DNA, 1042 bp, Homo sapiens
aagtgatcttcccaccttggtcttccgatgtgctgggattacaggtgtgagccaccacaccagcctatttaattatttaattttttttttttgagatggagtctcgctcttgttgcccaggctggagtgcagtggtacaatcttggctcactgcaacctctgcttcctgggctcaagcgattctcctgcttaagcctcttgagtagctgggactacaggtgtgcaccaccacaccaggctgatttttgtatttttagtagagacacgggattttgtcatgttggccaggctggtctcaaactcctgacctcaagtgatccacccatctcagactctcaaagtgctgggattgcaggcgtgagccaccgcacccagcctggcctatttaattttaaaagcatttcttatttcaaaataaccaaattgccgtacatagaattggtttgttgaatctagaagataattttatttctgaaatattctatagaaacaatggaatgggatcatccaggatgattaaattgtatctataaaccatacatagatacagttttttccccaaaagaaatgtgcttgcatgaattctttaaggtaagggagactgataaaggtttgattgttttcttatcagattgcatgagactcgttcaggagacatctgcaatgcctgtgtcctgcttgtgaaaagatggaagaagttgccagcaggatcaaaaaaaaactggaatcatgttagtccatctttcttttttctcaattatacctctactgtatttaaagtaacattaatttccccctaatttaggaagtaatatatccctagggtagaaaagtctgaaaagaataaagaaaaacactagctgctgttcagatataatggcctaacattttggcatctttagaacagaatagcctggtgtggcatttccttaaggctgtatccaatatcccccttctggagattcacagtaagcattcacctgtttttaggcttaactcagtaattcccagagttaattagacatgaattctttttcttaaa

SEQ ID NO: 12015 - DNA, 1035 bp, Homo sapiens
tagatcttttcttatgactgtgtagagggtacttcctcatttttcttcctctcaaagacatcaaattcccaagcatttaactaaaattattatcaactaaaaatgttttttttaaaacagttcttagaggtaactgtttagacttaattattgaaatgcatgaaggccttctgccttgcccccatcccactcttttgcctgcctctctcaccaacaaaaacatggcagaggaacagtttattaacaatagcctgtttgaaagggaagcttcagtttttagctaattatttgctaataaaagttttaaaaaaattttcttttaaaagttgtaaaacctctgtctatatttcaaaacccctcaataccaaaaaaatacacataaaaagcctggatatttggttctgaatcattttcattaatacttgctatattatactaaccagaattggaatggaatgggatcagacgagataatccaaagacaaatacagccatatgtcacacaaggacgtttcggtcaaccacagactgcatatatgatggtggtcccaaaagattatgataccatatttttttgtaccttttctatatttagatgcacagattcttaccattgtattacagttgcccacggcattcagtaccgtcacacgctgtataagtttgttgccttggaacagtaggctatcccatatagcctaggggtgttgtaggctattgccatcttggtttatgtgaggacactgatgtctgcacaaggatgcccaatgatgcatttctcagaatgtgtccccattgttaagcaacacatgactgtactgaagctttaggtttactcatctaagtttatttctaaaacaactttaaaaagatagtgttctgtggtaataactcctaaaactatggacacgaaagtgatattaataattttcttggccgggcacggtggctcacgcctgtaatcccagcactttgggaggccgagacgggtggatcacaaggtcaggagatcgagaccatcctggctaacatgct

SEQ ID NO: 12016 - DNA, 1020 bp, Homo sapiens
caatgcttgcatacttcaaaaatattgttataagctcagttggatctgctctctcagttaaagccaccttggcagccgccatgcttggccctgggtccagggggctgcgggacccactcactggcttgctcatgctcggtcccagtggttcacttccagtaccagcagcgtgtgtgcccggcctgcctggagtcctgattctctatcaaccctagtcgaaggccaaattatgggccatagttaaggaatttcctgacccttatgaagatcggatttgctttaccaaagaatttgaactcacaattaaaatctatgacccaggtcattctgacatttatcggcttgtctacatgctggtttcagctgcttaagctaaggaatagctagaaaaagcacagtgtggttggatcccctaacagatcttgttcctgaaaatccagtatgacctctgccacagccaactccccagctttcagaagatggctcaaagacgcgtgggtatgagcagcttctctgttaaatgccattcccttgtttttttcaaaagatcatagattacggccggacactttgggaggccaaggcgggtggatcatgaggtcaggagttcgaggccagcctggccaactggtgaaaccccatctctactaaaaatacaaaaatcagccagtcgtggtggcacacacctgtaatcttagttcctcaggaggctgaggcaggagaattgcttgaacctcagaggcggaggttgcaatgagcggagattgtaccactgcactccagcctggcgacagagtgagactctctcaggaaaaaaaaaaaaaaaaagatcgtagattagattaaaatccagcgatgctgccagaatccagatgggcctgttgtagatttttttacccactttgataaaacatgaaaacaatattgcagatgtcaatggacaactttgaaaacaataaaaatgacatattattaaaatttcccaaacaatttgggtgatgcactacccactcttgtcaa

SEQ ID NO: 12017 - DNA, 1044 bp, Homo sapiens
ttaccacgtttgactattgctctcaattttcttccatctagtccacccagtggtattactgagttttgaaaggtacttttgaatattaaaaaacgctttacttctgaatatataaaaaagccagaagaaggaatctagaaagtggaattggggaagttagagtaaataatgatgtccttcaaagcatgcatgccaactaaggtgaacttaacatatgttaaattcatcgtaataagaaccctctccatatccttaaatgtgagttaacacccttataaagatttaaaaagacaagaaaatagttgaattaaattcatcaccttttctctgtctcctattccatattaaaaagggtactaaagctctaaaatttgcatttcagtatttttcattctgtttcctggttggagcttaaaatgaacaagtatttagtattgctgagatttataagagataatctttaatcttatttatcagaaaacttttcttaaatagcgtctttaatataaactatcgctgtgaaactctttttctttcctatgtatattattatattcagtaaacttatgtgtttaattagatgtaaaattagacgttattcttgatctttggcttcccaatttcattagatgggattagaattgtcccttttgtgtctttgatatattgtggttatctcatccctttcttgactcatcagcaccaaggttagattcattaagttagattcattaagatcattaaatttatatgaaacccacagctttaaagtagaagaaaaccctacaaatcagccaaaacagatgtttagaattgattgttgtgttttaaaactttatttttttgtttatatatattgtccatataattagttatctttttaaattgcttttgctgacttagctattacctttaatcttttttaactttgggatattcagtttatttggtcagagctataattatggcatggttttttttttattttttatttttgagatgaatttttgctcttgtccccaaggctggagtgcagtggcacaa

SEQ ID NO: 12018 - DNA, 1045 bp, Homo sapiens
ttccatgcccttaaatatactgtttatattaatcttggctgccccactctttgagtagttagcaaattctacccgtttctgtgtactatgtacagccagcacctggttgtaatacaagacttagtttctgctctacagcggtttactattgagtagaggagataatgcagtaaacaagaagtgaaatcttatgtggtaggtgttctaataaaggtatggaagggttttgtaaaataagtaattcttaagagaatttcccaggtcaaggggatagagggtaagccgtctcaggcagaaataacagcctgagtagagggtggctagttattaaagtttgtttgacactcctagaatatcagaattccaagttgggagcagctggtaggcaggagcagatcctgaaaagctttgaattccttgccaaggagtttagatactatcatgaagccagtgttggtaccttggaagggaagattagtagttgaactttaggaagatatcacatgtttaaaggatgtagggaagtcagttacaaggttctgacaggagttcatgcaccatgatgaggaacaaacaggcagtggggatggaagtgaaggaagaaacagaatttctaaggacttcacaataaatttgatggagggccatgcagagggtgaaggaagagctcagttggcttccaagttgtttttgtgtgactgtggatgacaaccaagataggtaaatagaggaagagcagatttggagggaagattatataatcaattctcagggtatttaaagattggaatggattggtggtcagttggccatatttatcctagagctaaggggagagattggaccagggaatgaataataggtattaccaataaggttggttagtaacttcctgcgagtggattgcccaaagacagaaagcaaaatgatacctgaaatgtaagaggaaaaaaagagagaaagaagaaagattggtgagtaaaaagaattgtcagagctgagtgcataccttgtgccgatctttgtgttgatgttgtgttgatgc

SEQ ID NO: 12019 - DNA, 1102 bp, Homo sapiens
cgtgcccggcaaggatatatatattttaaaataaatattaaattagctgggtgtggtagcacatacctgtggtcccagctacctgggaggctgaggcaagagaatcgcttgagcccaggagcctaggaggtgaaggctgcagtcagccatgatcaagctactgcactccagcctgggcgacagagtgagaccgtgtctcaaaaagtgtatataataatgataaataaatatcaagtattgtctttgtttttcatttactcaacaaattgtaatatgcacaatattccaaatagtatttgagttgctcaagatatacattagtaaacaaaacagaaatcctatggttgacaaacttatactcaggtcggtgtgggaaacaaacaatacacaaaaacataacaaatatgtaattcatatggtatgtcagaaatgtgaccattgatctggaaagaaatagagcagtataaaaggaaataaagtggggagtggtctttcaaatggggtggttttagattctgctgaatgtcaaggtacattggagcacagacttcatgtaggtgaggaagtgagccatgtagatatctgggaggagggactccaggttgacagcactgccagtgctaagccccaaggcggaagtgtttccatggaactccaagcccagtgtgactggagcacagcaagagagagaaagtaggagattgggggagggggtgtttagtgccagtgccaggttgtgtagggccttctaggtcattggaatgatttcagcctttatcctgaatgaaactggaagctgttggaaggttttgagctaagtagtgacatgatagaacgtttttgtttgtttgtttgagacagagactcactctactgcccaggctggagtgcagtggccccatctcagctcactgcaacctctgcctcctgggttcaagcggttctcctgccccagccactgattagctgggattacacctgccaccacacccctaatttttgtatttttagtagagatggggttttgccatgttggccacgctggtcccaaattccgtcctcaagtgatccacttgccttggcctcccaaggtgctgggatt

SEQ ID NO: 12020 - DNA, 1030 bp, Homo sapiens
aacattttattaagaactgaggcatcacctgtgtagtgcttttttttttccggctactgtattttcttcccttccctctcttttgctgtgattttatcatatgcatgcttgttctgcttgtctctttctccctatccttttcttttttgctttcctgtcattggcatttctccatcctcttagccttccggggaacttttggtctgtcagaactccatggcattctgggagtgggaccagggtccacctcctcctgcacgacttcctaaaaaatccttctctgagtgctgcctggtatgttctttgcttgaaagtgctttaccagatgttcccccaatcttgtctttggtgttacttgaatgttacacatgtgtgagtgcacatagctctagaatgcctcacatgaccttgagatgtgaactcacactccccattttgctctctgcttcttgttatgtttagtccctttctgtgtttgtgtgtgctaatatgagtaattctatgctgctgacatgtaaaactaatcatttgggtctctaatcagtgggattttttttgtgtgctagatagcaaattgccttacttcaaagggggaaatgtattaaatatacaaactcccctttatttaagcgttttccagaagtacagatgtgattgaatttcaaatagcctttcttttgctgggttttatctccacagaattttaatttccccttcctggtctgtattttatgtggtcagaaaattcagtcatcaacatagaatctcagtgccaagaggaatctttaaggtcatcttgtccaatttgacatgattaaattgaagtccaagagattagcccagagttaaaagcacacaaagacagagctggacctatagcccaagactcctgacttctaggccaatattctttccatttaccctgcatgccagcttgcactaaccactgttcacttgaggcaacaagcaacttagaaatcttgcttatagttttcccccattatgtcatactagcttaaatctattttac

SEQ ID NO: 12021 - DNA, 1048 bp, Homo sapiens
ggctttcaccatgttggtcaggctgatctcaaactcctgaccttgtgatttgcccaccttggcctcccaaagtgctgggattacaggcatgagccaccatgcccagcccacttttgttgtttttaataggaagtagttacatatcatgaaggcttgtgagcagtgttgatcagtagaaatatttagtcctaaagcaatgtcagattgaggtgttgagtaaatttttatcatgtaatacttattgagctcttctgaattttttttaatttaatggtgttaaaagtgagaagcaacttatcagaatgccctattatagagttctcgtttgttttggagaaagggctttttggttttcttcaatacattttcataacacagtttgtatttcctgttctactttgagataatcaaagccccagcttgggcccttcttaagcagacataggagacttttgtgggatcatgaagacagaccagtagctatggtgttggaactcctactttgtagtacactcagctcagcagtgatttcatgaccataataagctttaaaatttcagaaaatgtatcattttcccttttcataggaggaggagagggatagaaaaaggtagtaggaaggcattagtgaaggtgatagtacaaaatctaagtggtgggaggttgctggttaacatttagattagcaaattagtaaattttttcttccattttaaagatactgaattggccgggcgcggtggctcacgcctgtaatcccagcactttgggacgccaaggtgggcggatcacaaggtcaggagatcgagaccatcctggctaacacggtgaaaccctgtctctgctaaaaatacaaaaaaaattagccgggcgtggtggcaggcacctgtagtcccagctacttgggaggctgaggcaggagaatggcgtgaacccaggaggcagaggttgcagtgagccaagatcgcaccactgcactccagcctgggcaacagagcaagactccatctcaaaaaaaaaaaaaaaaaaaaaaaagatactgaatcat

SEQ ID NO: 12022 - DNA, 1079 bp, Homo sapiens
agtcagcactgggtgtgaagtgggccctatgctttatgggtaaaatcagagaaagtggatgccactctgtccttaggaaacccacagagaggagagacagtacgggggccaagtgccataatggagtcctgtgatagtgcagaacttcaattagttctgattagggcacagtttctacttctaggggccatccagccgacctcaggggtttcaggtcagcttttcatcctcaccccgcccccgcccctgggataaaagacccatattgcctacagttcaaacatctgcctgattatcctagcagagtggtaggaactgattttctgatctcctctactacccgcctcacctgcacagagagtaccagctgtctcagcctagcttcttcagtgggccttggctgtaaaatgtgtgtatccaccccaggtaattaggttagctctttgtgctcgtatgactgacccctaccttttaggccacctggtgtttgttctagaagttattcctataaacagattttcacctaaaatttgaatctttatgaatcaaataaggaaaattttaagtaaacttgggctgtggataactgatgattcattaccaaaaaggtagtcatttaaaattataaaatgacacaaaaaatttaaatggaaaacatcctgtttatgcttggtcaggtctttgagttgatgtgactcaagtaacatctgatcattttcttaacctttttaaaaagactcccctaaattcttcctcccaaagattttactgtgtttgttcacagtgggttctgtgaaaggattattacaagcccacaatccattatcctcaattctacaaatccaaaaaattctgaaaaccaaacattctttttgtaactcattcatcagcaaaaccagacctgaaccaaagtgaccctattcatattctttgattatctgtcctactgggacatatatggtttgctgcagaaatattaatgtatttaattataggatactgccctagatagttcatatatgtggtatatgcaccatactgcttttctaaattaaaaaatctgaattctaaagcatatc

SEQ ID NO: 12023 - DNA, 1047 bp, Homo sapiens
ttcttttagagatgcaaatccttctctactcacaaggtaggttttccttggattttacattttccaaaaacaagtacttttgctcccaactactgtgtttccatggggtatattattagaaccgaataatgatcacagtcttttctgttttgtgtaaagggagcaggtatggtgggaccagcggctgagatgagactgctgtttctctttgaggtggcagtcagtgactgcagagagaaataggaaggaacacaagtgttaacttggctgatttgggtatatttatttattaatggaaatagcccttttttcctgataatatataatcgtcattaagaaaacattttttcttcatcataatgagagtgagagaactctgttactaccagaaacgtgtagacttcccattctttatggattagtaaaggttcacatcaaaactcagcgaacattgaaaagggataaatgaaattgttgactctgcagcttcctgaggcaatcaactttggatctttgcctgtgggagcatttcatctgagtgagagaaaaggtgagcaggcatgagacagatgactttcccaggtctaacagttctgccagagttgtgtgtgtgtgtgtgtggttttttgtttatgttttttaatctcagaaggaagttatctttgtggtatctttcattcaaagttcttccaacacatattaagaaaataacaaactatggattttattttaccagtacatttgtgaagactaatgctgagcctagactaggatactagttgtcatctgaatatgaatgtgtagagaaaatagagatgctatgtcttaatggatagtgaattgaaggaaattataaaatagtacctgtacactgatagattcttcaaaaaaggttacacaaatatttggattcacttttttttttagacaagttctcactccgtcacccaggctggagtgcagtagtgcaatcatgggtcactgcaaccttgacatcccgtgctcaagctgtcttcccacctcaccctcctgagtagctggtactat

SEQ ID NO: 12024 - DNA, 1054 bp, Homo sapiens
aggcatgagagtatatgcctgtagtcttagccatgtgggaggctgaggtgagaggatcacttgagcctgggaggtccaggcagcagtaagccatgatcgtgccactgaactccagcctggacaacaacagagtgagactctgtctcaaaaaaacaattaattaattaattaattaaaataaactttaatattacctggatttaagtttctgtgttgttgaatattccttaatggagtcgatgaatttgcagagacccctccaagattcttttgtttgattcctttcatgaccatcaccctagaccttcaagtttgctgactagatttgggggttgtgtgtttagaaaggataacaagcttgtcatgggctagaacctgtggtcttcataaatagcttagtaggatatatggctttttctatgaaaggtggagaacatgcattaaaaatgggcaaattctggcctgggcatggtggcttatgcctgtaatcccagcacttgggaggctgaagcgggcagatcatctgaggtcaggagtttgagaccagcctggccaaaataatgaaatcctgtctctactaaaactacaaaaattagctgggcatggtagcacacctgtagtcccagctacttgggaggctgaggcaggagaattgcttgaacccaggaggcagaggttgcagtgagccaagatctcaacgtcacactctagcctgggtgacagagtaagactctgtctcaaaaaaaaaaaaaaaaaggcaaattctgtcttatacttggagaactgtactcgtgtatttaaacatgtaacaagcaatgtagacagttaccaatagaaggtacgatatagtcaggggttagtattatagtcagaaagtcaaaacgaacacaaataaaaactcaggctagtaaacacatgaatagctaactgctgtaataacaaccccataatacttcagtggcatgagacaataaaagtttttctcattcacgtttagtgtaatgtaggccaaggtgggaggcactctacttcacaaagatatttagtgactcaa

SEQ ID NO: 12025 - DNA, 1607 bp, Homo sapiens
aataaaatttctttcaactataaaatgtattagcctattcctttcctcttcaaataagatacggtaaataaaattaaccatttttaccaggtatatgcaagcaagcatgcaggtaccaacaaggctttgatttttttttaagcaaacatgtcttatttatttataaactagtgccaagtgatgagcatgtaaatgatgggcagtatttatgaaatttcagaaagtggttgtactaaagagcacttgtagcttcagttgtggttttaaaggaatatcttaggaaactgcatttacagatttgttcttcatggcacctacatcagctttgggcacagtcagtcagtacagttctctttgtttcaataaagtttaatcctatatatatatttttttatatatatttttttctgtttatactctcctattgtgctttacaatgcactgttctacctaaggcttgactttttaagatggcaccatgtaaggtcctcttggccagagattccaaaaatttttgatatgggactgtctttccccattactcttctctcttctctcttctctcctccctccctccctccctccttccttccttcctcccttcctccctctctcccttccctcccctcccctccccttccctctttctctcactctttctctctttctccttttctttctcagaatctcgctgtgtctcaaaaaaataaataaataaataaataaacccaggctagagtgcagtggcgcaatctcgcctcattgcagtatctgcctcctgggttcaagtgattctcctgcctcagcctcccaagtagctgggactacaggcactcgccaccaagcctggctcatttttgtatttttagtagagaaggggtttcagcttgttggccaggctggcttcaaactcctggcttcaggtgatcacccccctcggctacccaaagtgctgggattacaggcatgagccactgcgcctggcctccattacttttcaaacaaaatgcagcgatgactggttgagtgtgaggaggtaagaactcagaattctaggaatgaaagtattagtattttatctgctgctgagacagcacatcctgaggatagaagaggccgcaagattagctttctcagatgttctgcaccttttccaagaatctatgactttactaactttatttgaaattaactcttgtaactatttttactaacatgggtttcttgggttaccttttatttttctgttagaaacttgtgtatatcactcatgcagaaagctaattttgaaataatgctttatttaaatgactttcaaagatatgtgctagcattattaagtcagaagtaatcccaggaagtcacccttattctatgatgctatgaaaatagctaacatttatgaggcatgaactgtggttggtgatttataaacgctaattctcacaataacttgaaaatatgacttttctcatttgatagatgagaaggatgacattcagtgagttgcccaaagacaggaaaggccatagcttggattccatcccaggctgtctggctgcaaactagccttttttcctacgccctgctgcccctctgagtccttc

SEQ ID NO: 12026 - DNA, 1049 bp, Homo sapiens
tggttacctgtagagccacaacttgctgttcctttaaagagctctctcattattatagagctagctgctttgtaatttacacacactttcaaggtgattttcccccagggtcaagactgttttcccttggaactggaggcaggaaagaaataaaatggaagaaaaggaaaaacaagaaccctggtatatgcagcgtaaggagttgccactctccattagtttccagtcataggtctgttcctcttgtacttgctgaaagaaggaaaatagattcactgttgcactgtgtgaagtagtctaaaacttggagagcaagatatagtctgtttttcccagaaaaactagaactgtttaattgtggaaagataatctaactttatctcctccaaacacagctgttttgcttttgtcaaatttagagaaggttaaaatatcttaataagtgtattgaataatgcatatcagcctcctgaggtctaaataaaaatgatcataagatattcagacaaacagaagagtgagtcggtcctttggtggaataaaggtaaataaaaccggatcctttttgcagataaaatgctcacctacttgtagcttagtaccttcttccaagaagtctcattggaggactggagtaatctaggtgaacagaactcacaaaatgcaagtactacataccaaagagctgtttctaatttatcttattatatttaaaaaggcttggcttcacaagcatgtcttcaaaaataaaaataaaataaattacattcaccaccaaaaaagcttgcattttgatgcaatgccaaaaaaaataacaagaaccactaaaacctgcaatcaatgtggatgggcaaataaaaatggaagaaaaaaaaatacacacagcctgtaatagtacataagcacacatgcaggcataagagaaaaaaagggtcaaaagcaaatggataaaggaaacctttagaaaggtgtcttgagtttttccatgtagcagggtctgtagttaaagagaaacagcacagaataagtttagtgcttatccctaaaat

SEQ ID NO: 12027 - DNA, 1338 bp, Homo sapiens
aaaatacaaaaattagctgggcatggtggtgcacacctgttatcccagctactcaggaggctgaggcaggagaatcgcttgaacccagaaggcagaggttgaagtgggccaagactgcgccactgcaccccagcctgggcgacaaagcgagactccatctcaaaaacaccttctgcagaggatgggggcaaggaaggaaacaaatggaatttttttcttcaggcccacagtgtaaaacactaggaactgttatttctactacaagctacgggtttaaaaagtctacaagcaaaaaagataaatggttctacagacaaaaatcatttatttcaatatgaagtattagactgtttattactctgtgcagtaaaattcatcttagctgctgacagattaccaaaaactggatgcagaatattttctaatagatcacttcacacaactaaatgtatattctccctattactgcatgaaatgacataccaggcaacatgaaggagaagatgcagtagggactagacacatgaaaaaacattctgaacgagaaaaaatacacatatttcctagtaaaagacattcgttttgatactttggaaaaccaagttaaattaaaaaggcaagtcagtgttactagccaaaataattaatgaaactactaaattaaaatttaggaaaaagattttcttaaatgactcaaaatgtggcagccagatagaacaaaagaatctctcatttttaatagctttttctagctgatacatgaggtcctagtcattctatgttaacaaaatgggtcttgctacaagttacccaaggactatcagaaaatccacttgatgatttagaataaaaacctaaaattgtaaaaatacatgtatttttcaaaacagatcacagaatcatccagaagtattaaagtccgtcatttatattaagtaatactaacctgtcttgaatattctttctgacaatgagaaaatatgatttaatgagtcgttcaataacctcacaatctcgctgttcccgagcagatagttttcgtgcaacaggaactggctaaatagggatgagggggaaaaaatattacttttgtgacactaaaatggcagctttaacatctgaaagttatgtaagtttttgagacttttagttctttctgtctaatcgttttcctactaacttggtcacctaccttattacctaaaccaaattgtcatggcttaccacatctagcaggttcacggcatgacctttttgtggactggctggcataattggaatgggttttgatttttcttctgctaataactcttcagcttttgaagttttcagcattcc

SEQ ID NO: 12028 - DNA, 1122 bp, Homo sapiens
ctcagctcactgcaacctccgcctcctgggttcaagtgattctcctacctcagcctcccaagtagctgagattacaggcgccaaccaccatgctcagctaattttttgtacttttagtagagacggggtttcaccatgttggccaggctggtctcgaactcctgacctcaggtgatctgccttcctctgcctcccaaagtgctgggattacaggcttgagccatagtgcccagcctggaaagataatatttaatgtgatggttcatgcaccatagtctaaataagaaatttaagacaggagagaattgataacttgaggtgtaaggaatgaaggttaggtaaaggaactaaagttcttgatgaggctgaagagaaacatggtaggagggagggagggagagcagggagaacgggaaactatgttcagagcctgacattgctgagtttatgttttcagaggcaacatgtctctgagtgaacacaggctctgtgtgaccatggaagtgagtggctgatgtatggaagagatgaaagtcagggactgtggggaagtctaggaactgtgaggtaatcattttgatgaggtatatgaataggaggtggagaaggctgtgaactgggctccaaagcctccagcaaatgttgaggaaagaataataggccttgtgatagcaaagaaaatgctgtggggggtgatagagctggacggtggtgactcagaagagcaggacttatgcatttgagggaaaacggaatagtgtagaagcgcaactgggaagacagagagtgccaaacgtccctcctggcccaggatacaggagtggtgtccagtagtctcctccttggatggctacaggggaaggattcttctcagaggagagcaaatagtctaacagaatgttctgcaaattaatgaaagacaaattttaatttgtttataatagaacaaacattagaaaatagtaattaaattcctttgagtcatggacactttgagagtctaataaaagttatgttttaataactaataaacagagtattgcaattgtatctaacaattacatgttttcttcctccttattttttttttttcccaagatgaggtcttgctttgtcacccag

SEQ ID NO: 12029 - DNA, 1061 bp, Homo sapiens
atttttaatgcattcagttacaactgtcttctccagcacatacacaccaaaaaaaccacataccaaatataatttttaatgcgtatcttggtaccaaactttagaaatttactgcatctacattttcatgattatgcattttcttttctttctttttgtattatttatttgtttattttttgagacagagtcttgctctgtcaccctggctggagtgcagtggcatgatctcaggtcactgcaacctctgcctgccaggttcaagcaattctcctgtctcagcctcccgagtagctgggactacaggtgcacggcacctcgcccagctggttttcatatttttagtagagacggggtttcaccatattggccaggctggtctcaaactcctgacctcatgatctgcctgcctggcctcccaaagtgctgggactacaggtgtgagccagcgtgcctggcctgtatgcattttcattctagttacctttgctcatccatatcttattctgaatactcatgacttatttgatctagccttgtgcatagtcccagataattaagaagataattaaatcagggtctaattttcttgactatcaaatagctatttttcttttttgtaagatgtagaccccaaaagaggccagaacttactattgaaaatcagaatctaaatgcatttacttctggagaagaatttaccataaaactagaagagtaatgctagatgagatagtgcaaacaaaatggaaacttgatgaaagtatctagatagttcaccccagagattggctttcccaaaaatagaaagacaactgaatcatcaacttcagcctcagttatttggctaattatttaaactctttatgtttcatgtgtaaacataagcaatatgaagttaataaataatggaattggcaatatttctaatgttatactatcataaccagtcataaccatattttctgttggttactttagatatacaaacaagtacatggtttaattaattaaattactttgtaaattttttttttttctttttttgagacagactctca

SEQ ID NO: 12030 - DNA, 1052 bp, Homo sapiens
cacatgtgttacagactcaaatatgactgtgctctgaaatgctaatgtcaactacaaatcaaaagtgctgagttaatgctttgtgcctggtgctctgtaatgaaccaggcaatgagatagttttctcagtttggtttcagcagttaatgtgctttcttggatccaaatttaaatatcttcctaaaccaaaactgtaaatatggttgttgcatgagcaacagaaaaaattgtttaaatgcttgaagcaaagtatggatgtcttctctaaatctttctttctttttttttttaacagaaacagctaatttccaatgtattgttgggaaaaagcacaaactgtgtttttaactcaaatattgtcttcgactgctatgtgtataggaaagcagtctctgtatcaatgtttacatgttactactttttaaatttcaatacttttataactgttcttaaaaataagagttttaaatactgaatcctttgtcttctaaattgcaatagctataatcacaagagcaatatctctttgaatgactgtctggacaaacacaattgcaaataagggaagggaaaaatgcttttctatttttcagtaactggattgtcttaagaaactacatctgcttaataaacaatttctcagcaatgtttgctgggtatgggagtttaagcccggcagatgtgtctcctggttgaacatgcatttttcatggagtttgggttctaaatttagactgcagttggtttgtattttgtaacactaagtagaaattataaaaagtcaaacattgtgatctataaatgcacagaaaatactttgtaaaaagtagcatccttatataataatgctatttagaaagactgaaaccaagactatttaactgtgaactatgtagcagatgttttaaactttttattccattatatcttgtctagatattttaattcaaagggatactggctctcttgatcggaatttcttgttatcaccattccacgttgccacacaaggtgcacaggctggaagtcttttgtgaaattcccagttaaat

SEQ ID NO: 12031 - DNA, 1034 bp, Homo sapiens
attttcatgatattgattcttcctaaccatgagcatggaatgttcttccatttatttgtgtcctcttttatttcattgagcagtggtttgtagttctccttgaagaggtccttcacatcccttgtaagttggattcctaaatattttattctctttgtagcagttgtgaatgggagttcactcatgatttggccctctgtctgttattggtgtataggaatgcttgtgatttttgcacattgagcagattgttcagtttccgtatagttgtgcggttttgagtgagtttcttaatcctgagttctaatttgattgcactgtggtctgagagagagtttgttgtgatttttgttcttttacatttgctgaggagcgctttacttccaactctgtggtcaattttggaatacgtgcgatgtggtgctgagaagaatgtgtattctgttgatttagagtagagagttctgtagatgtctattagttctgcttggtgcagagctgagttcagttcctgtatatccttgttaacctgtcttgtcgatctgtctaatattgacagtggggtgttaaagtctcccattattattgtgtgggagtctaagtctcttcgtaggtctctaaggacttgctttatgaatctgggtgctcttgtattgggtgcatatatatttaggatagttagctcttcttgttgaattgatccctttaccattatgtaatggccttctttgtctttttcgatctttgttggtttaaagtctgttttatcagagactagcattgcaatccccgctttttttttttttctttccatttgcttggtagatcttcctccatcccttcattttgagcctatgtgtgtctctgcatgtgagattggtctcctgagtacaggacactgatgggtcttgactatccagtttgccagtctgtgtcttttaattggggcatttagcccatttacatttaaagttaatattgttatgtgtgaatttgatcctgtcattattatgttagctggttattttgcccat

SEQ ID NO: 12032 - DNA, 1029 bp, Homo sapiens
tttcatagtagctgtgccctaacataagaaaataagttacttaagttttagaataataaccatcctgcttactgtttatactatagtgatatgaaattaaatattgaggcaatgagacttaatcacaaataaagcttactaccttgtcataagtcaatatacgtaaaggctttctatttgtttgtttatgctgtggattggccattgtgtataaggcagtgccattccgcctggctgcatgtagctgctggccagcttatcatttcctgaaaaattatatttaaatcatattttccattaaaaggagaataataaccttgagggcttagacttgaaaatcactaatggagctctgcacagtaggaacaataaagcaaaactgagcagagcagcaactaaaagcccatttgcccaaatgaattcaaacttatttttacgaataggtaaagcaagcagctagagcagtcatgtggaacattttccctacacttgtgggtgctgaaaaaagatgtagagtaacaagtataccatacttcctatagaataaaatgcatttattggtattctttacatgaatgtgataaattaatgcaaagtaaaaattgatttattcttctaaactaaatattataagggtctaaattaccatgtggtcaacatgcattcacaaatgtgtgggaattattttggacaaaagtttctcaggtacagggatcagaaatgagagactaatagaggtaataaacagagtggcctaagaagttgagtggaaacctgtaaatataaaaggatatgagcaatcttctaagaaagagggcaattttgtcatgaaaattttaagatttgaaataagaggtaaaggaaatttctgaagtcacttgtcttttttctcatttataaagtaacaccttgtgacatgactgaagaaataaatgttcctttggaaaaggtttagtttaggctagtgacttttttttaatcctactccaaatataagtgtgggatgaaggatactcctgtttgataaca

SEQ ID NO: 12033 - DNA, 1025 bp, Homo sapiens
agaaaatattgtaaaccaattctctaaaatattatcagataatagggtctatttaggctgtcttaccttttctctgctttccatttctcactgcttgaagcgaatccagtttatacacacaacacaattgaaattccacatttctcaagtggacaaagaaaaccctaaggtggcaaataatagtatgtagctgaggttcagcagaatattgggggtagtagatagggttttattagtatagtaaatattaaataccttcctttttgtataacgatatttaaccctttattaagtgtttcatgtgctaggcaggctaagagctatagaattaaatcactcagtccttaattaactttatgtgacaggtactttgattattgcattttacaaaaaaggacatgaagctagctcaattcctcttgtccacagtcacccagctaattagaagtgaaccaggatttaatcctaaaatgtctgattctaagattcttaacatgtattctgtataattttgattctaacacctaaacatggcatttaagattctccgtgacctgacttcaagctcttctttagctaaatacacacagaaacagacaaacacactgtactttatcttaataaactaacttcccatcatacatttccatggttcttgcttttactttcacttgtcatttacctggaatactcttcctcctcatctgtgctgatcgaaatcctatactttcaaatttctccacgtatagcctgtcacacagccctctccaaagacctcactcgccgcacctggatgaattttcactttgtccccatattactttatatcttcctaaaaataccggtcattgtttgtctcatagttatttacagataagaaaactgaagccagccccagatcaaaagttaaacaacttttggaaagttatttaggtcataagttggtagatccagatttccaagagtgttctggttctaaaacctgtgttactcctattataacacactgtcctaaaagacaaaat

SEQ ID NO: 12034 - DNA, 1006 bp, Homo sapiens
ggctttttctatggttagattttcactccctcggttagatttattctagatatttgtgtgtgtgtgtgtcactcttgtgaatgggattgcattcttcatttggccctcagcttgaacattattggtatataaacaagctactgatttttgtacatgattttgtatcctgaaactttgcagaatttatcagttccaggagccttttagtgtagtatttaggattttctaggtatagaatcgagtggtgtgtgaagagagatagtttgacttattttcccatttggatgccttttatttctttctcttgcctgattggccagctcttccaatactatgtggaataggagtggtgagagtgggcatccttgacttgttccagttctcaagaggattgtttccagtttttgcccattcagtatgatgttggctgtgaatttgtcatagacggcccttattatttcgtggagtgttccttcaatgcctagcttcttgagggttttatcaggaagggatgctggagaaaatcgtgtgtttgggggattgtcaaaaagaattagtttaaggaatgacattattagagatgattttagcaatgcaacactttaaaggacatgctaatttcacgattactacagaacaattttggaaacataaattaataatacatgatggcattgaggctggaaaataattatttgcagtttgactactttgttatgagtcacttaattactccaaaataggaactacttttattcccgagactttagttttcattgtatgtgactataaatatatgtaactataaatatatttttgccaagttcttaccatgtaaaactgcctatctgatgctatccaatatgtactgtaatatattgctcttaattaacgtttgagaaaatcagtgacattaaaaaatataaccgaaatggaaaagaaactccttttatcaggttatttcattattaatgagtcttgtttacttctattccaggacgcaaat

SEQ ID NO: 12035 - DNA, 1035 bp, Homo sapiens
gggaggtggagcttgcagtgagccaagatcgcaccactgcactccagcctgggcgacagcaagactctgtctcaaaaaaaagaacccagttctgatttacaaatggggcctggggaaatatagtttaagtttcacaacataattaatctaactagacctaagataatttctataaaactttattatttgtaaaggatatgaaaaaatattatttgcatatattccgttgtttttatacaaagacatattataaatgtatgtaatgtccttaaaatatattacagttatacatttaactattattcaccacaatataatgtttataagtaaaatacagggatattaacttattcttttggatagtggaatccaaatcaactagcaataataatcattgtattatgtatctttaaatgtatttatatatctttgccctgaaggacttcttaagagcaattggcacaatttctttctttctttttttttttttttttcctgagacaatcttaactctgttgcccaggctggcaacactgcaacctctgcctcctgggttcaagcaatcctcatgcctcagcctcccgagtagctgggattacaggcatgtgccaccacgcccagctaatttttgcatttttagtagagaggggtttcgttatgttggccatgctggtcttgaactcctggcctcgagtgatctgcccttctcggcctcccaaagtgctggaatcacaggaatgagccaccacacccagccaaattgggcacaaatttaaaatttgacttttattaatgatatggtaaagagatctagcttggtcatgacacccttgtgttatacggtgacaggcaaatcatttaaaatatctaaactataatttcctgtagttcacatgaattggatattctgaagtccatttgtaaaaggatataattcaattcaatcttccagctcttccatgacctaatgacatcttatttattttttcttcactctgaaatcattgtttgcatttttacagaaggcttactcta

SEQ ID NO: 12036 - DNA, 1037 bp, Homo sapiens
tcacttgttgtttgagcagagacttgaggttggacggagataagaattccctagatcttccttgggcatgtgtacaccccttcaaagggcatgggcttctagatttccagcaatatgccagagcttttaaaagcccccgataagcatctcattctctagatcttcctttttggtttttgagttagcctcttacttgcctcagattatatcatcacctccagcagatacgctgttaaacacctgcaactgactactttcaacaaatgtcctggagatagggcatttccctctgagcaggctttgagttaagtcaaataatgacaagcccaagccctatgaatggagcttttccagaaagcttccatataagtcagttaatgacaattctctagaaaagacacattttttttaagttttgtttttaattgacacatgttaattgtaaatactaatggtgtacagtgtggtgtttcaatacatatatacattgtgtaatgatcaaatcaggataattaccatattcattacctgaaacactttttgaagaactttatacccattctgtcccctccaatggcttttaaactgttggtttacacagccactgtagttgctaggctgacggttttcaatgctgctacatacagagctgggaaaagtaggattgcagtaaagcaagttaaaatgacatagtgagatttactctttgtcttgaatgagtgatcactgatttttgcaagcctttgattaatttccagattcatgaaaaaatttgattttgacaatttttgctagtgttctcattgtctttatggacaagcaactttgcagagggccttactctatcattctaaagtgacttccctagtccattatttagttttagaagtgacggatgctactgtatttatatattacataactttattattgttacatcggatgtattattggcaattgaaatggtcctatatgattaaatgaaaacatctttatgcaattaaatttaattatgtaatttaaaaccaaatcatgag

SEQ ID NO: 12037 - DNA, 1027 bp, Homo sapiens
cagatacagaagtgcaagcactagttcaagattatggaggtcattaggagagtaatgaaaacctatattaggttggtaggaaaggtaagaaaaagaataataaaatcactgttatgaatgccatctgaagtacactttgaatatgcatagagcttttcagtttacaaagtactttttttacatccttttccatttgatctttgcaaaatcctgataggcatgcataacttatggttgttctgcttttgttgataaatgaatagaagttcagcttcttgccgaagtttgcctagatgacagcttcagaatgtggagccttcagatttcacatttatgagttttcatttctccacagcacatgaagctgggtagtagggccagtgttaaagagatgacatctatgggtttataacagccacattattttaattgaagactgatgtaaaacataattctaaaattctaaatgtagttgacaaacatatatagtattattgatgggaacaggagaataaggcgttgctgacttgtcagttgggggaatagaggtcgatataatggacttagattttgaatgggtgaatttaaaattctaatattagcttttctttagttttgatgaggagaatcccaaatgtaaacttagcagatagttacaatccagacaatactggaattcgtgattacctcatgtcagaagaatgaaaatatttcagattacaccaacctcaatctattgtgctttcttatgtaaggtttagttcatgcttcccaacagacacagatgtttccaagacctctctgtgttttactctggttccctttatgtgaaaaccggctatttcttctgatattcagaagtccagaatcttttcttgaaagcacagatacttaacttttcacactcgatgctgcttataatagatccaacctgagataattaaaaccaaacaaaaatatgtttagctatttattcatgtcatagtcaaatcatgcctggaaaggaaaattttatagttgttcatct

SEQ ID NO: 12038 - DNA, 1021 bp, Homo sapiens
ttaatctgaagtcaatattgtctgtttaatgtgggccagcagatctctgggaattggtatttccagaggaaaaaaattttccctagattacctctagtgctctttacttttagttgctgcttgattgtaggaacagaaactcaccccaaataccaaaagcttaacattttgacattgaccagagtttttatagagagagccatagtttattttattatctcaaaaagttgtctttttaacttttagataaattctgtagctttatttacataatacatttctggtgggacatggtggctcatgcctgtaatctcagcctttgggaggccaaggtgggaggatcacttgagcccaggaattcaaggctgccgtgagctattgtgccactgcactccagcctgggcaacagagcaagaccttgtctcaaatatatgtatatattatatctctcaaatatagatagatgatcaatagatagatagatagatagttgagataatatgctcagggaatcatatgatattgtcagcaaatgatagaaactgggtattacagctgattacatacctttgggattctgggggcaggagtagaacagtgagataacaataggaactataataacagatgagtggaaatagttaaacactaatattataatttaagtcatttaaaaaacatgtaaattgaagcctttctgttgttgtgctcattgtctttgtccccctgggcatgtcacggtcatatcagtctcacttttctcatctaaaaaataccccaacatgcccacatataatgctgttaaagactatcagactcaagttttggttttgctactaatttgtactttgtctaatcaagacacttgactacttactctgtgttttacttttcgtatttgaagggcaataaaccaaaaaatgtgaactaatcactagactatttaaaaaaaaaatcttccagtcctggcaattaactaccataacattaagtttgatactataatgtacataaaagtagt

SEQ ID NO: 12039 - DNA, 1037 bp, Homo sapiens
attaagactgttgttgtctacctgccaattttgcaaagtgaaataaatatgaactggaaccttgtaggaaaaactgctaagtgcccaggttgcatgtggcataaaggcacttacttatttttttataaaagggattttgtagcaagagagaccccttgaattagtaataataattttttttttccattctcttttccgataattttgaaagaattttctctcaggatgactttatttggtgttcggtacttaagactcttgggtcaaattcctgttttttgatactgttagggaaaatggagatagaatatagaactgcaccttagatttctaacattgcaaataaatatgacataagacgtaaatgatcataattactttaattgattctatttgtggtggaaacgtgttttagtgaaaatcattgtgcaccagacaaagacttatggaatctagggacatcttttttagaagatttattctgtttatgattctctgaggaaatagctttactaagatatttttccctatactgttaggccctgtgaacaaaatatggcattttgaattctgagtttgttctgtaaggtactagtgaacctactcaactaaatactattagcagaactacatagcatactttcatttgcataattaaattgcataagccaaatcattaatgaaaggattaatgacaggcccataattggtgtgtacaggattctgcttgggatgttggaccagataacatagaaactgtactctatatactaaattttcatacagacaaggcaatccaaaatacatttatccacttggttggttgcggaaggcaccactaaactttttgtttcagacgtattcatgggtcactggattattttgtacactagatactagacttcagtgaaggtgtatattttttaatacactttctaaatattataaatataagctttcacatacagatcagttatatttaaaaattttatttgaatattgtttggaccatgaaatggattttctcatagaaacag

SEQ ID NO: 12040 - DNA, 1044 bp, Homo sapiens
tatggttcagaacccttaggtaggcttaatgaccatttggctattctcttttaagaagtgttgtctattttcttactaatttttaggagttatatcttcaggacaggaattccttgttgcttgcgtatcttgcaaatatctttttcctttatatagtgtggcattctactctttgaatagtgtattttgatgaacaaaagttcataattttaatttaatcttagatagcgatatgatcctttataatcataacatatcctttatgatctgtgcttttgttctctttaagaaaatcttcttctctgaaggccatgatgatatttcctagtgttatcttttagaagttttattgtgttacctttcatgtttagacctacagttcctctgggattaatttttgtatatggtttgagatgaaatttactttgatgccactgtagtgttgaattgactcaggaacatttgttgatgggatcgcctttctccgctgcacaattacatcacctttatcataaataactgtaaatgtgaggactttgttgaggattctattgtgtaataccatactgttttaataactagtgctgatggcatgagctttgtagttttttttttcttcttctttaggattttctagggcaggggctggcaaacttttttctgtaaagggtcaaacgtaaataggagccagggcaaagattttaggctaggtgggccttatagtctctctagctactgtagcatgaaagcagccatcgatagtaaataaatggatgatgatgggactatgcttcagtgaaacttaacttacaaaaaccagcagcaggccagatttggcctatgggctatagttcttgaaccctatttctaggatattcttagcattacacagctcaacagaaattttagaatctgtctgtcaatttatacatacatttatccttactgtactgacaggggcctcctgtatagtgttgaataaaagcggtgacaggaggcattcttttttcttttttttttttttttgtgagagatgaagtctcg

SEQ ID NO: 12041 - DNA, 1078 bp, Homo sapiens
cctccggatgcttttgccacgactccgtcttggcaccagtcttgctgccctggaatgcagtttcccaaacgcagcgctcactctgactcctctctgcttttatccgtcaggtctcagttcttgcgggtgggagtcggctgaaggagctgcgttatatggttgtgacatcaccctccccggcccccattttcaggtcagaactttcatgcctttggaaacgagggacccagaagagcccttactgtaggaggaatgtcgccgttagacctctaagctccgaagaaccaaggggagacagaatccagattgcttccttaaatcccaagtagtattgttttttccaccttagagtccgcccccccgcccccacttgtcccatatattgatcggccactttgccaccgtgttccaaggttggagagcgtcacaatgccccaccgtccccaactctcaagtggccgacagtgggcagtccagaagctgggaccagactcatctgcccgagggcacagtaggagggacggagggatctcccaagagctccgagggcgaggtgagaaccaattgtggggagggggaccttataacggggcagttaggaacgggcagaggtgcccccacctccagctttcaactcaggcgaggaaacttcgagaccttcccgtccacacctgattgacagaaggaagctgtcgcggcccaggaggcgagtgtgggtgtgcagaggtggagacaaaacctaaaagcacgcagagccggcgagggcttgcggtcctggacggtaggggtctgcgtctggtgccaccttctccatcaggctgcttgctgggtccaccaagcctgacccctccagccaggaggggatcacggagtgtgtcccccgcccgggctgctgcctgccggaagggggctgggaaaccgggatccccgcgcgccacttgcctggcagcgtcagtttcacccaggactggctagcggttccctcgtggctctgcgcggaggtccgcctcctcccttccctcccccatcccgcgcgctgcctccgcctccttcttctgcctccaccctcaacccccat

SEQ ID NO: 12042 - DNA, 1030 bp, Homo sapiens
ggtagacagtttgtgttaaatgttggcatttacttgtattgaccaaagttttgcagctctactatattctgtgctcaggactaaaatgctgttaatttttttttttttttccagtgctgtgcatatattctgtgatgggaaacattgttgatgtcctaacagaaatatattttgatctattttcctatggagttgtttctattatgaccatttaattttgtttttatttaatagtagtatttccttcccttttatctaattttttatatgctgctaaatatattttaaatatactatgtttgcgaaccttggtagctatgatgagagctattatcatctgtggtgggaaaagctatgtaaataggtagattgtatagagagactatcttgtgttgtgcctgtatgaatttttaaaagttgttgactggattttgcaaaaggatgtataatatttctgtctgctcagaatattaatttgtaaattctgcaagtttaatttttatgtagatggtataacatttgaaaatattgtcttatgtgattttttcccctgaaaatatttgcttgtaaatgaaaacttagctagggcttaaataaacatgttgctatgaaattatttttactgtattgttctttttccaaattgcaagagaatggccagtgtttgtaaaactttgttttatttttgtgtgatggaagaaaagacatatttttggttatctggcaatccatatgccttcctttctttgcttactagacgtgaaatattcttgaggattttaaacagtaacctaatcttgatgaaccatggaaactcactacttaaagcaattaagttcaactgtgtaatttaggaatttgaacatggatgataaaacaaaacaaaaaaaattcctataaacattaagacagtggtgaccttgttttctagagaagagaaggggtggcttgtgactggcaggtgtcacagcaggtgagttgggagggttgggagggtgcttctggggtcctagcaatgttgtaatttttg

SEQ ID NO: 12043 - DNA, 1024 bp, Homo sapiens
ttttagtagtattttagtgtttttagtagagatgggacttcaccatgttggccaggctggactcaaactcctgacctcaggtgatccacccacctcagcctccaaagtgctgggattacaggagtgagccactacacccaggcatttgttgatttttttatgtttaacattaaaaaaaaatctaatcttttctgaaagatgttttagcccttcctaactcagggcctggaattactagtataccaagtaagagttttaaaccatgtaatcttattttattcattcataatcttattttatttattcatctcttcacttaccaaataattatttatatgcaccaactctgtgttaggtgctgtgctaggtagtatacatatagtgacaaaaggacactgttcttgttgttgcctacagccagtttcctgggaattcaaggaattctaagccaaacccaagtccagaagtgtgacttttttgctttgtttgtatctcttaaggtcttcaggtcaagttactcttggagatgcttgttctgcaagtaccagtcgaacagtagctattccttctggagagaaccagatcaatcaaattgccctaaacccaactggcaccttcctctatgctgcttctggaaatgctgtcaggatgtgggatcttaaaaggtagatatttttaagaaaacatacctcttgcctatggcaaatacaacttcagacattaataacattagtgcatgtgaaatccaatttttatgaccccagaagttaatgtaaaatcataggcttttttattcagcatagtacctctaaatgtctcttgtgtccttattaacaaactgacaattttctcttttttttaatctccgttgctggggaaaataagtatatgggggaaaaataaaattgaaacattacaatttcttaatatttgcctacaagtcatgttgtttactaggaagaggtcaagattctcatcctagtttcaccagcactcttgatagagttatttcttgcaacatcgt

SEQ ID NO: 12044 - DNA, 1037 bp, Homo sapiens
agtcgtttactttctgtggctgttttatttactgacttcctaacagttttatatgtttaattcttctcccttttcactagtctactacagttgttctgaaatagcagtggtttatttgtattagtttacagagctgttgcatgcaagcctattgtttttgtcttctgtgttcatgtgaatgagctgcatgctgatgtgtgacttctgaacaccctcatgcacaccttctctctgtatgtaggcaaaaatacaaaaattaaaaaaggaaaaatattcaagtacattggcataactgataaagtataacaactatatttacactttatgtagtattcttggttgactcagtacattaaaggaggctcatgtagcatttactttatatttttaaacagtggattattgtatgtttggatggtacaggatacgtacatgactcttcagtattcatatgtacccatctcattcagaaggatgttactcttctacagtttaccattcaaagtcatggttttcctatttgaacatgttttactcattctagaacacacaatcaaaggagagtttttagaaatacttttctacaattctgtctatttagattcagctactaaaaccatcgtgcccatattgagatgttgagctgttgtttattacagcctatggattgcagtcaccattcaaactgtgacatggggataatgcttacattttaaacatttttttgtagaaaatgtagaggatagtactgatgaggatgctcctttaaacagcccaggatcagaaggaaggtaagaaggcctttagaaacaatagagttgacttatttacatattttaaatactttcatcttgtatcaaacaattaccataaaacagaaataattttcaatctaatggcctagtgaatagcacttagaaacagtaaatagaaaccaagttaagtcatgcttaactatcataaattttaaaatgaaaatattgaaatatttaaggaacataaatgaattatttttaaattaattcattttgacttta

SEQ ID NO: 12045 - DNA, 1028 bp, Homo sapiens
tgcaagtaaccatggctgaagatagttttttttttttccccagctaaaaattctggatttaaattgttggactttgtgttctgcaattctccagtgtcttaatcaatgacagttacctccatgcttaggtgagaaggtaatacctttaccattttgatttctggacaggctcccattgtctggctagaaactgttagggtcccaggattatgtcagtttaggttgtgtcttctgaacctcttgctttaactgggttagtaaggaatatagaagaacctggcttttaaaccctataaagccccatggtaaagtcaacttagatttcaagctgtatgtggtgtggactttcctcagtagagctgaattcacttagacgtctgcctgagactgctttatttaggctgaggttatttctcttgaaggactttgttgagaacagcaagaagtagccaatccatactaagtgttttggtgtggcttagaaagagtcagtagcttttcatcttactgtttgttttgtcagcacctgccgttcaacttccaagtcagtgtcacatattacaggttctattaggtggcaactacttctggctgtcaaattttgttaggacatgagttgagctattctaacaaagacccagctttacaagggcttaatagaaaagaagtttacatttcttccacattacaaccagactataagcagtccagaactgataagtaccattgtgttggtgtcccgggatctttctatcttattgattcaccatccctcaggtattacccccattcacatgatctggaatagtgcaccctgaccgctctgcattccagccagtgaaaaagaagaaaaaaagaggaggcccatcctttccatttaaggactctactgttgacattgaccggaagttggacacatgaccacatctagctgcaaggaagcttagaatgtgcagggtgtccaggcaaagattttgttaataaggaaaaaagagagaatggattttggagtaccattagcaatttat

SEQ ID NO: 12046 - DNA, 1057 bp, Homo sapiens
aagtaacctgccctaggtcatgtagctaataaacagctgagattcactagaacataagtcttgactcctagactcatgctctttccatatcaaaccatattaagttatctaaaattgaagcactgaaaaagtgtgtgtacatttttaaatatgtaggtgtatatgtatcacactcacatgtatatacaaatgtatcatcagaaatgattaaactttttctaattaaaaacttagtatgctgattagattttggcatttttagacagtaaacatgctttgtcttacaaactgtagactgtgagttccataagggcatgtactgtgtattgcatatcttggtattctcattgcctagcctagtgttttgcatagagcccccaggtgttcaagggtttgatgaatgaacaaatgggtaaatgaatgactgttaggtttttttttgtcaaggggtgtttgaaggtttttgatgtgtatttttgtctcaaagtgggaaaggttcattactgagctcttgacttttaagtggggatgacacacattcttgaattatgagtacatgtagtgccagttctcacaagcagatgccaaacactgcttcatgaaccagcacaacaatcatatgatggtagtagtttcttctcttgcaatgtgttatgacatattttacagtttttagttatatacaggtaatttttttttaactaaatataatgcaagggtgtccagtcttttggcttccctgggtcacattggaagaagaagaattgtcttgggccacacataaaatacgctaacactaatgatagttgatgagctaaaaccaaaattgccaaaaaaactaataatgttttaagaaagtttatgaatttgtgttgggccacatgcaaagtcatcctgggccgcatgcagcctacaggctgcaggttggacaagtttgatataatgtatgttactgggtaaaattaaattctaagtagaggagaaaggggctcctcttattttattatttaaaaattatttatttatttgtataggtatgtataatacaggtgtcttg

SEQ ID NO: 12047 - DNA, 1049 bp, Homo sapiens
gagcaagttacctaacctctagaagccttggttttatcttctgtaaaatgagataattatagtatttatctcacagagttactggagggaataaatgaatatttctggcagcatagtaagggtttgatatattactcattgaagattgagaatagactattggatttggttatatgataagttgttaatgtctttgacagtgggttttcagggatgagtagagacaaaggcctgagtaaaggaggtacaggagagaatgaggaattcaaaacagcaagaataagccattgttttgagattgtcaaaaaggatattagagaaatctggtagccagagagggacatgaagttcaaggataagtttgaaacattgtaatgattgtaattacaataaacttcacggtaattttatgtagtagtactgttttgacccccactgtaaaaatgagaaatctctagcataaagagaggaatgcaattctaaaatgtttgtgtgctgagaatgatctactgggaagggaagaatcgacaatgcaggagctggaaggaataattctaggagcaaaatttcaaataagtgggaaatcatggaatgcagtccacaagtggagagagtgacctttaacaggagcagggagtgtgcattcattttaacaatattgaaagcaaagtatatgggtagattttggagtgggaagatgaagttttattctgatagcttgtatttgctcactgaagtaagaaacaagggaatgagctgagcatgagtttggaggtattatagaagaagcagtgaattagttattttggagagtgggttgatttgagattacgaatgagtcttttgatagtgctgagggcccatttaagtttgtggtcatacacgtaaagtggagattgtggcagtaggagagaaaagggaggcaggaagcttgacatctttgagaaagaacaaaagatgaattaacatggtgaagccaagaaaggaagaaaacagtccttcccttgaaaagcttaaagtatacctgccaagttagatgatacacaggg

SEQ ID NO: 12048 - DNA, 1045 bp, Homo sapiens
cttataacttgggttgcttagagtaaatttacaccatcctaaatctctggttgggaattaggattttgcttctttagttctcctcagataagagtgaaggtgtcctatcctggagagatactctgtgctttcctaggtacgttttcaccactaccctcaaattgtaatggtgtaattatatcataaatttctatcaataaagaactattagggttaactttctatcaacaaagaactattagggttaacttttagagggatatctatgttttgaggtgatagcttagggaccttgtccagaaaaatcacagtcctgcgtcaggaactggaaataaaatcgtgcttcactgacactcctcagtaatgaattagcaagcttgtgcagtaagcccagtagaacgatggtagatgtgtcacacgaactgtagtaagctctccccttttctaaaattctggatcttttataaactctttgggaagggaactaagtttcatacatttatcagtgattaggactcaatatatgaagttggaagttttggtttttatacacaggtcatatttcttttcctctactcccatatataagcctggagcagtcaaattatttcatcatggagaataaaggggcaatatagacagcatgtgctgtgtaggaagcaaggaatatactacttatggctaactagcaagaacagttgtatatttgcactgcttaagttcctttggttatttcttaggtttgaaactctaaagataaatgatggagaggtaacattttaaaaggcagaaatagatctacgtatgaactaggtttggtgggtgttgagtgggcaggggagcattgttccaccttcaaagggagctgttaatttctacatgttattactaaagggagttctgtgtattccatgattggaacagggaaccgattatttatttggtctgtatatcaggttttagcctagtcattctgctggtaaggattagttctctcactcagccaaaatgagacatatttcacctgattgcatgcaattctgct

SEQ ID NO: 12049 - DNA, 1049 bp, Homo sapiens
agaggtcaagaaatttcaacagcaaatatatgtcttctctgaggcttacaatgtagtgaagaaattgttgtcagatgacaaaagatcagcctaatgggaagcaaaaaaagtgttttaatttttttaattaacatttacatttattgagctattgactatgtgtaaaatgttgtgccaagtgctggcctatgacgcctggggaaggaaaagggaagataataggtatggtgttctcactgaagtttactatctagtgagggtcataaaagtcccccaaaaaacccagggaaatagaagaattcaggcaatagagtgaaggcttaagtgtagaaaaacatcagttctctcaattggaacttggggaggatgctgcaatcagatggcagtgttaagcagtccttcccgtttcagaaggacatttgagaatgctgcatccaacatactcattttatggataactcaaatgaggtccagtgaggttgaatggcttgccaaagtctcagagcaaaactgtaagaaaaaccagtcttcagttgcaccccgcccataggccacccagctcaggggctagtagccactgagatccaacttatgccagcccttggggccagctgtagggatgactcttcctgggggaaagtgtctcatattctagttgtcacaaaggcatgtattacctacgtcctggttctgactccctagttagttcttttccctgcaattagtggtttttcagatatttcccttcctcattattaaactcttaacctaaaaagtaacccccaaactgatagaaacagagttttcctggaagccctgccaacttaaactcctcctatacccctatagatgttgctaaatggttttgtgttgcagacttgctgtttttcagtcattggtatttaagttgatagccacttgttttggtatctcaaaggatgtccaacacctggggcaatgtatgtatactcatgtgtcaaataaatgagtgaagaaatgaatgacgaaaagacaatgagttcaatagagtctattttactggttgccac

SEQ ID NO: 12050 - DNA, 1051 bp, Homo sapiens
accatcattctcagcaaactatcacaaggacataaaaccaaacaccgcatgttctcactcataggtgggacttgaacgatgagaacagttggacacaggatggggaacatcacacaccagggcctgtcgtggggtggggggagcggggagggatagcattaagagacataagtaatgtaaatgacgagttaatgggtgcagcacaccaacatggcacatgtatacatacataacaaacctgcacattgtgcacatgtaccctagaacttaaagtataaaaaataataataataaaaataacaagagtcacctttgctccgtttttcaacaagttcctcatctccctctgagaccacctcagcctggaccttattgttcatatcactatctgtatttttgtcaaagccattcaacatgtctttaggatgttccaaattttcccacattttcctgtcttcttttgatccctccaaactgttccaacctttgtctgttacccagttccaatgtcaagttcacattttcgggtatcttttcagcaatgccccactctacttgtaccaatttactgtattagtccattttcatgctgctgataaagacatacccaaaactgggaagaaaaagaggtttaattggacttacagttccacatggctggggaggcctcagaatcatggtgagaggcaaagggcacatcttacgtggtggcggcaagagaaaaatgaggaggaagcaaaaggagaaacccctgacaaacccatcagatttcgtgacacttactcactattacaagaatagcatagaaaagaccggccgcccccatgattcaattagctccccctgggtaccttccacaacacgtaggaattctgagagatacaattcaaattgagatttgagtggggacacagccaaaccatgttactggggaaacttctacacaaggtaaacacaaaggtttcttaacagcagactgcctcttactttgtaataaaagcatagcaagacttccttaagttaaaatatgctttcccctaagatttttgtc

SEQ ID NO: 12051 - DNA, 1029 bp, Homo sapiens
gttacttcaacaggtgagtggataaacaaattatgatacacccatataattaaatactacccagatagatggaaggaattactgatatgtccagtaacctggtacaatttcagaaacattgtgttgggcaaaaaagccagatacaaaacaatatatactgtacaagtatttatataaaattctagaagagcaaacccaatctctattgaccagaaatagctcagttattgactggagttgggcatgaaggaaatttttggtgttatggaaatgtttactctcttgtctgtggtagtggttacatggatttatacattgtcaaaactcattgacttacacgtaaaattggtacactttatattttgtatattatacatgaatagatgattaaagtactggatttcttgacttccaagaattatagcatacaaaattatatcttcctagctattttcaaagggcagactaattctactttaagcaaacagcatttgatgacacttttcatcacagacaagattctcctggtacgattattaaaagttggcttaggcaacttttatagctagactcacctagggggagaagacccaactctccattattataattattataattgaaagggtgcacttagaagaaatggacaaaattcctgataacacaaatttccaaaacacaaaaagaaatagaaaaactaaatcatgtatccattttaatcaccagatttatttgcttgtagcttacctgcaggtttaacagtacctttgaaagcaaatgagtagcctagctgatatttatcaagtcttatagccaccctttacttgtttttcaattagtgtttttattttgaaataactatatatttacatgcagttttaagaaataatgtagagatcccatgtactctttacccagttcccctgaataacaacttgcataattatggtatagtttcacccaggagattgatattgtttcaatccactgattgtgttcagactttccgttttacttatgcatgtgtgt

SEQ ID NO: 12052 - DNA, 1030 bp, Homo sapiens
gaaaagagtatgggcaaaagtgaagagaatattcagagcagttttcctcgtcttgaaagatatgattatagttttacagaatttggcaatacaatatagatgaagtaatatacgaaatcactcatactggaaattgtccaagattgaaactttcgaaatgtggagttatccaagatgtgactgtgtaggcttcagacagtttccaggaatgacattcttcagcgtaaaatggaaactccaattttaaaatgcctgtgtaggggttctgttcagttaatattcccaattacatctttttaattgctattttaaattttaaatcaaatggaactcacattgagattgtagatggtagtggctgcagccgtgtttcaagtctccctgaagcttcttcatcccccactactccaataaaaacagacagttggcaaggaatgggccttatttgaatcttgattcaaatgaactgaaaaaagtcacttaaagacaaccaggaaagtgtgaacagtgattggctgtttgatgttcttaagaaattattgttaatttttcaggtgcagtaatcatattgttatatattttttaagtccttgcagagatacatactgaaatagtaacagatgaaatatggtatctgaaatttgcttcagagtaacccaggagaggtggattaagtgacaatttagatgaaatgtcattggccatgtgtttacagttgttgaaagtttgttatgggtacatccggttaattatactatactctctacttttgaatatatttgaaaatatttgtaataaaataaaattttgatgtatgtcaaaataaatgctgacctagatcaaagacaaaagtatttttaagatagctaagaaacaaacagaatagataaaatggaatgcaaaaaatatctaattaatccaataaaagaagttttaaagggagggcaaaagtaatactataggctgggcacagtgggtcacgcctgtaatcccagcacattgggaggccgaggtaggtggatcacttgag

SEQ ID NO: 12053 - DNA, 1047 bp, Homo sapiens
tgcaaaagttaactgcggttttaccattactttttgccattaaaagtaatggtaaaaccacagttaacttttgcaccaacctaatagaaacgacaccaattattggaggcaaggaagccaccaggtgtgacagatggacaaatgaatacataaagaaccttgcattgcaaaaaaaaaaaaaaaaaattgaaagagactttaaaagaaataaaggaaatagtgtatttttcaattatactgaaagttatatacttatgattggtgcagtatatatgtgtattttatatgacatatatatgtgttataattcagcaattttgcaaaaaaaaaacttgggaagctgaaattttagagaaatgacataggatgtggtatgagaacttttagaaaaaagccttctaatgagtttttaaaatttttctgctttttattttttttcagaaagaaattgagattacaattagtttttcaatttgttaaatatagatgttacaagtataagagtaaactcttaaaatatgaactgttagagggagaaataagagactcaaagtatagtaagagaagaaggggcaaaaaaaaaaacccagaaaaattacatctaaatataactgtttttacaataaaaaataaaccaattaaacacagttgtaaaagacaaagatcttcatattgaattttttaatacagttgtatgctgttcacaggagacagtcacagaaaggttagaaatacagaaataagaggaaagaaaaaattagataagtactaagtcaaaaaaacaaaaacaagcagagactatttagaaaatttacaagcttgataggagagtcaaacagaacctaaagtagagaatgtcattctttttaagaaaacatggaacacttctgaaaatttaccatgttcaagcacaaacagtaaattcagtaagcttatataaatgtatagatatttcagtaaattataagtaaatccaaataatcagtatcatccagaacatgttttctaataaaaatgcaataaaactacaaaacaacagaaagatat

SEQ ID NO: 12054 - DNA, 1080 bp, Homo sapiens
taaagcaacaaacaactctgcttatatctcagatatccaaagtaatagagcctccaccattctgggatgccacctctcacttcaaggcttcaagatttatcacagaggtgaagcatagagctggagagttgagcactagcaataaatgctttggcctacaactattatttcatactctcattgtatggccacatctagtcacttggctacccctaacttcatataaggaattgtattataattctctatctaccttgaaatggagggcaagtagatattggtgaacattatttatatctttcacaatgtatttgctgatttatttggggccaagattccctattattctttctgcaaaaggccatataaaattttcattctgctggctggatcactactgtaagaagtattaatgacagataggcttgtcttagaaaacatcttctcctttggtgatgcccattaaaaatgataaaattcttcaattaacaatttctagcactgatttggaaaacctgactcattctgtaccagtatcattggtcaaagatcaagtacgaaaaagtgtgcacaaacgagtctgtcagtttttcagaaagttaatataaatatcatatgtatagttatatgacccagcaattccacccttgggcatatacccaagagaactgaaagcacgtatctactcaaaatcttctacacaaatgttcatagcaacagttttttttataaaacagcgaaaaaacgtagaaataacccaaataccccatcagctgacaaatagatacatgaagtgtgatatatcctacagtggaatattgtataactgtaaaaaacatgaactactgacaaatgctataatatggctgaaccacaaaaacatgctgggtgaaagaggccagaaacaacagagcacattgtataattacattgatataaaatgtccagaatagcaaatccatagagacaaagagtagattcgtggttgccagggggtgatgaaaagtgggaattgggaagtaaaggatttattcttgagcaatgaaaatgttccggaattggatagtggtgatgcttgta

SEQ ID NO: 12055 - DNA, 1031 bp, Homo sapiens
ttatgttgagtccatgtctttgctattgtggatagtggtacaatgaacattcccatgcatgtgtctttatggtagaatgctttacattcctctgcatatatacctagaaatgggagctgggtcaaatggtagttctgcttttagctctttgaggaattgccatactgctttccacaatgggtgaattagtttacactcctaccaacagtatattagcattcccttttctccacaacctcaccagcatctgttattttttaactttttaataatagccattctgactggtgtgagatggtttctcattgtggttttgatttgcatttctctaatgattagtgatatggaatttttttcatatgctccttggctgcacgtatgtcatcttttgagaggtgtctgttcatgtcctttgtccactttttaatggggttgtttttcttttgtaaatttgctaagttccttataaatgctggatattagacctttgtcagatgcatagtttgtaaatgttttttcacattctgtaggttgtctgtttactctgttgatagtttcttttgctgtgtgcaagcttttaggtttaattagatcccacttgtcaatttttgtttttgttgcaattggttttggtatctttgtcatgaaatctttacctgttcttaggtccaggatggtattgcctaggttgtcttccagggttttcagagctttgactttcccacttttcattctttcatttggcacacattactgaatgctaaccatgcaccaggtactgcatttgtgccaggtgttaaggaaacaaagcatgagatatagcctctcatcagaagtaggaaatatcttaggtttttatttacattttgaacccgtacacaagtatatatttagagagatgttggagacttgggtagacttgctttttcagaatatattcaaaaataagccaaaatattttttaagcatttgaaaaaaatacttgtaccacttggaatcatggtaggctgtatattacagaagaacccaaa

SEQ ID NO: 12056 - DNA, 1087 bp, Homo sapiens
ctgttttccctttccagcggtcagcctcaccaggacagtggcatgttgttttgaaatgctccccaggtgatgccagtacatcttccattaagaaccactgccataatgctatcacttttttttttttttttttcagaaaaaaaaaaaaaactgccagctttctttctttttctttttttttggtttttgttttgttttgttttttgcttcttgaacattgttaaaccaagcataagaatatgatcaatgtggttctttttctgtatagtgatagtttcacattttcctcttcagatgaagttccccaaaatccaaattgacaaactgtggcttcatctgtagatggtggtgacactggttttgtgaaacagtatgcccctcataaattagtcccttcaaagttcatttccaataaaaattcattttgtattcactacactgccttttcttctccttttgccagccttgtgttatttaacaaacgcatcattaacatgagcactgtaagactgtcagattcgatcataaaacttttatgcaaccttagaaatgtgtaaaaacggtcgggcacggtgcgtcacacctgtaatcccagcactttgggaggccaaagcgggtggatcatgaggtcaggagttcgagaccagtctggccaacatagtgaaattccatctctaccaaaaatacaaaaaattagccaagtgtggtggcaggctcctataatcccagctactcgggaggctgaggcaggagaatcgcttgaacctgggaggcggaggttgcagtgagccgagatcgtgccattgcactccagcccaggcaatagtgcaagactccatctcaaacaaacaaacaaaaagaaatgtgtaaaaaccctattagcccctcttttttccccagtatttgacatcctggtaatagtgtgtttagcatcagtaattcatagcatcttgacagtgaatataatattatgctgtgaattgaaacaactttccatttgtgttaaacatttttttttcttactaatttcctataaaatgaatctgtttcaatttttttggcatggtggcacaagctaatataccat

SEQ ID NO: 12057 - DNA, 1062 bp, Homo sapiens
tgtcacacagaaagaatggcaggtacaaagatcctgcaaggcagtaaggaacgtggcaagtgcaaggaactgaaagaagatgactatggggtcagagaagattcagataagactattaagacagatcagagccaaatcatgtagagcctcagaggtttttgatcttcagtctaagaacgtaaatccatggaagaattttaagcaggggtgtgccttgaccacattttgaattctaaactgtctctgggtgggtgtgggtgccaccaagagcatgtgttcatgtagggagactggttttttacagttgtctatgagagagatgacagttgcctggattatggtggtgacattggagataagcaggtagacagattctcagtgtattaggagagaaaaatcaataggaaatttaaaataaataattaactgtggccataggaggaaggagtctttggttggttctcaatttctgcatgagaaaaaaggtggactaaatcataaaaataagatgcagcaattggaagatgtaagaccatgcgtgcaattttggacatgtggaatctcaggtgtccatgaaccaacatcagctgggatattgaataggtatttgggaaaactggcccgtagttggaggagagttctagaatgaagaattattatccatgcatgataattaagtccatagacatgggcaacatcttgttcacaactaagatctttatcaagactctagctacctttgcaattcataatctatttgtaaaccactagtagtttactaatcaattgggcagtatctctccattcttcaggcttttaatcccagcatagaatcataagctattcatgctggaaggccttaaatgtaacctaattcaagcctttcatcttacacctacacttacatcttacttagtttccttactgaggtccaaataagtcacactcctctcctagggcacacagactaaccacctattctttaggcttctcttgtccccatacagaccttccttttttagctaacacagttctttaggagttattgttaatatgaaacca

SEQ ID NO: 12058 - DNA, 1092 bp, Homo sapiens
gacttaacagttttttttttgtttttgtttttgtttttttcaaaaatagccaacattgcgaaaatgtatagtatggtggcccatccattcaaccaatatttatttgaatctttatatgccaggcactagaattggaccttactggatatgtgctaggcataccatcttagagtttatcattttcatggagacaggttatttaatgagtgttatgaaagaagagactcatctttccttcacatcttaatatatcaaagtttcctgatttaaaaaatcttacctgttgcatggcaataagatatggatgtaatttgggaaaatagggactcagattttttgatggacagactaacagtaaatctcatggttcgttttgttttgttttaggagagaggtatgatcttcataacagacctattatatctcttttctgttttccaatttggggcttgatagtcttttgagaaaagtaatggctcaaactattcctagttctggtttgaattttaagccaacagtagttaaacaaactgtgattttagttttatcgcattattggcctggttttgcaaaatagacttctgacctttctttaatcctccccatccttcaactttgttctgttattttgaaggcttgctgtggctgctgctgctgctgcttgtaataataatcatagcataataactaacatgttatagcattaaaacatctttcggccgggcgctgtggctcacgcctgtaatcccagcactttgggaggccgaggctggcggatcacgaggtcaggagatcgagaccatcctggctaacacggtgaaaccccgtctctactaaaaatacaaaaaattagccgggcgaggtggcgggcgcctgtagtcccagctactccagaggctgaggcaggagaatggcgtgaaccccggggggcggagcctgcagtgagccgagatcgcgccactgcactccaaccagggcgacagcgagactccgtctcaaaaaaaaaaaatctttcaaatacattatgacatttaaaattcactgtaagcccgtaaggtgagtattttcactaagccctattttacaaaagac

SEQ ID NO: 12059 - DNA, 1049 bp, Homo sapiens
gatcttgccccataaggattttacctcctgctgagggtgtttctatggctgttttatgcaccatcattattgtctacccagttaaaccgtgctcttgacattgcttcgtttaatcttttcctgccactgttaactcacttgtcaatatgattaacattactgaaaatttgatattagctatgtaattatgaaaatttgatattagcaatgtaattacagtgttacaatgtaatgtatttaatatatatcttcttctaaatgcttattttcataaattttgttttataatatcatcctagaaatcttgtcccactgacttttctccttactattaggttgctatatgcacttttaattcttttaactgctgcattttatccatatgctttggtcatttctctgttggttttcctgaccttttcttgataaattgaaaatgtgtcttatgtattatatttataaatcttttgtagtcttttgttcctgaaactaagtctataacctgttaactttgtgatgacctttgttgatgtagtcaacaattttcccattataattcgtgcattttagatctttaataaattctgcttttcactgaagtcgtaaagatacttttgtacatttccttctattagtttatagttttatcttatatattcaggtattaaatttttccgatgtttttctgacttaggtagagaatcaagttctacacagcgagtccgtttttccatcactccttaataaatagtctatcattttccactggtttgatataccaaatgtatcatatcatgagtatgtatatatattaggttggtgcaaaagtaattgcagtttttgccattacttttagtggcaaaaaccacagttacctttgcaccaacctaatatatgggtttgattataacttgtagctttattcttctgcaccctttaacaggttaggcttttaattttctctccagtactctgagttccctctccttgtgtatgatacaatccggaaatttgctatggcacttgcagagctcacctcatttttacgt

SEQ ID NO: 12060 - DNA, 1028 bp, Homo sapiens
tatacaccattgaatactatgcagccataaaaaaggatgagttcatgtcctttgtagggacatggatgaagctggaaaccatcattctcagcaaactatcgcaaggacaaaaaaaccaaacaccacgtgttctcactcatagatgggaattgaacaatgagaacacttggacataagaaggggaacatcacacaccggggcctgttgtggggtgggggaaggagggagggaaagcattaggagatatacctaatgtaaatgacgagttaatgggtgcagcacaccaacatggcacatgtatacatatgtaacaaacctgcacgttgtgcacatgtaccctagaacttaaattataatgtagatatatatatatatatatatatatatatatatatatatatatatataccaaaaaaaaacaacaaaaataaaaaagaaagggcaggcttagagagtaaagtgtcagtaatgggaaagtgtgtatagacctcttctttcaaggaatgtagaagtgacggaattgtaggttggtagacttgggatagagggattgattggcaggcaaggaaggggaataatagtgtacaagatcccagaggaggagggagacctgacatgttcaacatagatggggttcagagaggaaagagtcaccatttttgctgagctacaaggaaaaaacaaacagaaataccgagaatctttgtgttggaagggaggtgatatgtttggctgtgtctctacccaaacctcatcttgaattgtagttcccataatccccatgcatcttgggagggacctgatgggaggtaattgaatcatggaggcagttacctccatgttgttctcgtgatagtcagtgagttttcatgagatctgatggtttaataaggggctctcccgccgcaccaccccacaccacccttcactctgcatatctccttgctgccaccatgttaagaaggacatgtttgctttcccttctgccatgattgtaagtttcctgaggcctcccaaaccatgctgaa

SEQ ID NO: 12061 - DNA, 1086 bp, Homo sapiens
taccatcaccgtttcatttttttttaaaaagatagtagaatataatcttgaaatgaaggacaatactttcaaacaaagaatattaggcaacttcatactgacacacaagaaaaaataataggatggtgagtgggacatatttttattgccctgaattgatgctgtggatgggtgggggtccaaagcagcagaggacaaaggggctggtaagtagcctgtattctaaagagagcacccatgtgggaagagaggggtcttcctcacatcccaaaccaaccaatacagatcaagaaaatcattggtaaacatgagagggacctgcttgactgggagaggctaacatcccattgcctagctagacatgcacttatgaggcgtccttgctaatctgcctcctgtgtctacttaagtaggaacactggagcatgatggcagcaggggagtggggtgaacacggaagatgatgggagcagagcactggagtggcctgaaaaactatcatgtggtagggctacgatgtcacttggagcccatttgagatgaaggaaaaagctttaacccagatataagattgaagttttaaagcaaatggacttacacaaattgaggaaaaggatttgagaactctgctatctatgagaaactgtgggcagttctacaaagcactgctgtgtgaagtaagtagagaaaaacacagtctttcatggttgaactccgtgaagttaagactgtataaggaacaagataactgtctgcaaatcagaggaaacttctctgtggaccagtacaggctcacagattgatttttaggaaagacctaatctggtccaagccttcactttacaggaggaaaatcagtgtttggcacacacttcagggggagagagagagctccgttgatgaaaaaaggagacttgaaccttgaagcctaggtttgagaatcgaatacaattgagactaatttgagtatgtgtttgtgtgagtttggaggtttgaaaagctctgattagagcttttgttgtagagagagttggcattgcttaaagtttctaaactgtgatcatataatgcatacataaagtatgg

SEQ ID NO: 12062 - DNA, 1060 bp, Homo sapiens
ctccagaggcttctagaattgataaacaacttcagcaaagttttaggatacaaaatcaatgtacaagtatcagtagcatttctatacatcaataacgttgaagccgagagccaaatcaagaatgcaatcccattcacaaaagccacaaaaataataaaatatctaggaatacagctatacagggaagtgaaatatctgtgcaatgagaattaccacacactgctaaaggaagttgaagagaacacaaacaaatggaaaaacattccatgttcatggataggaaaagttaatattgtttaaatggccatatgtccaactcagtttacagattcaatgctatttctacccaactacctatatcatttttcacagaattagaaaaaactattctaaaattcatatgcaaccaaaaaagagaatgcatagccaaaaccatcctaagctaaaagaacaaaagccagaggcatcatcctaccaacttcaaactatattacatggctacagtaaccaaaacagcatgatactggtacaaagacagacatatagaggagtggaacaggttagagaacccagaaataaagctgcacactgacaaccatctgatctttgacaaagtcgacaataacaagcaatggggaaaggattacctatttaataaatggtgtttgaagagctggttagccatatacaaaagtttgcagctggaccctttcctttcttcatatacaaaaatcaactcaagatagaacaaagacttaaacataaaacctaaaactgtaaaaagtctagaaggaagcctaggaaataccattctagatataggccatggcaaagattccatgatgaagactccaaaagcaattgcaacaaaaataaaaattgagaaataggatctagttaaactaaagagcttctacatagcaaaataaactagtgtgagtaaacagacaaccttcaaaatgggagaaagtatttgcaaactatgcatccaacaaaggtctaatatccagattctgtaaggaacttaaatcaacaagcaaaaatcaaacagccccagtaa

SEQ ID NO: 12063 - DNA, 1567 bp, Homo sapiens
agtgtcttaaaaacaataattgccttattgcattttaatatttaataaagtagattaaataaagatttgtattataacagttattcttttatccattgccaaagcaacccttttttgcctattaaaatctggctaaactgttctgatgttgtttcttaattcattaaacatgaaactaggttttacaaactaaattatataaagacagaagtctaaaaatggtaccagaaaatttttttttaaaaaattaatgtgttattcaaatatccagcaattaaagactcatgagaaaaacagaatagcatattagatgtaacagtttaaaatggattgcaaatcaatgtcagacttaaatagaaaatatttattatcacctcatttctaccaataatttcagatgtttaatgggactttgaaaagataggaaaaaatagaaatgaaaatttatctcacctttaatactgtgaatactatttggagggtccctggtcagacatttaaatatcaaacttaagaactgacatggagcctttgattagtttatatacaggatctgaatatttacacacatagcacactatagcaacctcttgtaaaaaatcatgaagatagaattcaacagtgtatattctattaaaaagtaaattggctgggtgtggtggctcatgcatgtaatcccagcactttgggaggccgaggcaggaggatcgcttgagcccaagagtttgagaccagcctaggtgacaaagtgagaccccatctctacaaaaaaattaaaaaattatccagatgtggtggtgtttgcctgcggtcctagctacacaggaagttgaggcaggaggattgcttgagtgcaagagtttgaggctgcagagagccaagattgcaccattgcactccagcctgggtgacagagcgagaccctgtctcaaaaaataaaggaaattggctttgactatgaaaaacagccattttcaacctttttataaaacctcttcagggaatattggaatattatttttgtcaggcaaaaataatccagggcttgagcattgctgtagaatatgttatctgttcaaaacttagcagagcacgcatgcatcacatgcattgtcatcagtatttgagagctgaaccaatggtttttgatggttgccgtaacagaagatctgtgaagaggatggtggtttgcacctgttcctgaagtcaaactggaaaaggttgcaggtatttcaattttctcaatcattttgcataaatgtattaatattttgagtagtaatagttctaaacctgcaggaaggcatcattgtatactgtggtatgtagagaatactactcttacactgctctttatcttaaaatgttttggtatactgtgaatattttcctctaagtatttggtgtattttgacagttattaaaggagaatataaaattaaagattctggtctaaactaagaataatggaaagttgcttcgtcctgccttagaggagttttcagttcatcctcttcttgagaaactatgtgttgctgttactaaataaacatttactcaataaacg

SEQ ID NO: 12064 - DNA, 1026 bp, Homo sapiens
aagtaagctgcatgttaaaaattgagctgtgtaaggtagaggaaaaatagtgaaaactttgggattttaatctgtgtgtgcgtgtttgtgtgtgagagagagtgagaaatgtagtgtttcattttgtatgcattaaactgtcttgccaaaactcagatctaagattgttaaatagatatttggggaatttttttttaatcactttaaatgaaaaacgtcagctttactgggcattctggaagcaaaatatattatgctgatggtaaagtgagaaccttaagagtatactcatgatggtggaaagtgtgatggaccaaaatgcataagctatatacttcctgtgagtagtaattttagttacaatggagtagaaaaatatggtccatttaaacttgtcttctacctcataacggccttgcaagatacttttgaagaagcaaatgtctagagccttactttaagtaagttaaacaacttaagtggatgatttggaataagattgttacatccagctgtagaaaatgtggttttaattgggttgatgtgcatttttgaatatcacctaagacagttaatttttttaaatcttgagaaattacttctttggcattcttgacctgttagctaatataactatagattctgaatacttagcatatactatgctggggcacatatcttattttaccaacaatatgattatctatatggttatcttctttttctccctgatattttaatgctcaagtagaaaatggaaaatcatgaaggaaaaatacaacctgtgaaaattgtggcagttagctttgtgaagacacagtgacctctgtggagacatggaatatgcagaaagagatggttagtacagttgttctgtcgtctgcagttcagtcagggacaaattgagagaggaaagtttaagcagggtgcattagaagttgataaccagtccagcattcttagaacagatgggtttagagaacacgagttgtagttccttggcagaatgccatggtgaatataaga

SEQ ID NO: 12065 - DNA, 1078 bp, Homo sapiens
agtattattgccagagtggtttttaaaaggtgggacgcgggtgtggtgtgtggtaaagctcttcttttagccagtccaccttttattagtttcaccgagatactcgtagggcttttggttgtcttcttaaccagtatttcagtcttctctgcccttgcgcatgttctccaggattcccccggagatttaccatggctgtctttctttaatgggagataatagttctgtttaatttattgaaaatatttgttaaacatctaatttctgtgagacgttaaatggagatcgttcatattaaactgattgaagaagtttggaaaataattgaacttacatatgtacctttgccttttaaattttttattttttaaaattttctttctctagtgttcttttgaagatgacaacatccgttccttattaaaacctttagaactggaactacaaaaaacagtgcatacatactgtggaaaaatttacaaaatatttatcaaacaactagcaaaaagtgtaagagatcgttatgccagatcaccaaaggaaaagtgattcttggtgactgcttaatcaaatggatgaaaacaaagaatcagaagataagtgtgaaggaatcgtcttggatgaagtattcaggaaggaattactcatctccagaataattttttttttcctaaagaagttaagtaagcagtattttcaggtaatgaagaataagttaaaatcttgggcctcaacattgaacattttttatctctgatgttttgtaatgttacttgctatcattccagtattgatgaaaatactattgaatgggtttaacctgcagacttctgttgactcatactctcaagagtggtaggggtgtgtagatggagaaaatgtacctcaaacagtgccaacactcaagactgtgagtagagcaataattttatgtcagcactaacctcactttaaaagtgtgagaaaaaagtttgtttacaggagcagaaacaggtctgttgtttctgaagaaatgtgatgtaactgatgtaaccattgacaatctatgtgtgcctttatacatttcatctctgtttta

SEQ ID NO: 12066 - DNA, 1177 bp, Homo sapiens
aagatacgaaaatgttaatagtggtgggtaatttgtttcttaggctttaaaaaattttctaaacggtacttaataaaatgtattgattgaagtattcgtagaaacacaaattttcaaaatttaatcatttttaagttggagtaaacaggattatcataagagaaatgatcagtactgcgataaaaaaatttcaagctgactctagttattccttgatacacaatgtttctcattcaggtctgattttaagacttatctgcggatattggtgaaaaattcagctttttaggccacttctctggggagtcttgattaactgggtatgggataggatcctatatctgtatttttaacaagtgacctgaggaccaggcaggtttggaaaacaacacataactgatttgttttgtaacttaaagtacaagttgaggctgcaaatggtattgttaaatatatataattttaattaattttatagaaaaattgaatttgtttttgagatttctatttccatgtttcactgttgtagagtttgacaggggatatggaataacctgattagttatcgtcttcgtagaacaaaggtacacattaggtgttgattgtaaataaattgtgcatttgttgaaataaagctgtgctatcatctgtatctgaaagacggagatcatacctaccttaaaacgtttctagtgagtctaaatgggtgtgaaagtgcttgaatctgaaaataactctgttagttgttattaccatcaatgagtctgactgtgtggtatgaaatcaaagacttaagaaaatacatagccatgcctgagagggtacaaacacagattttctaatcaagtcataagttttaccgatacatacacattttcttctctttctggttcagccttttaaatgaagatatgtagccttttgtgctatgctagaatgtggtgtccctttagaggaaaacaaagttataatgtaacttttttctgttggttaagaaattccaaccttgttctttatgcagtagtatacacaattacttaggcagcattttaaaaaccaccagtgccagaccgtttctagagattctgatttaataggtcttgtgtggcaccctctaccagggctaagaacccctgccttagactgttgccatttgtgagagatgtgatcagatttt

SEQ ID NO: 12067 - DNA, 1035 bp, Homo sapiens
gtttcactgtgttagccaggatggtctcgatctcctgactttgtgatccttctgcctcggcctcccaaagtgctgggattacaggcgtgagccactgcgcctggcctaatttttgtatttttagtagagatgaggtttcaccatgttggtcaggctcatctcgtatcactgactctttggtaagttttgcatagttttcactgaagcctcctatcttggacattttgaaatgaaaattactttttctagtttaacttaaaagtacaaccaggcatggtggctcgtacctgtaatcctagcagggaggcaaaggtgggtggattgcttgaacccagaagttctagaccagccttggcaaaacactctctcaacaacaacaaaaatacaaaaaattacctgggcatagtggtgtgcgcctgtggtcccagctactccagaggttgaggtgggaggattgcttgagcccaggaggttgaggctgcaatgaaccgtgttcgcaccactgaactccagcctgggcgacttgtgtgtgtgtgtgtttgtttgtatgtatgtatgtatgtatgtatgtatgtatgtataaaaaacctcctgtaattggttttaagtaaacttcaagtttgacaaatgttattatgccgagtgttgttttatcacatgtaaatacatgtaaccacccccaaaattaggattaggatacagaattgtttcatcaccgcaaaggtaccttgtgctaccccttggtcagttgtagacaagctacctagagctagatgctttatgccttattaaacttgaggatgagccatagtaacattttatttcagtttgatccacagtgaaaaagttcccttttaggacttcagtgcttttgaatgtcagtatgggtatagtgaagacatacccacctaactcatattaatgctttgcctcattaaaattatttaatagagttacctctttgaatgttggatgtttaatattctgctttcaacagttttaagcaactaatagccagaacctggataactacct

SEQ ID NO: 12068 - DNA, 1062 bp, Homo sapiens
ttggcaaaaacaagagaaaagaaacttgccatattttacaagctgcaattttagaaaagctttaacttaatgatagttttatcattgttttcttgtcccaaacttatccagggccatagaagtatgaatctaattaaaacagaaatgggaattattgcacagaaatgggaaataactaattttaaatcagtcaaattggcttcttattaaatacaataattcttatgaaaatcatagtaccctattttcagacacagctgccagtttacacatttctcagtatcctgaaaggaaaaaagtatagccccacttatactatgtaaaattaccaataaaatatttttatgactacagattttgcatttttgtttacaactatttaaagagttttatgttgtatttagaatttcaacctagaaaccacacagtacttaaattctcctggggtctcctgctttctcttaaccatttgcttaatatatatctacctaaaggagacttctgaattgtaaatgaacttaaaaatagaatgtggatgcaaaatatcacataagacatcatgataacatttgaagaaaaaataaaactgtagaccctaacagttgtgatatttggtggtttcatgtggtaatgtaattttctgtttaattacagtactttttacaggcacagtggtactgtcttttttgtaagatgctagttgtgaaatacaattaattgcatacagtaaaagtctgtgattaaaacatttatatacctcattctttagtgttgttaaatgaaaaattaaaatttgtgtttattataagatactttcaatggaataccagctaaccagatatgttcctttaaaacatgaatttttttgtcttattctgtttttaacatgtttcaaatgttttatacatttttggagatagtaaaaatttaaaaatgtaatagggaaaatatttaatttttaagtcaaaaactatgctttaaaggaattacatcttatgatcaaataactttcaggatgtattttaaatgagctgcaagagagaaaaatctgacaggagatgg

SEQ ID NO: 12069 - DNA, 1033 bp, Homo sapiens
ggctgtaaatacatatttgatagtcatttgtacacatgatttgagttgaagctgtaggagtgggtaagacagatcagggagggaatagattgcctaccatgagaaaagagacctaggagagacttttgaggaacatctttatttttttacagtggtagaagaagagcatcccacaaagaagaagaaagaaatggagaaggaaaaaaaaattaatagggagtaagaaacccaggagagtgtaacaatacagaaacagagggaagaggatattttcaaaaagaggggggtgtgtttagccatctccaatggcttttactttcatcagacagaatcttaatttttctctcaagttccatgtagtatttgttttaataagtatggcatttagatttgtatttttaagttgtaacaagataatacttttgcgtagtgattgtcctcagcttttcatgttacaataattctggtttatatttatagactaaataaaggaggttaatattggtaggtaggaagataagtaaaattatgttagtaactaactttgtttcccaaggatataattatctagtaatatctatctttaagtctatgcctctaacaatgactttagattataactacaaaatgtgatagaattaacaacaaaaaatcccaaaacattgggtacttgttggtgtcaagaatttaagtggtaagtaaatgtacagtagctttatttatttatttatttatttatttatttatttatttatttatttattttttgagctggaatctcgctctgtcgcctaggctgctggagtgcagtggcgcaatctgggctcactgcaacctctgcctcctggtttcaagtgattctcctgcctcagcctcccgagtagctaggactacaggtgcaatcatgcctggctaatgttttttggtgtttttagtagagacagggtttcgccatgttggccaggctgtcttgaactcctgacctcaagtgatctgcctgcctcagcctcccaaagtgctgggattataggtg

SEQ ID NO: 12070 - DNA, 1049 bp, Homo sapiens
acttcagcaggtattctttttatttcctttatagtgtgaggcctgataactaatatcctagttgtttaactcagtggcccaatctcactcatctgttgatgtcgcctccaaagtatttgatgttcttggccctttttaaattgaaactctacttccttcatgtctctaagactcctttttcatagatttctgtgtatatctctgaaacccatttctgcctccccaaacttggcatctgtatattctttactttgtatgtggcataaactcctttctggaacctcagctagaaactgtcattgtctcagctttgattctaatttgtagtcctccttcatgtcctttctctggattgtctcttaaatctatcctttttccttttatgtagttacagttcagaagcccatatcacttctgtcatgaactattggacaaattggtctctcctttggaatgctactaacatgatcttcattatcttttttgaaacctatgtgattatgttggtccctgtatatttaaaaaaaaaattgagtcctattagtggctgctgaataaaggctgagatccttaggatagtgttcaaggccataataataatctatccctaaactaccttcctagcttcatttcctgctgcttatcccaatcctgtgctgtgtcagcactgaattatttttatcatatggtactttttctttctctttctttctttcttctctttcttctctttcttctctttcttttctttcttgaaggagtcttgctctgtcgccaggctggagtgcagtagcgcgatcttggctcactgcaatctccgcctcccagatttgagcgattctcctgcctcagcctcctgagtagctgggattacagacgtgtgccaccatacctagctaatttttttatttttagtagagacagggtttcaccatgttggccaggatggtctccatctcctgacctcgtgatccgcctgcctcagcctcccaaaatgctgtgattgcaggcgtaagccaccatatggtacttttcaaagaagccctcta

SEQ ID NO: 12071 - DNA, 1035 bp, Homo sapiens
atgttacattttgttagaggatattataacagtcctttaggtttctcataggtgttattttagagagctataaaaaagatttcacatagtagaaagagtgctagatgttacactagtatgattttggtaacctgggttcatatctcatttcatatcaaccatttcaatattcagcattcagcaaatgtttattgagcatcttatttaagggctgagttggatactagacatacagtggtgagcaaaatggatttttttgtttctttaaaattttacagttttgcaaattagaaccgctttaactgtaccaagctctatatgtgaggtttagtgttagtagatctttcctttatgtgtaggctgaagaggtggaacttcttcattaaaaatatatgttgtttataactgaacacagtattattattatggttaggtaaaaagagtgagttatttcagcttcttttaaaagtaagctataaaatccacattctgaaagaagcttaaaccaactatcatctggtagaaatcttttcagcatcgttgttttcttgtcatacttgctttatgtcttcaaatttgaggtttggcactgattcttctagacttttggtgtaggaatgggagaaaaaaattgaggaccatctacataagtcctttttaaagaaatgcatggttcctgagccgcctcctgtctatctgaggagcctttctagcaaccatttagttgttcagagactccttattctaggagatttcttacttgtttgttttttgtcctgtaagaggactcacactggttaattgtatatgggtaaattttacaagtgattattagtgtttgtgtagtctggatatcagagtggttttcaaagtgtagtctgagggacactgagagtccctgagatctttttagttgaagctttctatgaggttcacactgtttttataataatttgaagatgttatttgcctttttcactgtgatggtgcagaggcagtgatgggtaaaactgccagcaccttagcatgaatcaa

SEQ ID NO: 12072 - DNA, 2031 bp, Homo sapiens
tccattagaaactaaactataacaataagcatactaatcttactgttgctttaaaaaagaaggcacatgtaatattgacatatacaaatattcagtagacgttagatttctaaaaaatgagatcttgattttttaaaaaacactttacagaattttattaagtttaaaatttagagacaggaatggttgacagtaacttatctgaaaaatttctcagtgaagctcgctggttttgacatgcttgttttttgtaaatcatcatatgctttttgtatattcccacaattgataaaatatttcgtacatttttcatattcaaaaagcaaactttcaaacgtatgctaaatttaagggattacaacagaacattccaaaaagaaaaaaagtatttgctaaaatgattgtggttactatttttggacccgtgatttgtgatttaagtattttgaaaagcagagtatcttcttggctgtgtaaggttggagttggtttagagtatatttgtgtatctgtgttagtactttgtgctttttaaaatgctcaataagcaatttttagaaaattcgttttttggaggcaggaacattaaagtggaaacaattataatcttgatctctggtactatatattattgctttttgttgttccctctctattttcttgtagccattagaaaaatactgaaactagaagagcctatatgtttatttgcagggacagcaaggaaggggggaagctggtgtcctactccacagccagtcttggggttagaggaaccctgagaaatagagtaggtggtggcagctcagaagagaagaaacaggctgaatacctggcacctggaagaagaaggaatatagtacacaggggagttggcccaggacagagaagtgggcctagtttaaaagaggcttgaggcccacatgggggcccctgacattttttttttttaccagtacatctaagctcttgtagatccaatttttagtggtggaaacattacttgaggaggactcagagaagcattgtcatttggattgaaactgaagaggctctgggcaactcaccagaaatctaagggacactgtgttcctgaaagtaagtgttctacaccacgaccctctcagcttcttccttcctctctctgaattctcttctcttttgattttggctctaagttaaacctaagagctctaatttctctgttatctgttattttcctagtggtttctgaaattcagggtagaatctgtgtttgtatagaacagtgtggaacagggtattgttactagagaagatattgattgcatcacagaatattaatatttttcctctctggtaatgttaaaaaaacaagattaaaggactgcagaacggtgttgagaagcaaaagtttcagtagttggaagaaataattctccataattgacttattaatgaacagggtaatttccagagtaaggttggcaagtactaaagccaagactggatagctgcagagcagaaggatgcagtttgctaatgatttgtttgtgtgacgcacagatgggatttgaatcctttgggtcagactgacctttgaactgattctgcctcattgccaaatgttaggccaagtctaagccattctagacatttgaaaaacttttttctttttagacctgcagagaagattgagtccttgttctacctttgaagtcttctttttttcttttttcttttttgagataagatctcattctgttgcccaggctgggttgcagtggcatcatccaggctcactgcagcctcgaactcccaggttcaaggaatcctcccacctcagcctcccaagtagctgaaactacagatgcacaccaccatgtgtggctaattttcttattttttgtagagatgggggatctctatgttgcctaggctagtctcaaactcttgagctcaagtgatcctcctaccttggcctcccaaagaactgggattataggaatgagccaccattcggcccctttaaagtctttattggcaatataa

SEQ ID NO: 12073 - DNA, 1032 bp, Homo sapiens
ttcatattatgtgcttaaataagtacatcatataccttatattaggaaatggtgctattatctacctcttttcccttgccagaaacatgggagtcacagtagatttgtccttttaaatctctgatgtaattttttttttctgttaccacagaaggtatctctatcaaagtattgtatgatagttggtttgttggtctgtctctaccactaaactgtaagatttctcctgagggtaaaaactactgttagtgcttagcacatgggcttgaggctaacagagtgactgagtgaccgaatgaatgaacacacacaatgtactcttttagaaactacttttcccatttttttggtctgtctttcccattgaatataaaggtatatctatcaatcaacatattgagctgggcacatatggattacagagacagccttaaaggagtttacattaaaatagatgagatgaggcattgtttatgaataacacaattcagcagagactagcataacggaggagaaattatatccagttgaagctattagaaactgacacattgacctgaaccccgaaagaatgaggaaaattttaatgagcagtgattcagaggtggaagaagatagaagctgtatgaacaaaggcacaaatttggggaaatacaggccatgctactggagcattgagtggtttcttttgggtagacttcatagtgtgtgcgtgggaaggagcagtgaaagatgaaggagatgggagccaaatcatcaaggatactgacagtgggacaaagaataggcaacttacagaaccaaagatttttgaacaaaggaatggtgtgattttatttattccttaagtagaagactacttaaggatatgagaaaattataagagaaaaaattaccataaaggaaccaataagaatagactgttaaaacagtaatgcccctatggacaagaaaaaagcagtggaattggaaaagaggcaacagatgagagatcattaattgaggatgatgtagaaagccaatacttctttt

SEQ ID NO: 12074 - DNA, 1049 bp, Homo sapiens
aaagtaacagaagagagagccaagtataaagttccaccaacatgttaatggtgggcagaggaagaagactgatagaaatggatttttcattataaaagcttattttatgaggttttgttttgttttttaaataaagcagtctaaggatttgccttctcaaacagggattgcttaataggaataacaaggtagtggtgagggtagaattggaaaagtgctgctccataagattgacatttgaagcacaggtgtatctggcactatgatggagttgatagttgccatgggtatacctcaggaacacagcagctgtccagtatgtatgccttagatctaccacatgtgtagagtgagtttttttctctgtatttactccattgtcaaatttagaaacagacagatacatgtgactccaacaacagtaagtatattattctagtaaccaaaaaaaactttttcctagggcctgtcttatagactgaaggctgaaattattcataaactgtaacaaagaatttggtcaatgtctgcaacctaaaaatttgatgttttatgattttaaaataaattgtaaatatttggtcttttgtttcagatattttccaagtatggcaaagttgtaaagtaagtattcacattaaattttgtaacttcatttaaaagtttatctgaatttgcttctacatttttttaatgacagatttttaaaaataaaacatgcttgatataataaagaaaatactattaacatttttatgacaatttagttggttttccatgtacataaacatgtagacaatttttcttaaagactattacatacatacaattttcttttcttttttaatttgacataccataaatgtctttccatgtgctataaagatacatcctcatagctaatggtaaacaaatattttggttactaggaagtgtgttatcaagtatactataagtaacctactttcaaataaataggtggttttttgttttgttttttttcatataaatagtgtaaaaacaaatatttcagtgcatctgacttgcag

SEQ ID NO: 12075 - DNA, 1063 bp, Homo sapiens
atatttattttcttttatttcttttctttctttcttgttaaatagacaggttctcactctgttgcccaggctggagtgcagtggcacaatcatagcttactgcagcctcaaactattgggctcaagcaatcctcctgcctcgacctccccaatagctgggactagagggtgtgtaaccatatccagcttgcacctgcatttcagagttctgcttcctactctgttggctgcctgcccctaaggaagagcaaactcattctaaccactgggattctcaaacaattttctcaatggtcataaaatttaggatctttctgaccacctttctgctattttggctaacactggcctttgttgaccctcatatcagtttcctctatactgactctgatccacaccaggtctgttctgtttgaaaaatccaactcaaaatagcttctctgagaaaaggaaatgtgttggttcattcagttgaaaagtccaggactaaatcttgtgctagcgtggtggaatctatatgttttgtgattcctaaggactgtcatctcttcttcttcagcatgtctttctcttgtgctggcttcattgtcaggcaatattgtccaagatggagcaggtgtgcacaccagcagctgtaagtttgtatcttcctcaataattcaggaaagttccagaattgagctgatgtgccatcagtcatataccatatctgaaccagttactggccatgggtatggaatgttccagttggctaggtttacagggtcatgtgtcccaccctaaacccgagggtgggttctgccccaccaaaactgtcacaaactgagagtggatgagagatggtgtcccagagaaaaattatttttattagagaaaaggaaaataaatgtcaggaagtcaaaaaccatacatatctactgcagcacactatacatattttctttgtccttactccatggctttagacaagaatgatttgtattttgttcataggtaggtttatctttctaggaaaataaatctgtttctttggggttttttttagtatcccctttcaaaaaac

SEQ ID NO: 12076 - DNA, 1024 bp, Homo sapiens
ccccagatcactatccaacagaaccttctgcaatgatggagaccatctatttttttttgctgcctagtatgaagctactagctgttgagcaacttgataggtagctagtgaagctgaggaactggattcttatttctaaatctaaatttaaatagccacatggacctaatggctactatattggacaatgaaagagaagaaagagcactggatatatatatttagagacagggtctccctatgttgcccaggttggtctcgaattcctgagctcaatcgatcctgtctcctcaacctcccaaagtgctgggaatacagatgtgagccacacccagccaggagcactagattaagagtcaagagatttaatacttctcccaacagacactctttggatgaccttgggaaagtgtttttaacttccctttgcctcagttttgttatctataggtgataggtttcattgcattatgtcattgttttatttcagtattactgttacacgattgtttggttgaaagaatgcttctttgaacaagtgagtcctgagatggacatgccattttgggagtgtatcttgggcagagtccccaaagcacaggaagggataaaagttgaatttaccaagtagtggttccacaaaggaggagagcgtagtttgctaatcagcacatatgaaatattcagaaaatgtcttgttttccactaaatctccaaggcttcaatcactgtctggtacacagtaaacactcattaaatatttgttgaatgattgaatcaaagtgatggttaaatattcagtaaaacagagttggtattcaagcctgtttgatatggtcaatattactgcgttttgtttggtttgggtttttgttccctggcagatttgtttaagaatagtctcagatgaccaggcatggtggctcatgcctataataccagcactttgggagacagaggcaggatggtcgcttgagcccaggagttcgagaccagcctgggcaacatggcaagaccctgtctc

SEQ ID NO: 12077 - DNA, 1492 bp, Homo sapiens
ttatgcctgaattacagaaaataatatggattgtatttagcaactgagtgaggtggtaaatgtttgcttaccttcaaagtggaattaagagatacataatgttacagacctaacctcaggctacttgtaaagaaaatcaaatttggtgattaaatagtgaaaggcataattctttttactctctgggcccttagaataatagaaggtttatatgcacttgggttaggagtgaggttattgctaatgctgaacaaccaagtggtatataaagaaaatgctatgcagaaataatggccattctagaaggattctagggggatgcttttttaacagctattttttactgttacctttattaattgttaaaatatttagaatgtattataccttacaaatacccatttgttctatctcaaaattttgtgttaagctataaaaagccataatgagaacattttcaactctgagctctgtgtcatttgaaactcaacaaaacattgaaataatgatctttgtgttcccttataagaaaaagctaattatgggtatgtaatactcaggtaaatatatgttgtgaaaggttttaaattttaaaggtgggaataagaaaagcaatgaaaagaaacattgctaaactgattttatactcttacataaagattattgtttttcgcatctataaccacaataatactatttaaccccaaaatagttgggccaagtctattccattttcctctgtagtctaacagaaattactgctttttgctttgttttgtttttgagatggagtttcgctcttgtcacccagactggagtgcaatggcgtgatctcgactcactacaacctctgcctcccaggatcaagtgattctcctgtctcagcctcccaagtaactgggattacaggcgtgcaccaccatacctggctaattttttgtatttttagtggagacagggtttcaccatgttgcccagtctggtctcgagctcctgacctcaggtgatccaccctcctcggcctcccaaagcgctaggattacagggatgagccactgcgcccggcctgagaatttatgtattttaaaggagtttgaagaattttgatagctacccacccaaagcaacacttaaatgaaccatcccatctaagtgtccatattgcactacctagtgaggtactcgtgtaagaaaaaaaaaaaaaataagttctagtccattttgttttatttaaactagaggaattttcatcttgttgcccagtaccttagggaaagagttggtgaagagaacgtgagcctcggttttagtgggaaagttctgtgttttataaccttcaccacgaagagaattgggctttgctggcattagcaaattcactcctttattctcttgggtttggttaaaagtccttttttaaacttgaaacttcctttttttctagcaagaatttgcctcacctcttgtgatgcttttcttcctcacaggtttc

SEQ ID NO: 12078 - DNA, 1068 bp, Homo sapiens
ctcaatctgctggacattttgttaaggtatgttgatcccccatgagcccagtttagttccattgtgaataattatttaaaatagtaatattaaataatcatctctttgcccctcatatgttttattttctgcaccctgaactttgaggtccttgaggaaaacaactgcagtattaagagtttctattttagaaccaagcatatgatagtggctcaaaaactttttctttgatgagcagattaaatgtttctcaattgaaaagccaagtttaggacaccagaccctgatgactgtattaaccccagtgagagtcactgtccacttctttatctctggtgcctggcttgaaatagcacaaaatgtttgatgaatggaaggagggtggaagggagagagaaagagagaaatttaattaaagattcagagtttaagaatgattttacacacattctcatttaatcctaataacaaacctgtaggtcaattgtctcattttataaatgaagaaacaggttccaaatggttgagagaatccctgtggtcacacagttattgaacattagcagccagcagagaatgcagatgttcttacgcaggtctggtccactctaccagcttgcttgaggcccacatttggagtactctctgtctcacagccacttccccctccaatttctgtttgccatcatccatcctcaaaccctctccaccgtgtgtatccttctaggttagtagcttcagcaaccaccgagttattcaacctagaaaactggatgttatccttaactcctgttctcattttcacattcattcaaccacaggtcccatctaatttgcctcctggacatttctggaaccagcttcccccttccctccattctttcgtcccattcaataacccacctaaatccaggcttctggcctcttccacaaagcagagtgatccgtccaaaatgaggatctcatgataccacacctttgatccaaatgtgcttctactaagagccctccacagcccgctctgcactccttcacaaacctcctgccagtctctccctggcctttgac

SEQ ID NO: 12079 - DNA, 1048 bp, Homo sapiens
cacttgttgacacacagtgattaaaactgtgtttaaaatgtgcgtgcccattgaccaaactggatttaattttgggaggcttagagagggtttgctggaaaataaaaataacataacattcattttagttgcattcctaatattttcaataaccctaataactttcttatcttccaaactccccagataaatgctggtgtaactatgcagtatgtagtgaaactcttcctataattaatctttgataacacatgttggcatatgtcaccatacctactggcctagatgttccttttagtagcattgtaattaattaaatcactcacttttcagcaaatccttaggacctcaggtcttgttcacattctaattaggctgcacccaaagttataagcagccaccgggaagcattactatctgtattatatctgagattaagtttttgaattgttcagatgaacacagcagtgagccatgatgtgtctcccagaagattcataagtgactatgaagtactgtaccaataggaagaactaataaatttgacattaataatcgccagtttgaatctgggtcacttcagccatgactcaaagatcaaacgctatcagatggtaatgactgtgtgaaaattctgcaggaaggcatttcatttcttaatgacacctttgtgggccttctcagcagactgttagagggtggaacagaaataaagtcgaatatgccccttggtctggaggctagcgctccagggtatggttgacacacttttgcagagatgctttaggagcagttcacagtgttttctgttgttctctctccttaaatggatctacagaacctttcatcttttgcctcttttcctaaccatttattcacttcaaagtgatgggggctgttttgcatattctctgccttcttttctcttctctgaaaagtaaggagaaattgcacttacaaatgcatgttaaccatttaatgttaagctttcccatttttatttcaatttggtggcatggttttcctttcaacacacctttactgagtg

SEQ ID NO: 12080 - DNA, 1846 bp, Homo sapiens
aattataagttttaaaagttgcatcataatttctctaaaatctcttataattacttgaaagcaaaatacaaagaattaagtattatgagtgattgtctataatactcatgaaatggaacaagaatctttacaaagtattttccagtaattaagtaactctcttaatggcctatacctatattttgggctctctaatatcatgggaaacaattttcagtaaagattatcattacttatattctacttactgcagttaatttcctggttaaaatagtttataaagagcaaatttttccttttaaagaaagacaggaaagctacatgtagtggtgcttggctctatagccccagctactggggaggatcgcttgagcccaggagttcaagttcagcccagccaacattgttagaccccatctctggggaaaaaaaaaaaaaaaggtaattttaaaaaatcaaagtgattctcatctgtgaatagaaatgttaaaagtatcatttgactaggatagactcttcccccttggaaaaaatagctgtctctctcatctccatgttatgtaaaataataccaactgtttaacccttattagtgagagaatattaagattgcctaaatctatgtatgattattccacaataaagagaaggagttaggaaagtgaaaggattgtgtttctgggttgcttggttggtcgattggtgttttaagggaccattacttctttttcttctggtcacagaagaaaggattattggattgcacaataatatctttagaaggttggtgtgagcaagcaagttgagagagggaagtacagtaatctgggcaccaagtcctgcattgttgcagttcctcgaaacctcatgcagcctatggagccagcgctccacagcacgttccaaggaccaagatggcattgaggaatctggagcagccccaagcctctgacttccccatctctggacacacagaaatgtagcgcttcatctgccccagtaactggtaatcacatccccttgtttatggtcatgctgaactgaagtggaggttaattacctacgtgttgatgaatgaacattttggagcagtgaaaaaagcctggcctaaaattgtatggggaatctgagtaagctgctatttccccccacttcccctctctcctgaagcagggatggcgaaccagacaggctttacaggttggagcacgctgatgtcatgacacttctggcacagagatatgatagaataatcagatcacttttctgtatgccagaatgacacaatttttccaagaaccattcctgagccactggtccactggcattgactatttccagttgtggggggtggggagggtgatcaaacctctcagaatgtaataattcttcctgtgtctcagttttatgcacttgtttagactaaactctaaatgcattttggttatttttgaagggacctctccaggaacaagaatgattgcccagcctgaaccgattagacctttccagcttcattctcctataaagagagattttacatataaaataaaagtaaaaatgtcagccaggcagaagccaatgtaaacattttaaaatgtaagctgcaaactagcaagcagctatcatttgcctttacttaactttcttctcccctaagtttggtcctaagtgagcctaaaagtcaactgaccaattcaacagcagttgcatttttctcactggtagatttggggtaaactcttgggagagatgcctttcatttctagtggattacacttcagaaaaaaaaaaaaaagttagggctgtgttatttcagttgttctggtactgaagtcatggactc

SEQ ID NO: 12081 - DNA, 1084 bp, Homo sapiens
tcgcctgtcacctactggcgtccggagggagggtaccgattctctcctctagcgctggggaaaggggctggtggctttttggcagaggcgaatcaactcccaccactctccccaaccccctgccccgcgatggtgtttgctgaatgtagcacagatatagggaaaaaatgggagcgtcttcctctcttgaggtagaaaaagttgaagaaactaggcatgttaatagttattaggagcgggactcaggatgcagcagaaagctgttaaattttcattaccctctaagaaaaacaaacggcatcgccagtgactattggcagtgctgtgttattcttgggactttgggaaaattgttcacagattgtcttcaggaggctgaagaacgaggttgggggttgggagagagggaggacggctgcatcacgcttagttccagcttgcctaaggagggttcaggatcacaagccgaacgcgtttggttgctgatttttaaaagggtatcagcggcagaactgagaccatgaacaaggcaaacacaccacgggaaccagcctaaaggaaaaaaaaaaagcaccaacaactacaaccaaaaaaacatgtaaaaatctgcctctcctgcagagttaacatgcatttgtgctatcaaatggatgcatgtatatgtgtcttttaggataagttttatgaatgacaaatcactgaaatggtatcttgtatctgttcatgcatacagtgttgtctactgcctcgtcttaatcagtactttggaaggctgtgcctgcagttgatgttatataattgatgtggttcaccatcagacattttttaatgtactttaggagtagagggaacttccatctgtcttttcagacaggcccaaggtgtagactggtgagggttgctaatgtttgccgtagtccggctccagatgtgtgagctcagctgttgcctgtcacttaggtgacaactggccctttcccactaagcctttgctgtctccattatcctcagtgaagtgtcagtgttcagccgccttctattatcaggagtggactctagccccttgggagccggcagccttgtt

SEQ ID NO: 12082 - DNA, 1031 bp, Homo sapiens
tgatttttcccccttataatattacagttgggaatactaatggatccccaaacaatattactcattatgacctccaattcctactggaatgacaaggaatataaacaatgaaactcacaaattaaatatctttagacatactctacacttttttaacgttggcatcacagctcttgtagttaagctctgttattatatggctttactacttaattttggaagatgtgacatcctagagttgaaagattgccaagtcctccttcatccccaggaggcaacacagtaagagctcagtctggagtaaaaaagaacagaacttcaactatttttcactgctgctatgatctgaatatttgccaaccctacacctgaaaaaaaatatgcatgtgttgaaatcctaatccttgaggtgatggtattaggaggtagggactttaggagctgactaaatcatgagggtagagcactcattgttggaattagttctcttataaaagacactccagagatctagcttgttccttcacccatgtgacgacacagtgagaaggcacccttctacagatcagaaagtaggccctcaccagacactgacaccgccagcaccttgatcttgaaattcccagcctccagaactgtgagaaataaatttctgttgtttataagccatgagtttatggtattttgttatagcagccctaatagactaagataaaaaaaaattggtactgataatgaggtgctgctataacaaatatctaaaatacagaagtggttttggaactgggtaatgactagcagctggaagagctttgaaatgcatgctagaaaaagcctatagtgccacgaatggatcattaagggctattcttgtaaaagcccataaagagaagaggagagctttagagagagcctcaatctttgagaatacctaagtagttgcaaacagaatgttcttagaaatatggacagtaaaggccatgaagtctcagatagaaattgttattggacagtgtaggaaagtccatgct

SEQ ID NO: 12083 - DNA, 1035 bp, Homo sapiens
cctctctttttatcatatctttaaaattgcagttttctctttcttatcccttcttatctacacaaaacataaattctttgaagacaattttcaattgaagtgcataaagcttcaattgtgtcctagtgaaacttcctaaagttggaggccatacataatacaatatagcccatttctttttaggaaaactaagtaaacatttgcttccaattctcattctgcactctgaagtaagaatcaatcaaattcctcctctatagggcaaatatttgaagacagttgtttctctctgccttctgctttccagaaatccaagtctttcctcccctagaagtaatctctaatcctttcatctatatcttttgatatttaccctccatattgccaaataataggcttattcagctgtttctggatatatccaaacaaatttacctattgactcccttttatagaggttgagaattccaaattaattccaaatcaattttgattaagtcagcagtgctgtaatgtcagtgtggaaccaagtagtgtactgtactttgaaatgttgctcctttcttacacaactcttcatttttcctagggaggattgccttgttttaaaatttgcttagtttcgttatgttttaatcactgtttttttccttaagggcttgaacagctatgtaaaatctccatgaatggtttttctaaatgctcagatatttcctctgttttggactccttccagagacccctccaaccccagtctgcctcctctgatctggcacagatgaccttaaccctgctgtaccagtctctcatcctgtgttttggttttgataactttttcttacatcacatatgtttctctttttttggtttaccctctcatactaaaacacttcttcctgcctgtaccttccttaaaaatgaaaaaaaacgagaggtgcaattttccttctgtgcaaacctggaactgactttagtcaatccttatattggaataattgactagctataaaattctagcttgaagataatttccct

SEQ ID NO: 12084 - DNA, 1051 bp, Homo sapiens
aggatattgcccatgggaatttcttagttactaaaagattttttttaaagtattcactttttccatagttgctcataaaaatttgggattctcttaccttttcctgtattactgaaaaatatgctggggttctgtgttgtaagaatagaggccgtgatttctcatgatacccttggagctcccatggaaaatcagaaacccctacaaatgtatcctctgaaaaaagattctaaatgtacccctcagaactcctggtgtttctttgttatctgctaataaggacctgagtctagagttgcctctgttagtttgaccacatttaatttcctagtcatgccttgagaaatcattagaacattcaaggggaataataatttcaaatggagataatttttagtaaacgatcatctcttcagttccctttttgcatggttatatctcataatcatcaacaagctacacactttattttgtaagttgtttatgaagtcgggggataggatgaacagaatatctgaggacagtagaagtattgcggcaacatctgggtggcactatgtgctggttttcaaggctactaaccagtagaagacgatttttgcagagagtactatcttagatatttgttttcttcctgagaaactctttaggtgtctctagtatatgggtaagttgtttaatttaaaagattgtttaaatacaaattttagcaggcaaggatctgaattaagtggtttcagtgttccttctaaacttgagcttatacttgagttccccccaaattgtataggatctgctgccaacctgctaattacttaataattaagtcatgaagatgtgactgccctttaggaatgtttttattattctagttctgttgggcatcacttaggaagtatggacctaaaatagtatttagggtctttcatataaaatagatggatactgtagaatggtgagaattggggattcacgaagttcttgtgatattgtagccatagtcaatggtctagaatttagtgtggtattacctttacctaatctctatcca

SEQ ID NO: 12085 - DNA, 1030 bp, Homo sapiens
tatcaatttactttaaggtatcacttttttgtgtcccataagtttttattggtattttccatgtcattaaaaattctaaatgtatgtaaatcatatttaaattccatcatgatttatttgctgcttcatgaattacataaaaatgcatttaaatatttatgaatgtgtggagacttgttatttttatttattgacttacaacttaattttattgcagttagagaatgtgatctattgatattctttgcaatcttgatatttcctttatgatctattatgtagccaatttaagaaaatactccatgtatactttaaaagaatgtatattctttgagttctgtatttgtctattaaatcaaatttgctaattgtgtagttcaaatcaactatttatttactaattacattactaattgaaacatgaagtatatctctatcactttcttcatataattttacaattagttacctcgtctagcttaaggctaacttattagatacatagtttagtgaatagaaccttttacaactgtgtagtgactctctttatctctgataatgctttttaaagaaaaaatagagttggtgtgtctgagctgttgtcactcataataaatgtatgggttctttccacatcaacaaccagttcttcaactctccagacactaaatactctacaattcagttcatttctgatacttaactaccctgagtttgtgccagactccgcaggtttaagcgctcagtcctataaaaccgtccttacttcaggcaccagttgcaagtatgaggtgcccagggtacctacacatctgtctgagttagctgcaaagtcagggattctcacaacccactctttctaattcagtaatttactaaaataactcataggtttcagttttttcctgatttaacaggcaaatactcttattttcaaaatatatttttctagttaccaattctaggttgacagttattttctctcaatatcttgaatatatgattgtgttgtgcctgccttttgctattg

SEQ ID NO: 12086 - DNA, 1050 bp, Homo sapiens
ctggctctccacatgtaggcacaagcagcagccccagtgggaagcagaaggcagctccctggctgctggagtaatgttccggggaggagcacagctgcctctgctacacaaaagaatctacactgggaggtggcagtaagccccactcagctcccacactcttgcaaggcaagtcttacacccacagtgatctgctaacagcagctaactgggtttcaggcagcttgtttcagaactcgaaacttccccagactataagccttccctatggagatggagtgactttcacgccacaccctttcctgtctgcccatgaagcaaaggtgtccagctcctgcccccgtggtgacaacacacttcaggctcgctcctctggtctggccaacgaggttcgttcccacttgagattatattgcaaacctcatttgggagcttctctcaacctgtgaccactgcctgaattagctggccaacttttgcgaggttcgttgtgagaatggatcagaaatggctttcttccatccctgctggagactgggagtacacactgatgccgttccttctcatatattccccgctgctcactaaatcagctgcagcactgggtagggttaacgccttctccccatggcctggatttcctggcttcccagtgggagtgtgtgtcacggtggcaggctctccccaattcacccttgggaggctccattttccgtctggttcatgatgtaggctgttgcccattgcttccttcaaagggtctgtggtttctttccatttttcggttaagttcctgtgttgcttcttggaaaaaagttcacagtgtgagttccacacgctattttgtctttccgggtgggagaggcatgccaaaaatacctccagttagccatcttggagaaaaaaaataaaacaaaaaaatgacttttattttctattgttaaagtaaatgttttatgatgccggtccatagaaatgcaacagattatttggcttgttgatttttaaatgcagccacctgattcatcactttaattaattctcatagtt

SEQ ID NO: 12087 - DNA, 1056 bp, Homo sapiens
tttcatttataggggaaaaagagcttttataaatacctttgaggtttgtcttttaccttgtaatttgacttagaaaagcatccacttttaaactcacaggatcaaagtaactccaaaatcataattacaggtgtgctttttttttctccatggtagatgtattttaaaacattgcctgtaaaatgaatatataaattcaactgtaaattcacagctcctattttaaagtgagaaatactgcattgctaacagacctgcttgaaatcaccaatcagctgaccatcccagtcttaacttactgtcaaccccactggggctacctccactcttgccaaaacatgctaccaccagagccaaagtcatcactataggtacagatgacaaacctgtaaatatttgaggctgcacagctataacagtagtaaagatgctggattatgtatttatgctcatgctgaccctacagtgtcagcagctctaaagatgcttttggctctagttctggtagtagtccttttggcacaagagacattggtagcagtcatgttatatgttgtggtgaagcagctttgatagagtgagggctccggtagtgatacttctaacaaactgtaagcttcataaggtcagggcctttgtcctcttatctatatctgcttctctagccaacaaagcaatgagtagatactgaacatttctttattaaacaactgagggaagtagcacaccctggagcaattgctgccttgacttaggcagtggccaacaagaaggtgatctagggtttagaagcagatttcattgcacaggtagcccagatccagagtgggatatgcctctaattaagtaccaggcagaggcattggccatggaagacacccctactgcagtggcaacctctataatggctacaagaagagaatatgaattagcgaatgggatggcactttgatcatgaatcataaatgagcccatgcagagcccattcagagtgcctaacattctccaatcctggaaaattgaggaccaggttgtgactcatgacctcttctaggg

SEQ ID NO: 12088 - DNA, 1034 bp, Homo sapiens
aatgtctggtgcctagcaaattctcagtaaatttcagctagtattattacagttagtattactttactatgctccctgataaaatttttataataaaatggttaatgactttccattgaggtctgatctgacttagttttagcataaagtaattacaattcatatttttagaggtttttttttttgtagtagtagaaacaactatttctaaatctggggattcagtagttcattcaaattaggatctttaagagctgtctaggtcaatgttccttaacgttttctacctgggagtaatctttaagagaacaaaaagaaaatgaaactctatataatttaatgcaaagtcttttacattaatgtaagggtaggaaaagaggttggaggaagatatggggaggtaggaaaatgggacttttttcctccatttacttttgatgtttgaatttcaaacatgagtatatttgtgtattattttgcggttaaaaacactgaagattgcataaagatcaaagagggaaatttaagggaattaatgggttatgattgcatttgttcagaatggttttggtggctcatgacaacattttgagagagagagattttaatggcaccaatggcagctaggataactagtttaaagtttagggcctgtgttaatagattttgctttctagtttcagaaagattctcttatagtactgttttaatctgtttttctaagccctctgatttatgtatatttaataggccacaaaataatgtcaaatatatggcataataaccaacaaatatttgaataagtgaaaggtactctacaaaatgctatgggaaagacaaaaataaataatatccctttctttgagggattaacagtgttaatatcccttgttttcatttgatttgaaatgccacttgcaagtggaatatgcagactaaatggtaaagagaaaaacaagcagcatcttttcatttcacttacagctcactgtatgaccaataatatgttacttgacctctcagcactccattct

SEQ ID NO: 12089 - DNA, 1109 bp, Homo sapiens
aacctacccaaacatctcaaacctaccctttgctgaccttctatagccccatttccaaagttttgctttatttttattttttcttccaacttttattttaggtttaggggtacatgtgcaggtttgttacatgggtaaattgcattttgtgggagttctgcatacaaattatttaatcacccagataatgagcatagtacctgataggttgtttttctatcctcatctttctcccaccctccaccctcaagtaggccatggtgcctattgttcccttcttagagtccaagtgtactcaaagttcagctcccacttatgagtaagaacatttggtatttggttttctgttcctgcattaatttgcttacaataatggcctccagctacatccatgttgctggaaagacattattttgttcttttttatgactgtgtagtattatctggtatacatgtactacattttctttatccagtccactgtaatgggcatctaggttggttccatgtctttgctattgtcaatagtgctgtaatgaacataggcgtgcatggtctttatggtagaacaatttatattcctttgggtatataaccaataatgggattgctgggtcaaatggtatgtctgctttaagttctttgagaaatcttcaaactgctttccacagaggctgaactaatttatattcccatcagcagtgtatagcattcccttttctctgcagcctccccaacatctgttattttttgactttttaataacagccattctgactggtgtgagatggtatctcgttgtggttttgatttgcatttccctaatgattagtgatgttcagcattttttcatatgcttttggcccatggatgtcttcttttgagaagtgtctgttcatgtcctttcttccgtttttaatgggataattttttgcttgttaagttcttcatagattctggatatcagacctttgttcatgcatactttgaaaatattctctcccattctgtagattgtcagtttactctgttgatagtttctttggctgtgcagaagctatttagtttaattaggtcccacttgtcaatttttttttttttttagatgg

SEQ ID NO: 12090 - DNA, 1019 bp, Homo sapiens
cagaatccttgacaaaaaccagagggctagtttacacagtgccattaggcagaaatttccatttttagtaactgtaggaaaaaacagtgaaattgttgtaaaaccaaatcttgaatataaagaactttgtcatttggtatctgaagaggaagcatttgacttttttaaatatttggatgcaaagaaagaaaattccaaatttacctttaaacctgatacaaacaaagaccacagaaaagctgtccaccattttgtcaacaaaaagtttggaaaccttgtggaaaccaaatctttttctaaaatgaattgcagtgctggtaatccgaatgtggtggtaacagtaagatttcgggaaaaagcacacaaacgtgggaaaaggcctctttctgaatgccaagaaggaaaagttatatatacaggtaatttaataaatcatcatccattttcttggataagcttagctaaatttaaaattgtgaaaatgaattgaacagacttggctagagagattggaaagaatatatgatttacctttagggagaggaattgctgataagcaatttaagcaactctaggaattcttatttattctgttacttactagaagatgataaaaccttttaaattacactgaatttaaaaattagccttactgataacctaggcatttatattagcctattcacaaatgtataaagttgaagcagttggttcgtgtttaataagttttattgaaggtaaatcttgatttcatattttggaagtcatctcaattaaaattaagtttttagagactagaagaatatatttactgtgcttgggaaagtgaagagatactctgtaatccaaaacaaattatatttccctacccaaggtagggaacctgaaaacttggtcctgctggtctttagacaagatgttctgaaactttagcatgcatataatcatcaaaagttcttgttaaaacagatttcagagctccattctcagtttctgattctggggctttcacagatttc

SEQ ID NO: 12091 - DNA, 1045 bp, Homo sapiens
ggcatcttggagattctagggcacagctgagttctacaagtctcaatcgaacagttctgtctctaggaatatgttaggggctggagatatgatgacaaaactttaaaatgccactaggggtctaagaaatggttgagtctgtcactgccagaatatgaactcagcttaataataagttagaaaagatgcaaataagttaaactgataatattcttcttggatatatactggctttttcctcatcagtgtgctttagcaaaggctagactatcaaaatcttttcaggtttccttttatagaaacaaagacactttcagtttttatcatattaaagtataatgcatttcaatcatcaaaagccaattttctgagagaaactatataatggaggatgtattttagagtcaggctagcctgagttttaatcctagctctaccatttactagctgtgtgattttggacatgatatttaagctttctgatcttcagtttctgaatctaaaacgtgtgactattaataggaatccaactgggaatgctgtgcggttgaaattagataatgtattttaaatgcctggcaaagtgtctgacacagagtacacacttaaggaatggagggatattatcatcatcacggttttaaaaacgatattaacattatctatgagttagctggttgagaaaagtaagagtgcagggaatcaaaagaataggatagaaggtttttcttctttgtacaacactatattgttttgataccttatatcaaaaactaattatgcatatctggcccttccctgcctatttatcctatttcatcaccacagttttcttccctaactgaaaattcttacccaaagctttttttcagtttcttaactacacaaaactctcctctgtgcgtttggccaccttttcatgcagtctccaggtctcggtttaaatatcacctcacagaacagtctaccctggacattgactaagtagctagtcttttattaatctcacacaaccacctagtgtatttccttttgtcttagtcag

SEQ ID NO: 12092 - DNA, 1045 bp, Homo sapiens
gtaataaaaattatgtgaatgtgatctctgtctctctctctatctctctctgtcaaaatgttttatcatacattttactcacttgtttgggccatggttgaccacaggtaactgaaactgtggaaagataaactgcagataaggaaagactaccgtatttaccatttctggtactcttcatttcttcttacatattggagtctccatctggttacattcccttcagcttgaataacactccttagcattttccttattgcaggtgtgctagtaacaagttctttcaactcttatttatctgaaagtgtctttatatttgaagaatattttcactggacatagaattcaggattgacagatttgtttccagaactttaaaggtgatattctattattttctagtttccattgtttctgatacagtgatcatttgtttttttattcccttgtatgcagtatttcttttttcccctactttttcctttcatgattctctatctttgtttttagtagtttgactatgatgcacttaggtctaattttttttttttttggtctttattttctttggtgtttgctgggctttttggatatctaagttgatgtcatttcaccaaacttgagaaaagttgagccatcgttttttcacatattttgtctgccacatttttttctctcatagttttctgagactccaattaaacattcgcttagatggtttaattatcctaaaggtcactaaagttctatttttatttcaatatttttgtctttgttttatggattggataatttctattgctttgtcttcaaatttactggctttttcttctgccatctctaatctgctattaggttcatccagtgaatcttttcatttcagatattgcatttttcagttccagaatttccacttaatttttagtagtttaatttctctgccaagttttaccatttattcattcattatgactgtatcttttaacatttttgagcatatttatgatagatactttccagtctttgctaattacaacatctggat

SEQ ID NO: 12093 - DNA, 1019 bp, Homo sapiens
ttcaatatgctagtcagtagccacatgtggctatttaaattttaattaattaaaattaaataatatgaaaattttaatttattagttacactagccacatttcaactgcacaatagccacatgtggctactggctgtcatattagatagcacactgtgtaaggccattcttgcattgctataaagaaatacttgagcttgggtaatttacaaagaaaaggggtttaattggcttacagttctgcagggtctataggaaacagtaccatggtctgcttcggggaaggcatttcacatggcaagagtgggaacgagagagagagagagagagagagagagagagagagagagagagagagagaaagtagttggtgggtaggtaccagacatttgtaaatgttgcctttatctatcaaaaactacaaacttgaagttgtgccagtggacctctgttctaacattagaatagataactcgatctaaggaaaaaatacctataaataagcaatattataataaagcttttaatatatgatcaggactttgcagatcaatggaggaagaaaacattatttcacaaataatggaatgactaaataacaatttgagggaaataacacacagttataaaaattatgttacatatcaaaacaaattccacatggaaaaagtgttaaatattaaaataaattaaaataaagaaaatataattaaatatttatcaaaactctagaagggagatactttttaaaatttatcagtgataaaatatacctgaaagaaaagattagtgcttctatagatacataaaattagcaaaaaaaaaaaaaaagtcacaactacatactagaaaaacagcttcagcagatttggtttctttgttagattaaaaacataaacattaataagaaaagcacttactgctgggtgcagaggctcatacctataatcccaactgctcagaaggcccacttgagcctaggcgttcaaggctgcagtcagccatgatcatgccactgc

SEQ ID NO: 12094 - DNA, 1032 bp, Homo sapiens
aataatagaatttctttcaaaggagagagagagagaaagaaagaaagagtcctttttttcttttttgagctatgcacgttttgctatgatttctctgctctcctcattttcttttttgtttgtttgcttattgtgcttattgtatacatgggtggctgtaatctacataccctgagtataaaattcttatggttaatattgatccagagttcctactaaataaagttgaaaacttagaagctgttttagaactgaatcaagagaaatgaagttctatagtcaaattattgtgcagtttatttatcttatcgtcatgggaccccaagaaaaaatatctatgtctaagggtaacaacttctcatattgcacatatgatgctgaaatgcttcaaaactcattttggtgtttcaataaaggtatttaccaaatatgaaatatcagcattgggcataaaattaattcattcatttgatcaatttatattggatgcctacgatgtggcaagaactcttctgaagactggagactccctaatgaacaagataacatcacttcccagacagagctttactttagaatgaggtagatggacaataaacctgtgaaaaaataagtaattgctttactggattcttaataagcattctcaactttcaccatataccatttcaacccagtcattgcagacctgagagctgagacagtatattagtgcaggctaattgctgactcatgcctgaattgtgtgctctgggtgacagaaccattcacactctgctaagccaagaaggcactactatgcataaaaatatataaagaggggagaataaaagctgaaactctttaacgattgccccatttactactctaccatctatagagaggaaatggttataagggctgtttaaagactgacctccatggtagattttcctctcactgctaagatggcttttgttcacacagctgttttaagaacttctttataagattctacctgccttttttctcttagtatataaagtatgtgct

SEQ ID NO: 12095 - DNA, 1057 bp, Homo sapiens
agcctgggcaatagagccagacccagtctcaaataaataaataaataaatatatagaagtgtatttgagccatgatgggggaactgtatcacttgtacctttaaacactttaagcattttctaaaacacttagtgttcatttcgtatgtttcctagtgttggtttttctagaattaagctcctctatagagtgaaaatttcataaagaaatataatgtcataaatctttgttttttattaataattcacacagttcatgacatatggtaaatgtctaatttgtagtttcttttatttattcattggtttattcatttatcagtgtgtaagatgtgcccactactatctaaaccccaagaaatagtagtgacctagttgaaaaggtctctgctctcataagttttactttctggtgttggcggggtgtggtgtccaggcaacatccatggaaacaaataatttgtagcatcaagtactatacggaaaataaaatagactaatgtgacagagtgtgaacattagtggttagggaagcctttttaaaataaatggagtttgagctttgaatcttataccctccaaccctccttgtcaactttcattcattgaagattctgacatgtggttaatgacattcttccaccgtaccttccttggctcattcagtatgcaagtggataacccgaatgttttagtctgttttgtgtggctataacagaataccacatactgggtaattttagtgaaaagaaatttatttcttaccgttccggaagctgggaagtccaaggtcaaggggtccacatgtggtaagggccttcgtgctatgtgcttcatcccatggcagaagttagaagggcaagtgagcacaagagcaagaaggggccaaactttcttttatacaagcacaccctcaggataacacacctactccgagaaaatgacatcaattcattcatgagggcaggatcctcatgacctaatcacctcctgttgggccttatctcccaacactgttgcattagaaattcagtttccaacatatgaactttgagtg

SEQ ID NO: 12096 - DNA, 1040 bp, Homo sapiens
catttttctaaaaatgctttggctatttcttctcacaaaatgagaggcagattttccattaagctaatgaagtttaagtttctgctctcttaatgcaaccaggcttctttccagcccttggaaagagccctagcaatgtgctcacttggccatatatttttgtaaaatctgcaatagcacatatcttggtaatatttttttcctgaggggccctcaaaataaataggcttctgtccccagagactgacccctgcacaaagttctttcttaccaggtaggtatttctcaccttacagccctccattttccctggactgtttctctttttatcctcccttgtggctctcaatttcacatctttacatttcctctctctctctatctccctcttgttctgtgtctgtctatctacctaactatctaatctttttcctctccaccatgctctgggaagagggaaacaaagcatcactttctctacccaaagaagtaatcaagatattttcctaaatcaagaccttttcctttattatgacatataccactgtcctatttatgcatttattattttgacctgcctttctaaattttctgagatatcagctggtcattactgaaaacttaccacatgccaaacattgtgctaattgctttacatttattaaatcatttaaatcataatagcaactttatgaggcaggtataattttttctgatcattttaaaaccaatgcttagggaggttaaatcatgtatccaaggtcacacagctagcatttggtagactcttgatttgaatagttaaacttagccacagatgtgtgcttttaccccttccccattttgccatccagataccactcttccgaaaaactctccttggtttgtctaacaagaagtatccttgccttgctctcaactcccatgtttgtatcaattttatcctctttcttcaaattaccttgtattgttattaatctttaatttttaaaattttaagtggcacataatagtagtacatatttatgaaatacaaagtc

SEQ ID NO: 12097 - DNA, 1048 bp, Homo sapiens
gttaagagttacaagtaggcttggaggatggctctctggctataaatctaggctctgcaaatgacttctctatgtggaatagggcaaattacttaatatttatgtgcctcaatttccttgttttaaaatggagtgataataatacctattttaggcaggatgtgatgtggcttatgcctgtaatcactttgaggcagatggtggaggatcacttgaggccaggagttcaagaccagcctgggcaacatagcaagtccctttctccaaaaaataatagtagtttaaagaagaaaaaaaaacctgtttcatgacattgttgagagaattatattagttaatatggtaaaccaagcaatggctcagtaaatgttagctattatcatgaccttactgcaatccctacaataaccctctgaagtggttattattactagatgaggaaagtgaggttgaaaaagattaagtaatttgctctggtctgtacagccagtaaaatggaatagaaaagaataatttctaggactgtcatattaaaattttccacgctctttctgttctgatatttggcctcccactgcaccataggatgctaaaatgactgaaatagcagtaaactttgtggaatatgggtgccaaattatccacattaaagatttcttaagttcttgtgtgtgaacagcacaacatgatgtgtatgaagatgcagaaagtaaaatgcagttcttttctcttggggcttaatacctctgactgtcaaaatgcacagagagcattttatctcaatgacagagaaacagatgggtacaaaaataatactaataccttttaagtgactgctaactacaaatcttgtcaggtatggtaaccccagaagaaattgctcttaagaagaatgaattctagagctataatcccaatagttgtaatttacaggggaaggctttatgataaacttctactggtgggaaccttaggaggcaagcaaacagctgattaaatgtgtgaaaatatactttcaagtgttagacaaagtttccattgccgattt

SEQ ID NO: 12098 - DNA, 1273 bp, Homo sapiens
cacttggcccataaatccatatctggtgtttggcttcttatgccacataggaattttcattttttcaatgaggtcagttataagtttaatattatatttttaagccatgtgtatgtagaaagattttcaggttatgcaggtctcagtattgctggaataagaaagaaaatcacctgttttaaacataagtatgatttcactgatgctcagtgaatgactcctaagagtgatgaactttggccattcagaaatctgcagactgtgaggtgaaacttatgatgagagaatgtaaatgaggaggaacataggaaaaaacaataatgatatgaagtttatgaggtttactaggaatggagctgggggatgaggctgtttttttccgttcctaaatttctaatgctcccagagtctgtacttcttcccaaagggttctcatctatggtcagtgtctattgctttctgtcatggaaactttctggaagaagccactaggacttaggtacaaaaaaaaaaccttacagcagtcagccctatccatctaatagataactctcccttaaaaacttactgttttttttttttttttttttgagagaataaattatattccaggttaatttttttagacttacagtaaaatgtggtgcacaaggatcaagttaaatagcaaataatggattttgggccaagttaaagaagaacaatcaaatttgtgaatgacagttttgagagggtagcttatatgacaaaagacaggatcaagattcagagctattcaaattgtaggaacaatgggatcaaataacattatgacacttgacaaacaaaagcatctcctgcatttgtcctgctttcagccctcaacatttctagatccttaattctgatctcttccatctttggcccacactcattgtgttctttgcccctttcctttagttttcttttctttaggtgtctgtctttcctcccttacctttttcctcattccctcccactggagtatgagttccatggaaagtagagatggaacctatgattttgtgtttttcatagggcttgtcatcatgctttgcatatagtaggcagtccatgaatattaataaagtataaatacactcttgcatttaggttagaaaaaccaactgtgcaacatagagggaactaagtttaacagtttttatgctttatttggctactgattcgaagttaagtatgagccaaaagtataatgtgctagctttaaaagaaaatgcaaacttaacctataatt

SEQ ID NO: 12099 - DNA, 1035 bp, Homo sapiens
ttttcctttcattgaaggtgttattattttttctaattaatgcttcataatttctctctttacatcgtttcgtgttcctatagaaaaaatactgggtatcacaagggaagaaagacagagagagagaggagcaggagggagggagaaaagataaaggaaaggaagggggaagggagaacagagagagggaaatagagaagagaaaaatatggaagggaagagaaggaaagaaatggaaaagggaagagaaaagggaagagagtggaagagaaaacatgagccaagatgcttgaggcccattcttcaggatctctgcaaaagtaacctattttgtttatgcataacaaagtttcttgattacttatatggacgaatggctttttttggttcactcacgtaagcattaattaaattgggtagatcttcttgagttttactgggaatctcttcttggaactggccttgagtaatggaaaaagcatgaaacatctctagaaacaaagatggaattgttaccagtggcaaatatctgagtcacatgtcactgtgttactggtggaagacattcgagttaccggtggtgaatccatacaggtctgcaacaacctcactgattacctcctcagaagaaagaattcaactgaggactgaggggcataaggcagaaaaagagactgaggcaagtttcagagcaggagtggaagtttattaaaaagttttagtgcaagaaagaaagtacacttgcaagaagagtcccagatgggtgacccaaaggacaagtgctgtgtttaaccttgatcctaggactgtataagctggcccacctccaacatcttgcccccctttcccatgattcttcccttaggatgggctgcctgcatgtgcagtgccctccttacgcttgggaagtgagcatgcacagtgtatttaggaagttgtatgcatgctcatctgaggctttcttcccttttccactggaatgcccctggaaagtcatactatgtcattttgtctcttaatgcacatgccagggaa

SEQ ID NO: 12100 - DNA, 1039 bp, Homo sapiens
tcttcatttttccatttaaaatatgtttctgcttgctatcaagacttatatttctggatatgtgcggtatatctattatatagaaacataatagaaggttttcctgaacgctttgacccgcactgttgttcttggctgctattaccctgggagagtggcagctgagaaaagaatgaaaaagattccttttccatgagcaatggtcacctgaatctagtgaatttcttggtagttcaagttcccaattacttcatgttctaatagtgaaattttagccttggtaatccttacctgttcatagaataaactgatttttagagttgcttcattttgcttgctttacataatatggctgcatgaaagccttataaagcccataaaacttcttgtttcctgtcagtgaatcctctagcattaatgtattaggaaacatctaccatcttttgaaagtctccaaataatttgtcctaacatgtaattttaaaagaatgtaccttcctatctgtctacctgctaggtaattatgggcttctctgaacagcatctgctgcagagtccataaagaaacatacttccccttttcatttgatctttaacagtacacatttgttaactttatttttgaagaatgtaaaaggaaaacataatctctgctgggtggttttctttctctttgaagaatgacacttttctagttccaacctttgcagaggaggggacttttcttattgcaatgagcttggtgtatatactctctctttttatatgttccctctctttctctatatatcttgatatatataccttttctaatttctcctttttttttctccctgctagtttcctggtttacgtatttcttctcctgctcgtaataattaccttgttgtttgagaatattttccaacatttctgttccttgtatactcactaagtgacaggttttacgtagtgcacaagatagtgcttcttacattgtgtctgtttctttttatggtgttatttgcccttctacataattacattttgaatgatggca

SEQ ID NO: 12101 - DNA, 1050 bp, Homo sapiens
aaatgtgttttgtggattttattatttttcatgtcccattacactttctcaaaagaatgtctctgcacatataatggcattgcttaagtgaccaaagacttttcagaagaaagcgttatgcaaatctatctgcaataataattaaatcaaactgtctagcacagttctaggggaccaaaatgggattctttaggtgatcagaaggctagtcctccttcttagtatcataaggctttgaaataagtaagaggatttcagatttataccaaagcaaaagagtgataatctaggtatcattcataggagacccaatttaagagagaagaaaaacactcaacctaggcagaaaatgcaactttttatctccagtgctgttaagtaattgtttaaaaatgagcttattttgttctcaattgagataatacaaaattgcattttgaagtaagaataggcaagaatgagacatatgcaatttaaagcatcttagaagttgattttggcaattacgtggaaagtagcaattccgacaacccaactgcacaataaaggtaaagggacaacatagtgcccactggagaataaagccacagcacccatgtcctcaaccaaacgtacaaaacaacaacccagctgcactggcctctccaatggctaccttgaaaatggtatgtggccttcagttttctgtacatatttataaatggtataaagttattatagattaagaattaaagaaaacaatgatataggagcttagtatgaggaagggacagaaaggaattcactttttcaatttagagatgattgtgataaagcagaattcagatgcatttctttcttttttttttttttctgatacggagtcttgctctgtcacccaggctggagtgtggtggcacaatcttgactcactgcagcctccacctcctgtagctgggattacaggtgccagccaccatgctcagctaatttatgtacttttagtagagatggggtttggccattttggccagtctggtctcaaacacctaaagtgatctgcccacctcg

SEQ ID NO: 12102 - DNA, 1029 bp, Homo sapiens
atcctgaatatctttttttctctatcttctagattcttctgtgtttgttttgtatatgatgtctagttgtacttagtgggagaactaggaaaagtacatctattccatcccgtagacagagatcacttcaatcgtttttgaactttatttttaatgtgtcccatgtggctcttctctctgcaggtacctggaactggaaagtagtggccatcggaatgaagtcagactgcattaccgctcaggcagtcaccgccctcacacagaagtgtttccttacattttggctgatgacaagtggcacaagctctccttagccatcagtgcttcccatttgattttacacattgactgcaataagtaagtgtagtgtcctcattttaggaaatggaagattctaagaaatgactgtctactcacgttccttctttgatgtttcttttttgcagaatttatgaaagggtagtagaaaagccctccacagacttgcctctaggcacaacattttggctaggacagagaaataatgcgcatggatattttaaggtatcttttggcaaaagtctgagaatgaaatgtaaatgctttctaatgagtttcaaaaagtagattttactttttatggtgtgaaacaaaataatttgatttgtaaattagaaaatttgtgtctgtttcatttttttaaacagtaatattttagccagcaaacattattttctcttcttttttcaatgagtttaattgttagatattacagaaatgatcacaaggctgcaatcagggcagttaacaggtcattctttgaattaacctttcaaagcaataaaaatctaaaatgttaacatacaaataaactctccaccactgaaatataacctttgatgatacttttacaaagatgttaatagcggattgaaagctttttagtatatattattcatggtctccttgtactgcagaaagtgagaaaggaatacacatatgtgcacaaatctgtcaaaagagaaagcagttataatttatatcttttcc

SEQ ID NO: 12103 - DNA, 1048 bp, Homo sapiens
ggtattccattatatatacataacttataactgattgttcgtatagtcattttaccagtttgagtgatgtatagaaattttagctgtctttatgtttctttaccctcactcatttataacataaattctttaaatattgtttaacatacatttaggacacagactcttttgcttcaattttgagctgttgcttcagttgtcaaacatactttagaaaagaggagaaggaaagcttattgtatttacccatttttcttttttacatactatgttctttctaccttcctgatgttccaaagctttttattttatatttttctttctgtttagaggtcattattttgctgttcttttaaaataggtcttctcatgataaattctcttagttttcctttatctgagaatgtcttgatttctcttcattcctgaaggatgtttttgctgggtatacaattctacgtgtacagctctttttgcttttgtcacatgaaaaatattttaccacttctttatggctcccatggtttctactgagaaacacactgtcactctaatttttccttgtacttaatgtgcaagattttctctgtctactttcaaattttttctttgtttttagttttcagaagattaattatgatatggcttgatatgaagttgaaaattgttttgagtttatcttgtttagggtttccttagattcttgaatctgtgagtttatatctcttgccaaatttgggaggtgttcagccattatttcttcaatattgttttttaagctcgcctcctttctcctctctttctcggatgctagtgatacaaatgttagatcttttgttataatctcacagctctttaagactgttcaacttttttttcagtctatcttctatttgtcacattggatgcttttttttctgtcttccagataactgattcttttcacagtcacttccattctgctgtttagctttatccactgagctttcatttccattattgtatttttttggttctgaagtttctatttggttttaaattttttttc

SEQ ID NO: 12104 - DNA, 1050 bp, Homo sapiens
tagttatttaggtatgtacatataatatagatattttaagtatactgtgtgtaagagaatcttggactcccacatcttcctaattagtcccaagagcaaaatttgtctgtttcttctaattctttcacctggaaccaccactctcctcctaaattgcacttcatacttcctgatatctttggctgttctctttaacattggcatctatattatcaccgtagccaagggtttatgcagtccctttgggagcagattccatttaatggtattgcaagggctttaatggtattgcctatttattcaaattatttgttttgttgctgggttttatttttctgtatttcagtttggcagattttgcaatgactctgaggtgctttagtttcataaacttactttatacaatgagccctacataactgttttagtatatgtttctgacgttaactttttacgtaaaaagaattactgttttgcattgatgtcttgtttgataaatgaaagataaactctaattgactgtaatcttcaaaaattaaattataacaatttaaaaataacaacttgttaacaaaccactaatatattatagttttagagcaaataaaaatattttttaaatggctctcctgattcttttaaaagaaaaattactaataagtgaatggaatagacatccttgtcactctatctctaacactatctcatttacacagataattccttttctacttaaatcatttttgtattgctggaattttttataaatttgcattacttgtataattaattatgaaaaaataataattaaaaaactattttttaggactactaaattagaagttatgtccctcaaaattatcactatccctatgaagttatacctgtctactctgtgtttatatctactttcactgaggtataattaacatgcaattaaatgcacaaatcttgagtgcttagtttgatgagtttagataattgtatacaatcagataaccgccacccaaaacaagatttagcatattaccattcccagggaaagttcca

SEQ ID NO: 12105 - DNA, 1030 bp, Homo sapiens
gtgtttctgtagtggtgttgttgcctgatatagccagtatgtgtcaccatggacactaaaaccaaagcttagagttgggaaaggaggaaattcacatgtgttacatttacttaaaacaagtttgctcttataaaaaattaaaatgcaattttctggcttaaaaattattgtttaaattttatgtttaagttaattttttattgtaacaaatatttatggtaatgttttattcacttaagggtcttttataagagggtggggcttggatattgaatcctttaaaaacaatgaccaaatataataaagaagataaggctacattgtcagcagaatttcacacagttgaatagaagtgtcagtagggttaaccttctgtttttttttttttgttgttgttgttttgtattgtgttgtttttatctctgatttttaatccctatgaactggaaacaaagttatttcaggactgccaattcgagtaactggaaagctttatggaatctaaagctcctaataaacaaatggtattgtagtgctcttaaaatttacaaagctcctttaaattttattagtattctacctagtttcctctgaagagtgtctgatctgtcacaaatagaaaccttcaggactgtgcattttatattctgatgctagaaaattaaaccatttttaggaaatagtctcaggaatcgataacttttcctggttaattaaaaatgtttagttattcatttttatttaaattgtcaaattcttcaaggtaggtgttcaaaatacataaggcatataaaatgttttgtttgaattgtccatagtaactagatatccatgtacattgatgaattggttgtttttccttccttgttgatgccgagctcaatatttagacagagtaaatgcctaacaaatatggtttatgagatttgaaggtgtaaaatttcattttctgccaaattatggactttatttaatataaccaatcaatcagcaagtatttcctgcatgccatgttctcagtaggcatata

SEQ ID NO: 12106 - DNA, 1905 bp, Homo sapiens
catcactctatataaagttaccatagctgatttcatttttaataggattattcattttgtcaaccagctattagttgagaatatgtcaggggcacacttttgtgaggtatgtgaacagtcaacttaaggtactaaaattgtctctgaaaccaaagatcaaaaagcctataggagtttttagacttttagaaccaaagcattcaggaaaaggaaaggaaaacaaaaaggttgcgtctttttgtaaaaattgctgactattttaatgccttcttgtttataaatgatgcacagatgactagatttttcacttttctttcacgtgttcagggaccatgccataacaaccttaattttttgttaactctaagcgaccatcagaaatagaatatatagatttccacaaagcctcttgaaaaggctcaaaatttcttgttctttaaaaccttaagtctctattatttttaaaattaaaatatgtgaaggagttaataagtcattctttgagaaaatttatgtacattaaaaaaggaataaaaaccgtgactgctggcaagtttttaatagataacctagggctggattgagtttaggtctattgaacaagttttgtggttatattgggtctgaaacaaaaaaagaccatctgattgtttaaagctagaacagaatgacacctatttgtttacatattttctatagctgcttttctattgaatagtcataatggagactgtgtagctcacaaagcataaagtatttactatcttgctttttataatagaagtatgccagcgcttgctccaacgtgtaaatggcaaattggttaaatttaaaactacctatagctctctgagcattcctgtatttaaaagtctagattcaaggtcttcagattactgattctgtaaccataaggaattcatataacctcacagagcctctctttcctcatttcaaaatgtgaacagtggtagagtcagcatttgactttaaagcacatacctcaaaagcgcactggtaagatacaggaaaagatgtgcaggactccttcccaccatttcaccataagcaaattattggtaaaaggggcgttgtgtataagaaaccatcccaaaactcagtggcttgaagaacaatttattattttctcttacagttttgtgggctgactgggctcagttgggtggttcccacttagaatcttgagtgatgttagatgtcaactgggactaaactcatgggaaggtttgactgagctggatgtccaagatggctactcacatggctggcactgatgccatctgttgactggttgctcaactggagctgtttattgcagcattcacacttgggctttccaagtttcttggcctttctatagcagagtggctggattctgaaagggagaacaccaagagcacacattccaaaaacccatgtggctttggaactttggacattctgatacttccaatactaggtcatatgaagccttgcagtttcttacgacttagtcttggaagtgacattctggaacttcataagacttagttgcagaagtttcagagtgtcatatctgccatgtctcttggttaagcaagtcaccaaggccattccaaattcaaaggaagaagaaacagacctcacctttcaatggaaggagtaccaaataatttgtgatcatttaaaatctgtcccagggtgaaatcaagataaccaatatcagatacacttcctgctaggtctgtcttctgctggagtagaccaatgcaggaattaatcacacagagtggtatagccgggagctcagggaaccttcacaaaggcttatagtattctcttctgtgacatagactttataataaaaagagcaaggaatctcctcgagtttagatcattttttca

SEQ ID NO: 12107 - DNA, 1034 bp, Homo sapiens
cctgtttctgtctataaagccaattcctctgctcagctcatcggaacactcattcttgttttatagaatgcagtgttgctcaattataaaattgcaaataaaaggcaattaaagtatttaagctaaatttgttgattttgtcttttaacacagctcataatgtcaactgagaaagaatgccctggcatgttagaggaaaaatcaagaaatagtactgtcccagacactaagaaaggagaaagtggtttgtttttggtgttttggttttttgggtttttttgtttgtttgttttgttttgtttttgagacagagtctcgctctgttgccaggctggagtgcagtagtgcaatctcggctcactgcaacctctgcctcctgggttcaagcgattgagaggagaatgttttaaaagaagtccacagtcacaaatgctatgagaggataacagaaaattgttcttgggatttagcaactaggaagtcaccgggctagagctgtttcagagtagtgaaagggaccagaaactagattgcaagagatggcagcatggatgggaggttagggaggaagataatgcctggaggctccttttttagaatctgtgaagaggagaggagagatagtgcagaagctggagggtaaagggcgggcctggtttatttaaagataaaggacacttgacctcctttctatgttgacaagtaagagcctagaaaaagggagagaagatacagaatagagtgtaaacaaataataaaacaggattcctgagaaggctgaagaggtgacatccagtggaggaatgtgtcttgaaaaggaagagggaacacctcttccactagccaaagtggaaacagatacatctgaagggatttgaagtaactgatgagttctctgaggccaagtcatctgacagcatcaataaagggggtggtgggattgaggtatgggaatttgaaaagaggcatggaaattatgagaaatggcagtgttgccatttggtgcccagtacttcgtcagtgtcccactttag

SEQ ID NO: 12108 - DNA, 1028 bp, Homo sapiens
tataattacctgaaatatgcatttttctttagtactaaggttggtttgctttgtgttttttaatgttatttctaatgcatcactaaaagacttctatcgagtacaagtaattcattaactgatgataactctttaaaacagggtattcctagttcttctcatgtaagtaataacatgagtacaccagttttgcctgctccgacagcagccccaggaaatacgggaatggttcagggaccaagttctggtaatacttcgtcatcaagtcacagcaaagcctctaatgctgctgtaaaattggcagaaagcaaagtaagtgttgcagtggaagccagcgcagatagctcgaagacagacaaggcaagttcaaggttgagagcaaccttcataattctgtatatgataaaggagaaaaaatatcagctttttattgtatgagtggtgaagggaatttcttattggctgtctaaatgccattattatttgaaggattctctctagatgtgttgatgtccagtaaattactggtaatattttataattgtttttagaaatgtttgatatgttttagtaaataaactgttttatatttgtcacgttaatagttggagagtctcttattgtaaatatgaagtattttcaatttcttgtttgggattttgtgagagcagtatgactggcaaataataaattatacattttcttctcatcagaaattgcaaattcaagaaaaagcagcacaagaggtaaaattggccatcaagccattttaccaaaataaagatatcaccaaggaagaatataaagaaattgtacggaaagcagtagataaagtaagttatggctttagtggagtatgtgcacgttgttttgaaccacctctgttttaataaatgaatgctgaagtttaattaaaataataaaagctagctcctactaattcctgtctacttttttgccttttgattagtttgtgtgagataatgaaacatgaaaataagtctggttatctctttggggttgttttt

SEQ ID NO: 12109 - DNA, 1035 bp, Homo sapiens
ctgaggtgggaggatcgcttgagcctgggaggttgaggcttctgtgcgcgatgattgctccagtgatcacgccattgcactccagcctgggtgacagagtgagaccctgtctccaaaaaaaaaaaaaattaagcaagtagcagttacaagaccaaaagttattttcctttttttttttctctataaaattgcccatttggaccaaatctagttataacttatttcagtgtcattaagaaagttgatgaataagtcatattactcagatgttagtagctatgcatttattaatagttttatttataagtatttagtttcactctgttgcagactattttatgctaaaattagctaaagccaaattactatttcttaaaacatattttttactttttttttttttttaaatattattaggtacttcttgcaagggatatgcattagcacatactcaagaaggggaagaaaagaagcaaacttctggtacatcaaataccagaggatcaagacgaaaacctgcaatgacaactcctacaaggaggtctacacgtaacacaagagctgaaacagccagtcagtctcagagatccccaatatcagacaattctgggtgtgatgccccaggtaacagtaatccatctttaagtgttccctcttcagctgagtcagaaaagcaaacaagacaggctccaaaacggaagtctgtaagaagaggaagaaaaccacctttactgaaaaagaaacttcggagctctgtagctgcccctgaaaaatcatcttccaatgattcagtagatgaagaaacagcagaatctgacacatcacctgtgttagaaaaagagcaccaaccagatgtagacagtagtaacatttgtactgtgcagactcatgtagaaaaccagtctgctaattgcttgaaaagttgcaatgagcaaatagaagaaagtgagaagcatactgcaaattatgatacagaggaaagagtaggatcttcatcttctgagtcttgtgctcaagatcttcctgtgctagttg

SEQ ID NO: 12110 - DNA, 1035 bp, Homo sapiens
gaagggatattttatcaatgatacaagaaaaataatatttaagaaaaagctttcagaagttaaaaatattacagcaaaaatacaaaaattcaacaggagtagaagataagttcttaagtctcaaagtaggactaaaaaagagatgataggatattcatttaagagattcaatatcgaataataaaatttcaggaaggaaaaatgcaaaaatttatttttaaaaaagtaatacaaaggaaattttttccgtaatagtagagcacaggtgtccagatatgaagaaataatataatacttagtaaatgaaaaaaaaatcataccaaatacttcataaagttctagaagtctgaggatgacaagagagagagtaaaaacagaccacatagaggattggggttacagagtgtcatcaacaatagttggagtagtgaagcaatgccttgaaaactctagggaaaataattactaacctagacaattctataacctatcaaactatccatcgtgcactaactcagaattcccacccttttccacttctgctggaggatgtatgtatatacttcactaaatgagatagtaaatggaagaacaatgtgagattcagaaaatgagttccaactcaggaaaagattaaacaggacaaagaggattattgggataatgacaaaggacaatcccaaaatgactattgaacagcagctttgagagttaccagttcatattggaccaggacaaagaaagagttttgccaggagagtggggaacaaaccttatggatgagttgttgtgtttgagtgtattaaactcagatttatacttttgttgtagttagctaaattaatgatggataataaggaagaaaaggaaaagagaaaacaaagacattattaaccctaggaaaatacctgaatgaagctggctgggcgtggtggctcatgcctgtgatcccagcactttgggaggccgaagtgggtggatcacctgaggtcaggagttcaagaccagcctcaccaatatggtgaaaccccatct

SEQ ID NO: 12111 - DNA, 1073 bp, Homo sapiens
tagagacaggggaatttcaccatgttggtcaggctggtctcaaactcctgacctcagatgatctgcccgtctcggcctcccaaagtgctgggattacaggcgtgaaccactgcacctggccaaacttctttaatttcttaaagttttgtgaagcaggatgggactgttctttaaacataggtgtgtgactttctatctgaagtcatttgttatacagtaatcaaactaatgaatagagtttgtgaagttgcgaattcttatatcttgattagagattattatagcctataaatatagtatactattagttaaaacttcagcaggtctaatagatggttttactggaagtcaagccccttgagttttgtacagtttttaccattaaaacacctgtgactttagtaaaattatataaactgtctagttttctcatataatgaagatgatgttgccacactagaggtatagtgaaaggttagacagcaaacctattagcaaatttgttgaggaaatatcactttctttcttctgtcatactagataactgaattatacatttttgtttttaatctcctttatgttcactttgtttcttggaatgaacattaatctttggtttgggatagtagtttataattgatatagtttacagacaggatctccctttcaggcatttcttaatgtagtacttctttaagtacatactagatccatctaattatgtctttattaaactttggaatcaattagtcagactttaattggatgcctgccaagtactgggttctaagctcagagcctttattatacttgtttgtatcgtacaaaaggatgttttcatgaaacatcctttcggattagtgtttcatgaaacatgtttagggatatgctgaattaacataaataaaacaaggttctagttaagcatagcagattgagtacttgtttaatgctgtgatccctctcatcccaaatctctactaaaatgacaataaaggaatgaaagaaaagtgtgttttttgtttgtttgtttgtttgtttttttgagatgcagtctcgctcttgtcacccag

SEQ ID NO: 12112 - DNA, 1054 bp, Homo sapiens
gttctgcctttgaaattttactattaaagtgaaattgaagcaaaagttgttttgatctctggacttctgtggttaaaaaggcatttttcttttgtcagctttagatatgaaaacagtctttgcttttctatgtcattgctgtagattagcattctttttttatgaatagcatttgcttgccaattctaagaaccaatataaaatttactgctgaggaagattaaatgatgttacagattttttctaggtaatttggcccactaaattatgctagtcttagttttaagaccactgacaactgtaattttcttaaagtgtttatctcttgcctgggctcatttttagaaggtgaaatacaggaaaatcttaaattccatatgcttcagtatagtaaagctcatttataagcatctatgattaattctgatttgagattttgttttactgtttagaatgtggcatattagattggatagctattttaaaattataatgaggaaaaaaacaatttctgccagaaggttagcattatctaaggcctgtaactcaatgctgtatctacttaagatgcctgaagtcgtttgtttggtttaggataggcagaaatactcattatactttgagtgggtaatacaagagtgctgatgctgaggtaattatgagcaaatgtcttcactgaccaacctggactgatttgaagggaactgggtatggtagttaccccttgtccatgggggatatgttccaagtagatgcctgaaactacagatagtaccaaactctgtgtatattttgttttttcctatatgtacatacccatgataaagtttaatttataaattaggtggtggaaagattaacaataatgaataataatatagaacaattataataatatactgtaataaaagttaggtgagcgtgggctctctcaaaatttcttattgtacttactcttcttactcttcttgtgatgaaggtagagtgacacaagatttcatcatgttattcagaatggtgtacaatttaaaacttaagaattgtttgtatctgg

SEQ ID NO: 12113 - DNA, 1032 bp, Homo sapiens
tcattttcacaaataaggttactgaggcacagagagactgtaacttgctcgagtttattaaaaagatacgaaagtagcacagtaaattcatggcctctatacatcttagtttttacgaaaaaacaaattttcatttattaccacataacctttttttaatgtttctctaaatttacctttaaaataggaataaaaaacattttgaagcttttgtaaaaataggaagcactagaaatattacacttttaattttatttatctatgtttcagagatgggatctcactctgttgcctaggctgcagtacagtggtgtgatcatggcttactacagcctcgaactcctaggctcaagggatcctcctgccttggcctctcaaagtgttggcattacaggcatgcaccaccatgctcagccagatttcaacttttaaatatttttgaaaaccataaatgtagcattaatataatctcttaagaaatttcatacagggtatgccactgggataaacagcaatggttatgatgttaagttcttcgaactagacaatgcattattaaaaaatatatgaacttctttgttgctgaagcaaaccttcttaaggtcaagttttctatagggaaagtaatagcctcctaaatccatagtacttaaaagtaggctgaactggcttcttccagtctgaaccaatttaatatagtaaggtcacatttcctaattcagatgtggtaaagcttttttcccattgaagcccacttaaaagagaaagaaaatagtaactcagcccatattttggctgctcccaaagtgacttgtgagctttgtgaaaatgtgttaaatgatcaaggaccatacacaatctgctctacttttacttgtataagcatgtcttgatacgtggtaaaacccagaaaggcaaagatcacattttttacataggaataatatatctagtttccattactatctttgctctttgagactattgctattagattgttaaaattccgttttatttttgtaaccataggta

SEQ ID NO: 12114 - DNA, 1059 bp, Homo sapiens
gacaccctcctccctgcagtggaaacgtgtcctgctgagcttccgggcgctcccgaccgcggtgtcggcttttcttgggagactttggtcgcgagcgtccaagcccgctagtgaaaccaaactttactacgccgtgacctctcgagtgcgcgaatggggaagagccggcgcttctaagcatcagcctttttcactccttgatctgaacttcaaactactcatccacccccagtgttttaaattcgctacctgggctgacaactacggggccgggagatataaatttagcctaatcagtcgccccttctgagacctaggaattttgaaccattaaaaagatttcctacagatggctggcggtcttgccaccaacacgtattttgaagtattgtttcaaaagtagacgcctgatttagagtacttgatttagacattcacggattcaaatgttgaattttgaaatacttccaatatatttccgtattgtattacatacagtgtctaccagctgactgttgttcattcattttggattacattttggctaacatgctaccactgacctaagatacttaagcaaaactgctgaaaaatgtttttaatgctttgtgtagtagatgctgatgttaaatttttttctccgatttgggaattttccccgaattttgggaaaagcatattaataaatgcattattttttcgttttaaaagaaaaattaatttctacatatcaccacctacctcagcagcagaatatcagggcagtacattttaaaataacggttggtttttgtattttattagtaattgtattaaaattttgacatgtaatcaagtctgtttctaaacaattgctttctctttcctgtttctttggcagttggcttgatcatgtcactattttggttaaaagatgcaagaaaaagttcatgggccttttgtttttgttgttttaactaagcaagagaaatgaaatcttgaaactgtctttggatttcttttgttttatattatcctatcggataatctgaatttatattttttatgcaatgtgagttt

SEQ ID NO: 12115 - DNA, 1040 bp, Homo sapiens
ggagaaagatgaacaccagaagactcagcaagccagcttagcccgtcttcttccacctgctttgttctagccatgctggcagcttattggatggtgcccacccccattgaggatgggtcttcctctcccagtccactgactcaaatgtcaatctcctctggcaacccccttgcagatgcacccagaaacaatactttaccagctatctaggcatccttcagtccaatcaagttgacacctaatattaaccatcacggggcttaatgataactttgcaactcagatgtcctgttttcttactttctagatttataattgtgttctacctagtttggaaagggtggatgaggcccaaataactaggccaatttttgaatatcaatttttaaaaatcttttattagtttacatgttaggctaatccaagttggtagaataatctgctcattgggagagtcagtacaccaccaaaataacctgacaaattacccaaattatataaagccatagcacttagaattgaactgggtacaaataaataaatagatcataatagtgaatgcataaatgatccaaaaaataccagaaaggtggcctttcaaatcaatggggaaaaataaaggttacttaataaatgataggaaaaaatacatagtttttgaagaaaatgaaaccagatttctatattaccccttatgtctaaagagaacttagatatattaaagactttaaataacacatgtgtaaatatatctatttttataagcatgaaaccatgacttaaataaagtatgtgtcaaaaaatttagttagcttattaattaaggaacaagtaatatgtttaaaaattggtccaaaggagaactcaaagaacagatacatatatcagcaatcaggaattctaaaatgaatttgctaatagatgcaaaactggcctgtccacagggggaaattaattgcatctttttttttaatgtactttaagttttagggtacatgtgcacaatgtgcaggttagttacatatgtatacatgtgacat

SEQ ID NO: 12116 - DNA, 1031 bp, Homo sapiens
catttttaacactgataccactacacagtacatatgaaaacagaagctggggagaagaatgtttttttcacaattgaattgctgcatttctcaaactttgggatctatgaaagcggggagagggaacctgaatattaattatgagcacaaatttgaaggaaagaaaacaaagaaccattatctaatcaagctttgaaagtcctgcatgtttgccttttattttagtgttgacgccaacatagactgtctaaggtatttttttccccaaacacttgaatcttggtcgttggtatgtaatccactctctagagtccagtgtactttagacttcatctgagtccaatacatgtaccacactactgttttattaatgtaaaaaccttgtaaatgaatttcagatgggtgatttaagtgagtcacaagtcacaaaactttgctattcatagttaatcaaatagaactgggttttttttttcagagtgtggtgtaaataaagaaatataagaagttctgttctataactgctctgttaacatagtttttaaacattaaaaaatgtgaactaaaagtatttaaaaatgttgtgtttgttcttttgcaatgcaatactaaaatggggcagttgtgtactatatacactattcaggattgctggagaagggttatacatatttgtcagtgttctagatcatagaaggttatatatttaagcaccctaacgtaaatatttttaaaaatacttctgatagaaatctatctggtctgaaacatataccacatttctccattcttcataatcagagtagattcaccataatattttcttttttaagtcaagtttacctttataagtattaatttctgccctgtgttgtaggaaggagttgagtcttcctctacccacattgctgccacctataaaagaagaaattctatcaacacttcatttctcagtaactattgggtcaaagctagtgcagccttgtctttttatccatcaccaactcctctccagcatcttagaaaggctt

SEQ ID NO: 12117 - DNA, 3342 bp, Homo sapiens
acaaactctgaataccagaggacacaaagggagaggaaaaactgttctattttttttccccaggtacatgtggaaaaattttgctgcactgaaaataacccttgcctttctcttgctccaggctgcccttttcttgggcctgggggtgttgttctccttggtcagcattcccttggtcatctatgactgggcctgctcatcgagtagtgacgaaggccactgaaacccgccgagaaaaagaaacatccctgttgtctgctcagtcaagtccccacacatcagcaatctctcaccacttcttttgcaagtttacagaagcaaacagaaatgtacaggatacttaaaatggaataactttttggttgcaaaacagagacatggttctataatgcttcatgtccctccaagatttgagatcaatttagggattgtgaaatttttttttcaaatttcatacaatcatatttcccagtacttttcacaatcattttttacccatctaactctatgttttgtggcttcccggtctcttagaactttgaaaacatgatatacaataatgtttatttattatacatccagattctgaaataattttcctactgatgttcagctcacactatctgtacctttttagaagagaaaagaatcttgaattgtatatatttattttgctttacagaaaaaaatggtttcgtaaataatttgcctattttggttaacatagcacatggagataatcatctgaaagttatagggcactgccactgctgaatcagagcatgcccaatatttgaggtggctctgatttcctggcagctgaactcgggtagtccagtggcctagctggtaccacatctattcccatccagagacattctctggcaagtgttctcagctgaaaagtggttggggatgattcttaccttggtaattaaatgaagctacacatttgggtaatctagcaaatgaagtattttttccctcttggcaacttgtgtcagagttactctggtctgagtcaactttcgctggggaaaacctatggaacctactgcaaaaagattgtccaaaatgcctaagaaaatactcctctgatgcatttagccttcaaccctacctgtcttgctgaagggagaaaaatgttttagtacattataggcccagcagcttttattcatgtccaccagctagttgcacagagaatcatgtgtacctaactaaggatgatctaggataagtaactcctgttttatattgagtattttagggaagtctttaaaagacttgttttatatctataaatctaggttattacaaatacaagaattttgtaccttaaataagcctcatttctatttcttcttcattaattctccatctagtcttgtgaaaaaaaaaaaaaaaaaaccctcagagatagtctttgtgaagagcttctgacagaatcactgagtaccttccttcccccagatgaggaagacaagggggtctcagtgtctgtgctgtctcctcttctcttccccaaccaaggactgtgccattactgcccgtctcaactgtccatgcaggaggacagagttgcctggtactcttacccttgtccctctcctaaagggagcacaaggaaactgaagagactgaaaaagaagagagtttgtagctgaaaaagaatagggatagcaaggaaacccagaactgcattcccctaagtggggccatcccatgtgattgaattgtccatagcttgcctatggtgagaaatgtgcatgctccgtgagctggtctcttgaaacaggacttatgcttcctctatattctggttaaattttccaaacacataagttcactgagcacagatttcttatccagagacaagtagaatctaaccgcagactgttggcagagtttccaggcacttagccatgttcccttcctgactcaaatccccaaaggccttcactctcactgagaatcacactactgtcccatagataaggcaggcattgaagcacctgtcgtgatcctctaggggggagaatgaaaggttatttcctgcattgcatcatcatagcttttaatataatgctacagaatcatatccacattaggttagagttcagatatttggatatgaatacctaacctagccatatccatggccatctctgttcttttcagcaatgttttccatattatattagcaatgacagaaacagaacaagccaagatccagtcagttcttgggagcttgtctagagcaccaagtaatgaaatagccaggtagtgggatgactgtacctttaaaaatacataatttagtttgcaagctatattatgctactttctattttccttgttactttatagcaattcattttaccctcacaaagtcaatttagaaccttatcattaactgggatgtgtagtgatatttttgggcctctgggtttcatgtgtcaatacaaggaatatttatttaaaatagatttatttagaggaggcacagtgttgttgatctgtgtgacaccacccatatttttaaaaacctttgtatgtttctctaaatttgttgttgactgaatataatagaccctaccataattcgtcaaatatcactgattagttacatcctttgtgtgagattagctgtaaagtatactgctcttattcttattcagaatagttaattggtagccaaaaatacatgtatcacagatgttaggtcgaatttaaacagcacagtcaagtgctatggaagtttttctgctaaattagtagattaaagaatactataccctaggcatggggagcagcacgttttcctttggtaggtaggatctctatactagtgaacagtgccagttccacactttggacttagaactgttctctagttattgtaacacagaatactgtcaatccctaatttacttaatgttacttattggaagtggggctgatgaaatacgcacaggagggaaatctactgtgtttaggcacaggcagccccagtgtataaggagatcatattccaaaaggttgtcagttggttgtttgcaacctggaatgtattttcctttagagaccaggttatccatggtggttaggcccctagagcagctggaaaagatgatcaaaccaataggttagctgacatcgaataatgtaataggtttgctaaagaatctaaccatcaaatataatattgtttccagggagggtgtttgttcagagttgcctgttagtagaatctggactgtccatcccagccacatcccacctactggacagtaggggtagagatgccaccagactacaggtgaccagattggcctgaaa

SEQ ID NO: 12118 - DNA, 1038 bp, Homo sapiens
actgtagatatttgttaaaatactacagttagtattaggtagtcactaaataatggctaacatttactgaacagtatctatatatgctacactatcttaatccccaccaacaacattatgaggtaggtattagccccattttacagataaagtaactgaggcttaataacttacctgtgatcacacattagaaagtaggggagccagcgtcccatccaggcttgcttgactctagagccagcgtgatctaaaacaccataccgcctttggtgatgccttcttcagacaccaaagttgcattattactctacaacttgagaaaaactttatttttatcaacggatgcttgcaagttagtacttaccttttactttccaatataatgtacctttaaaatcaccttataaaatcagccagtgttcctgaattatcttgctagtgttccaccaataaccatcccctttactgtcatgaaaacagcttggcaatatcaagtgtaccaaactgtagaccgaggatgtcaggttcctgttcacaacaagtaaaatgtatgcttaaagtatattgtgaaaccaataaacctctcagtggcttcatatttgtcatgtgggttcctgcatgtgcaatttaagatttcccattgctttcaggagctgttgaactcctgaaagaagtaactaaacattttgttattaagaattaaacaccaagtgatagcaaaatcaaataataccaagtttaaccctaggaaacttgttaaataaccatggtactttcataaaatagagtattagactactacttaaaagagtaaaatagacttatatgggcaggtgaggaaaaatctcctaggttgtaacggggaacatagtgtgtagcactatgttactgcgtagcatagtattattaatactgtgtagcatagtactattacatgaatacaaactgaatattgggtggaagtgagcatggaaggagggtgtgtctatatgtatacattatattgcccagaatatttggggagggtacacaagagaa

SEQ ID NO: 12119 - DNA, 1055 bp, Homo sapiens
gaaaacttgcctctagtatccttttaaataccaggtttatagtagtcttgatattatctaattttccacttagggaaaaactatacaaaaattaatttatgttgcatatagtgtttaaatttattattaaaatgattcaaaatgtatagctgtttttgacttacggttgtctttcatttcatctcaagatgagcacctgttattggcattgttttgtacaaggtagagtgcaggatataaaaatgaatgaggcaaagtgcctgcccttggggcacttatagtttatttggtaaaacgagaatatagacaactcataatggcaaaagaaaaaaaggtggggggagttggtggttgaatagggctgtaaactcttagagagctgattggtaactgttcatgtatgttttgatgagtaacatatcatttagtaaagatgtcaagcttcaaatcattatcataaggttaaatatattacgcatgtctttacagcaagtttatttctgatcgtgaaagtagaagaagtctcacaaacagccatttggaaaaaaagaagtgtgatgagtatgtaagtatcattataatgaagtatgcttatttttttaatcatataaattgggacaaatctttttaattcaagtagcatagtaccaaaagcataactacctgtattcaccaggatattcctcataccttatgtattttctcttgaaatccattcaaggaaataactagataactaagaatggattttcttgaattttacttccatattggttcctgagagtgcattaaaggctttggcttgatgaactttcttggggattattttgcttagtgtcaatgtttgtttctttgttcagattccaggtacaacctccttaggcatgtctgtttttaacctaagcaacgccattatgggcagtgggattttgggactcgcctttgccctggcaaacactggaatcctactttttctgtgagtattgacgtgccggtactttccattttaaaactgaactttttgtatgtttctgttattacatagaagaaatgtg

SEQ ID NO: 12120 - DNA, 1030 bp, Homo sapiens
tgccaggcgtggtggcgcatgcctgtaatcacagctacttgggaggctgaggcaggagaatcgcttgaaccagggaagcagaggttgcagtgagccgagactgtgccattacactccagcctgggcaacaagagcgagactccatctcaaagaacaacaacaacactgcttcatatcataaaagggggtctctgttacctacagctaacatgatattcttataaacctgatcagtaagattatggggcatgattcactgtatagttaaaaatggaaggaaatctataaaaggcataaaatttagatacacctccataacttgatagacaaagattgctttaatgcatctagtagcaacatgtaaaattgtataatcagtaaattaactacttgtttatttgtggtaatttatttttaatcagtagcgtttcatatgtttagttatttttttattttgctatattttaggggtgtcaagcttccattttggtatctacttctaaatacactcagaacaggagaaatttggactaattttcaaactacagacactttctaatcatgatgcatttcaaaagtggactcgaattaactgagttgcaaaacatgacagtgcccgaggatgataacattagcaatgactccaatgatttcaccgaagtagaaaatggtcagataaataggtgagtatttttccactaacatttctatccagtgaaagaaatggctcgtggctcacacctgtaatcccatcactttgggaggccgaggtgggtggatcatttgaggtcaggaattcgagaccagcctgaccaacatggtgaaacccaccaacatggtgaaaccccgtctctactaaaaatacaaaaaattagccaggcatgtggtgcatgcctgtagtcccagctacttgggaggctgaggcaggagaatcgcttgaacctgagaggcggaggttgcagtgagccgagatcatgccactgcactacagcctggatgacagagtgaaactctgtctcagaaaaaaaaa

SEQ ID NO: 12121 - DNA, 1053 bp, Homo sapiens
ggggtattattcattttttccataagttagacattggagtaaaagcacaacaggtttttcttagaggaaaaaccttctcatgatctgtatgttattaataattataattgttacataaaattactgtgtgcacagaggtaacccaaatttcctagtcaatcgtggctttaatagtggctgtcctaaaagattttgttatccacagacaatcgttttcttgttttaatcctctttaaaaggtggttttataatcaacaataggactttgacagatgttctaaaatgcaagcttctgataactttggaaattgtgacattagaatagaagaaaaactttcagaactctcacagagaggtgaaatgttcatgaatatcaagaacaggggttaactaaattaaccgaaacaatggaagactaaagtaatctttttgactttgcttaaaatgttgctgaccctttgttttgtttttcagagtcaaggaaacttttgagctatttacagcttgtagcaattatgtaaagtatactcctctgaacaaaatttggagcatgtttgtttctctctacctgatttccccagaatctggaaactatctgtgagtattctcaacttttagcaatatagttatttgcataagtgcaataagaatctgttttcttttgtaacaggacacaattggagaaactggttattttaccaaggctttgactggaacagcatgctttcctttaaggaatcaaacctgacttgtaaagccaagcaaatccctttggggaattggcctcatacttgcctacacagacctcaaaaggagagaaatttacccaactcataggtatttgagggttcaaactcattgcaaggcttggttctaaaaagtcttatctgagattccttctatggagcagagttccatcaaagcgaaattacaaaaggcttatgtgaaaaataattattcttgctgcactttatacaaaaaatcaggccaagtataataaagcaaatcagtgttactatgatttgtctttagtaaaaaatgggaaactggaga

SEQ ID NO: 12122 - DNA, 1115 bp, Homo sapiens
tgctgtaagaattcatcacaggtaaacagtcaagcaggttctcaactggaacaattatgtccctctccctgcccccaggaggtatttggcaatgcctgcgttggtcattggagaaaggcatcacagaagagttggcttgaattttttaaaaaagcaagcaagctgggctttgaaagaaaggtcatacttaagttagcataggcttcatgggaaggtggagagggtgtgtccaggatcagggggatggtgtgaacaaagcagaaaactgcataagagtagacccattgcaggaatggaaaattagaaggaatatagtgggagcataaattaaagagaaagctgtctgaggttctagagattagacctcatcctgtagagggaacagttatgattggcaaggcagaaagaggaatgtgcaagactgtcttttcaggaagaatctgcctctataggtgggagagggcaagaagcaggaggtagcgtggcggagagtgactgtggcaaagttcaggctgtgaaactgtaaggaataagggaaaggaaaaggattttgtgaaggaatgttggcaggacttggcaactgattagatatgaggttgtatgaaagccatactcaagtttcaagtctgagtgacaaggagaaggtgcattatatctttaacagaaatagaatgctggcatgtgaggtcaggtgatgcgttctgcttcaggcatgtggaatctgaggtaatgataaacatcctaatggagcagtccagaaggcagcaggagtctgaaaagaatttatggaaatgtttctgagaaggaaagaacctgagagataacctctctttcatgccctctcattttacagatgaagaaacatgtgacatgttaagtggcatgatcatgatcaagttgtatttatgagggagatcctatttcataacgcaaaggaattctagttttataaagtgaaaaagactgggaagaaagatctgaaagatgcctttgtagaatgaaacttgacactacagccctgaagccctaaaaaggaaagaatttggaatatgtggagcaagaagagtcgaggcccaaagagctacttctacacagaaagttgggaggaggaggga

SEQ ID NO: 12123 - DNA, 1050 bp, Homo sapiens
gcatggggctccccagcacccactgggacccagtaggttacccggctgcctgggcaccgtttgcctgccaaatcgcccgcctgaggtttgtgctgaactgtagttagagaaggcacaagtgcatatggcagcaaaaggaatttcgcggtacccgcgtcacgccgctcccagtgcctttcacaggctgccttgggctggggaaggtggtgctacaattcagagtcctttgtcttgctctgcggcgcggacccggggtttgtacaaaccctcgttctctgttagaaacctaactgccgccaggatcacgtactttctcggacgaatccgcggtgatgtgtgtagcaaaagtgaaaaaagacgcctctgctagaaaacggtatttatttgcgtttggaaggggttttgacctctctgcagtgggtttttacatttttcaatataagggggaggaggaaaataaatttatggtttgcagaatgcagggcccagcgagggtgtaatttgtcaccttgataaaagaaactgtgcagcaactcgtgctttttctgacgtcagaaggacaacggaaataaaacctgagctcggtgcatggctggcctcgttgtcaaatgtctcatgccaatttggtactcccgaaatcttgcaaaacagccaattccggggtactgacctggtgtggaccccctggattttggttcgaccccagcctcaaaatggcctttctcttgagagtcactcgatttctcagtatgtcgctgtaagcaattggaaactggaatagtttggtttgaggtcttaatcttgaggtttattcgctttttaaaaaaatgtggccaataaacattttctacagagggcttactgtgcgactggcagcaactaacaagatttgtttcaccttctatgaagcttccgttctcagggggaaatagactatataaatgtaggcatatacatttcaggtattcttagtgcaatgaagaaataaaacaggatcatgtgatgggggaggatgcttgaaatagagtgactcaccgggaggggcggtgt

SEQ ID NO: 12124 - DNA, 1550 bp, Homo sapiens
tctatgaagataaaataattgggggccatctagaaatagaaaggcagtgggaagacagattctacggcactgctttcatttaattgggctttaggcactccattcgaatgcagaacctcacctctagttgagaccaagaattggcaaatttgcatgagctcctggaaagagttgctgactttgtatctaagacctgccagggaataccaagagttgtttctacagacttttttttttttttttgtatgggagaagatactgtggcaaccaggaaggaatggaaaaaaaattcttttctctacagcaaattaatgtgaggaagctcctccaatcctctggctatttaaggttcaaaatcaagtgcctagggaaaattccaatggatgattttctgggagctatcttgtctaccttgaggttcctgaacaatgaattcccattaatgagcagtcttcagtattaaaaccactgtcttgtcacctcattttgcattactgtcttccgtggatgtttcagttacaactgtaatgttatttatagaacaacattaatccattaaagctaacctatttttcaatatttatgataatctatgtacatatattgtctgtccatatgtatttgtaaataggttgtatataatgtcaggtttgggtcttgggttcaagtgtatatattcctgtaagtttcttaactgcattttgatgaattcacattatgtaactataagaattgtcccaaaagtacctgtacagaaaattgaatattgaaaaattgacaaattgtgtacaaacactaaaaaaaacttgtttaaattgtatttgcaataaacaacatcaaattttttcatgaaatcttggtacaaattcagatctcttatttaaaatttaaataaggaatacattttcaaaatgcagtaatcaaaatgtgatctagtgtaatgaaataaaatgtgatctagtgtaatggaagacctttgagaacctgggtgtattaactttgtgtatatagtgtaaatatccccactgtactgttagaggccaacaattctagtatggcttgttggcaaagagtgctacaccgtttcaatgaaacaatgtatgtttgttttaactgaactaaaataaatacatgcttaatcctgagtagcagtgttttttgttttgttttgttttgtttttttcaggtaatgggataggcagtgtctaatgcaaattgcattgtaactgcagtacctagcacctagtaggtgtccatatgtttgtgatgaatggtcaggaaaaaaagtttaggttcccagagattctaagtttccaaagtgagaaggaatggaaagtcttggagagttgggggaagatgctaaaatgcatcataagagcccaggctcagccctgctgatggaaataaataggtcaataatgtatcagaatcaactggagagccttttaaaaccacagctttctgaaacgtgcctagtttgtctgattgcaaaggtccagctgtagggtagcccaggatctggttttttacttaagaaggccactcgggtg

SEQ ID NO: 12125 - DNA, 1345 bp, Homo sapiens
aaagggaggaggataataggtgctttatagaaaacatgtgattagctaattattgaggactgtgaagaaagttttggtttacatctgaaaatagattgagaattgagataatcatatggtgctaataattgacacattcagaagtgaggatattgatcatacttcatgaacagattagaagaatggaagctaattacacaaaggaaacttaggctttgattctaagattgtttacataaaatatatgctgcggaaatgtgacagcatgagttcgttacatcagattaagtagatttttacgttttctttcagactgtctatgctgtgccaattctgatcttttcatttgtctgtcatcctgctgttcttcccatctatgaagaactgaaagagtgagtatttcatttttacataaatttgagaaaatattagacaattgctgtaactgctgctgaaatatatatttgaattttctcttgaattacatagccgcagccgtagaagaatgatgaatgtgtccaagatttcattttttgctatgtttctcatgtatctgcttgccgccctctttggatacctaacattttacggtaagtaacgcctcctttaccaaaacaaaaacaaaaacaaaaaaaaacgcttattgaaatgaagctgctagttttctatgtgtagttccatcactttaaaaatagtctgttttaatatatttcatatttgtgatgagaaattaaatttagagcttagaattttctgtagtgtatttaatcagtaatttctagaatccaggtttgaaaatatcattaatcatttgatggcatatttgtatgatatgccagcctctgagttcatattgcctgtctcctctcccatcaccttcagactatgtaacacaaacacaaattgcaagccaagccaggagatttagctgcttaactcctgttgtttttaatgggagtcatgtggctaaatctctgtggtatttagaaaaattttccttcaatgttactttaattgcattaactataattccaaacaaatcttattagcctcttagtttatagtcgttttgtgagtagctaaataactggtgcacattttgctgttaaattttctacttggtgtccaatgaaaacagccaatcaaagtttttttggtctttccctgtagaacatgttgagtcagaattgcttcatacctactcttctatcttgggaactgatattcttcttctcattgtccgtctggctgtgttaatggctgtgaccctgacagtaccagtagttattttcccagtaagtaatcacttgctctgctttcagtaggaaggagtttttagacatgt

SEQ ID NO: 12126 - DNA, 1072 bp, Homo sapiens
atggcatcactgtcgaatatttgaaatccttgttagcacttggtataaaaactggaggcagttttagagtgcagccagtgtagttaaagtaagaattgaaatgatactaaatggcacctctgtttcataagtgaaggtcaaattctgatgtaacccttgtactcttggaattatactttaataggtgcttatgtcattgatttaccattttgcttaatggctaaataagattgctaaagtgtgattttattcatcagtacttactttatatttagaggtatagaggaaaatgggccaaaaaccacatggctgccacggtgcacttcagcaaccctgtagctaacctgtttaagtagaatcaatctgaaggttgaaagtgacctcaaaggttataaagtctattcatcccttgtcatttcagtataagacatggaaggacttaatttggtttgtttttaattaaaccaacatattttctccagttagaagtgaggttgatagtgtcacttcagactaggtcctgtaaaacttctggcatttagaatggtagtgtaaagccacttcctctgtttaactaatagacatcagtttctttgtcagcaccttacatggtactgcgtgcagtttgttcatacggaattaaaaaacatgtaactcttctcctttgcaaggttttctatgagtttccctgttttgttatttaatttctttaaaaaattagtctgtatctctgggctctcctaggtggaaggaaagtaaagctggaatgagggagaacccttaccctaaaggaaaattaggtgacattagggtccctttagtcactctatgttaccttatttatttattttttttctgttgctcaatccaagtgaaagggtcaagggaggaaaggcttagagacagtcaagctgatagcctacttgttctagcacagacattgtttaactgtgacaatagtgggcctgtattccttgccatggggtgcaatgtagtatgtcatcacaatggttagttctctgatttgtgcccagttgttagtaaagcttgtagtgcctcttaaaatgttagt

SEQ ID NO: 12127 - DNA, 1030 bp, Homo sapiens
ccagagttattttaaagaaaaacactagtgtccaatttcatttttaaaagatgtagaaagaagaatcaagcatcaattaattataaagcctaaagcaaagttagatttgggggttattcagccaaaattaccgttttagaccagaatgaatagactacactgataaaatgtactggataatgccacatcctatatggtgttatagaaatagtgcaaggaaagtacatttgtttgcctgtcttttcattttgtacattcttcccattctgtattcttgtacaaaagatctcattgaaaatttaaagtcatcataatttgttgccataaatatgtaagtgtcaataccaaaatgtctgagtaacttcttaaatccctgttctagcaaactaatattggttcatgtgcttgtgtatatgtaaatcttaaattatgtgaactattaaatagaccctactgtactgtgctttggacatttgaattaatgtaaatatatgtaatctgtgacttgatattttgttttatttggctatttaaaaacataaatctaaaatgtcttatgttatcagattatgctattttgtataaagcaccactgatagcaaatctctctccaaaattcttaaagttgatttttttaaagggggaggggaaggctttaatgtgttctagatcaatttataccttccgtatgacgttttactctgatatcattgtgcactttagccagatccagaaaacactcaaatttattttgcaacaagtgagagcccaggagacctccttattatcctgtctctgctttgaggcaatcaagtaccctctctgaacctaggttccctcatctgtaaaacaaaggtttcagaccagatggtgtttaaggtttctccccatactggaatgaatgatttcttggtggtattagcatcatcacagacctatacttgctttctgaaactctaccacatactgaaggaatacaggaatgggattaagatgactagcatagcagtgtacagcttgaagagatgtt

SEQ ID NO: 12128 - DNA, 1068 bp, Homo sapiens
acagggctttgattctttccccgcctgtggagtctgcccaccggattcgccccctagcccgagttctggccaggaggcttctcacccggttcaaattgttacaaagtccagctggagacttccttctccctgtggcgtcttcccccatgcctctggtgcctccaggagggtccctgtggttccaggcaggagtggctgcttggggacccagtgagctcccagggcctttcccactgtttcttctacccatgtattttgcttggctctctaaattgactcagctccaggtaaggttggaaacttctcttgagtatgactttcattttccccagtgcgggtgtgtgttcaggagtggagggtctccctttcccacttccacagtttgagcactcacagtatttggggtgtctcctgagtcctgcaggagcagtccgcttccttcagagggtctgtgggttctctcgggattcctggtttgttctcgcagtcattctggagctaaaatgtgcgatgtgagcctctgtatgctgctctgtctgtctgagtcagagctgcaatctagtcctgccttctgtccaccataatgatcaacaagttctaattttttttaatttttaaaattttattttaatttcagggatacttatacaggtttgttatataggtaaactcgtgtcacaggggtttggtatacagattttgtcacccagatgtactaagcatagtacccaatagtaattttttctgatcctctcccttctcccactttccaccctcaagtaggtccctgtgttttcctcttcatgtccatgtgttctcattatttagctcccacttataagtgagaacatgcagtattttgttttctgttcctgcattagtttgttaagaataatggcctccagctcctatccatgttcctgcaaaggacatgacctcattcctttttatggctgcatagtattccatggtttatatgtattatattgtggctgctttaaaatatttgtcacatcattctgacatctgtcattttggggttggcatctagtaattgtctttttttcc

SEQ ID NO: 12129 - DNA, 1091 bp, Homo sapiens
ctggaattcgattttgtccttttttactcaccttaccactttttccatccgagaatgcttgatttggataatcagagtaagtcagtcaaaatgttcaaattgggtataaagtctctcaggtgaatatcagcccttacaatctgaaatgttatcaagtcaagctacactgcatgtttgccatctcacttttcattacacttgatttgtccttgtatttgacaaagaagcagaacaaagttttcaccaaccaaccacatgacagcattaaccaccagaggattttgaacctaagcctggtggaaattcagaagcaaggaaaatcgtgtaaggcaatgaggctccttagagaaacttcaaagatcttgttaataggtcagctcaactaactgtaaatgacctgaattcaggactaagatttccataaatatagtgatcaatgttgattttaattacattacctttaacacttgttagaaggaaagcaaagaatctcattttcatgtataattacttttcatagatctgatatgctttttacttagcttggagcaatgggtcattttttaaaggactacattattagctttgatctaatttgcctgggctgagtttaaaatgtttgtgtttctgagaagtctaagacaggattttcaggcatgagatggctctgtgctttccattttggtacttggatgtgaaattttttacctcttattcccaagaagctgtcatgtataatagggtggtgcattgtgaatttcatgatgtattcattggtccactacattaaaacataaaaactgaatctgaattgtaggagtggggtcatattataaattcataaaaattaaattatttttatcaatcaaataatgaatatttaatataatactgggcattggtggtaaaacagaaattttaaaagccatcattgcttaaaacctgtaagtggggtcataaggctaataaaaaggaaacaagacaaatatgtgttaaatgaattaagaattaggataaaggagagattactgtggtcttaacatcagcaagaagacttcttagtgggaggtgatacttaaaaagtttggggg

SEQ ID NO: 12130 - DNA, 1036 bp, Homo sapiens
aaagtcattctccgtccagcttagttccattgctggtgaggagctgtgttcctttggaagagaataggtgctctgatttttagaattttcatcttttttgctctggtttctccccatctttgtggtttaatctccctttggtctttgatgttggtgacctcagttggaaatgtagaaatcacccttcttctgcgttgatcacgctgggagctgcagattggagctgtgcctattcggccatcttggaacgccccctaactcgtaaaggaaatgttgaaatgtcttactggggcactttttttttttttttttttttagaatctttaaaaaatacttcctaggattactgatgtataagggaaatttagcagcgtttagagttttgggataactttttaagtgagtattttaatttaacactatcaatttaaatatttctgcctatttctcttatattaaaggaatttcaagcagttttacattttatagaaattaaatgtctttgtatttttattactgttcttttctgaagttgggataaacacccttgcatcaagtaaattatgaaatatacatacagaaaagtacgcaagacaaattataatttagagaataattacaaagtgaacacccatgaaatcaccgagtcagaaaattaagacatcacccctaaaaaacctctctatgtacccctgactgatcaagatcctcttcctgccctcttaaactgttatgcatagacgatcctttgcataacagttttcttcattagaaataacaatttcataaggaagtcagaggaggtatttttatcctctttttataaaggcagaaaaggaaagtttgttttgctatgtttgtactagttagtagtagcaaatagatttcttagtttaatacttttccagtgcatttaatatgactgtattcttttttttttttttttttttttttttgagacggagtttcactctttgtcccccaggctggagtgcagtggcgcgatctcagctcactgcaacctctgacttctggg

SEQ ID NO: 12131 - DNA, 1022 bp, Homo sapiens
cctatttggtgtttggccatttttttttttagggcttttcctattgatttattttgagagttctttattctggataactaatcttttggtcttttccataataactatcttctctcaatttgtagcttatcttctttatggaattttaatgaatagaaacattcaattttaatatatttcaacttcttgattttttaaaaagattaggactttataaaatgatttgttcaaaaaaatagtttgctgcttgagttcctaatagtctcctctaatttcttctaaacatttttaagatttacttttcacatttaggtgttttcacatatgctgaaggtttttccagctctatttttggaatagccctactttcccccgtggatctgccgtgctactattgtcatatgtcatgtttgccgagatcactttctcatctctgttctttacactggtctgttgcctgtccttacatccattccacactatctttaattattatagcattgtaattgtaagtcttaatatttagtgtactgcatattctcctaccttttattattcaggaatgtcttgggtattcttggacttttactcatcaatataacttttagaatcatcttcccaaattcgttaaaatatcctgttgggattttgattagaattgcattagatttataaatcagtctggagagaatcatattgtatgtttttgtactttattatagatgaatgtgaaatatctccacttagattgtcattaatgtctttgaaaacagtcttacaattttttgcatctgtgtttggtaggtctttgttagatgttttgtttgtttgtctcttgttggtctctcgtagtcaccttactaaacttgtaatacttccagcaatgtctctagattgttttgagttttctttttggaccatcttatcatttgagaataatttcaggcctttttctttgtttctagtccttgtgtttctttcttgtggaactgcattggtaaagacctgtatgtaataccaag

SEQ ID NO: 12132 - DNA, 1031 bp, Homo sapiens
cagggtcacctctccactcccgcccctcccatttctcccctcccaacctctaggttttggatacatgacgcagcaactgatgaacctggcaggaggcgcagtggtgctggccttggagggtggccatgacctcacagccatctgtgacgcctctgaggcctgtgtggctgctcttctgggtaacagggtgagccgtctccctcccccatccatgcttctgtcaggcaggtaagcccggctctcaggactacccaaggagcaggcagatgggatgggacagggtgggagtggccaagcctgaaacaaggtaggcgaagcggaagcctctgttccaagttaggtccaggcagcatctcctggcctaggtagagtgtgcttgtggctagaaggctggggcccctggggtgggagtgagctgggcctgtgggtccctgagagactggtggctgatgtactgttttctataggtggatcccctttcagaagaaggctggaaacagaaacccaacctcaatgccatccgctctctggaggccgtgatccgggtgcacagtaagtgtggagatgggacactcgctgagctcagactgaaggatcttggtggtaccctgccccaccgtggccagatcctagggcttccggtgccagccaggtgacctgctgttggtctggagtaagattcctgtgagtgacccaggcagcaatggtgagcaccccccagtgaggggttatcctctgagcccccccgatggagccagcagggcctaccagacagtggcccctcaaggtagggactggcctccatctctagcgacagccctagaccagggccaggtcaagagcaacactcaggccttgtttgccaaaaggcctggttcccatccctcccctcagtcctggccacaggcgtctcaggagctctgctggcttgggggctgcgtcttgggataacccccacatttgtaaagtactttaaattttcaacttcaactcaacatctattgagcatcttatgtcaagacccataatct

SEQ ID NO: 12133 - DNA, 1090 bp, Homo sapiens
tttcattaatgtatttcatttttactgagggatcccttatcagttagacatttagattatagcttatttgaatttccttatgcataaatctttcctcatgcttgggattatttcccaaggttcactctaaagaagtagcattcctgggtcacatggtgtgagcattttgagagtcgttggtgtcctagacgcacagaaattgaccctcccacccgcaatgagcaggaccctcctctgaagacttcccacgggtcagactgaaatagtcacttctccaaagctggatttgtctatcacatggtccagtgtcatcgtgggcttcttagctcccggtttgggggtttcctaggaattcttttccctcctgctgccccttggtagcctctctgggttcatgacacgtgtgtgagatgctgtacgttaggcctcatgctttgctctgagcacttgagggcctggtgctgggccctcgagtcctgggccacccagcagtcgtgtccgcatgtgggaaggccgtggctctgtggcagccatgttggctggagctgtgttgatgtgttggctgctgccacctggggaagtgtctgggcgtgtgtggacaggtgtgaggggctggggctggggtaggggcaggatgaaatgcaggcctgtgtgggtgtgaggggtgtgtacccgcccggctccatgtgggtgcctgctgtggcggtgctggcgtgttctctgcagccaaggccatggggcgtgaggactccctgggtccccgctctgacccttgctcctgcagggctgatctatgactcggtcatgctgaagcaccagtgctcctgcggtgacaacagcaggcacccggagcacgccggccgcatccagagcatctggtcccggctgcaggagcgggggctccggagccagtgtgaggtgaggaggcgcgggtggggcccgaggaatgggtggagggaggagtcatgggaggggaggggtggggggccctggggcccatgagagatgaggggcacatggggtggtggtgatgggagggaaggggcgagcatgagctcagagctctgtggtccccttttcagtgtctccg

SEQ ID NO: 12134 - DNA, 1050 bp, Homo sapiens
tttcaccatgtcggccaagctggtctcgaactcctgacctcaagtaatctgcccgccttggccagggcagaacttccccaaagttctgggattataggcgtgagccacctcgcccagcctgaagtaggtattcttatctcctgattacaggtggggcagcttaagcaggttaaattgtgtttctggcttgctttgccagtcaccgagggagtcggggcttaaacccaggcccatctgaccgcaaagccaatgtcctgtgtgctttagaccttcaattccctcacagtttgtggcctgccagacttcatgtggcaggggcttccagcccactctcagctccctgctgggttctggataaatctgagcaagaagcattcagtgccaatcaatgagcagtatagagaatttctggaagggagacacaagaagctgttagaaagggcggcttccagggaagttctagggagtctgggatgaatgagaaacttatcctaacaacttttgggctctctgaattttttttagtatctgcaagtattgtacttgttcaaatatgtttaaggctgcaggctgtattctaaactccttgaaagtgagaaccaggtttcactcatatttccatcttttcaacccctagatcagtgacttcccagggaagtagtacctgcatttggggttgacctttgggtttcccctgtactggtctggcctggcctggctggaccactggctggctgggtggctgtgacctagccccttctttctctttgctcctctgtcaaatgagagtgttggtctgaacgatctctaaagcctggaagaggagcagatcctctgtgctcagcccccactctgtgtcagggaggcctggcaaccacagtgttctttctcctgtttatttgttcttggatcttcctgaagccatttcaccaccagccttcatcttctctgccagccccatggagactcaagctttttccagcctatgtcagggaaggagaaccagagacagcaacctcgggtgtgaagggagtcagctctgaacccagg

SEQ ID NO: 12135 - DNA, 1029 bp, Homo sapiens
gtacccagcccagtgaacctagactggaaccaggtcttggacctattgggactggtcctctgcctttagtcccctgatgtccctccttgcccagcagggccaggctcagaggcaagctcagagctgcctcctgatgttgcacctggaatggtcctggtgcagtgttctccagaggcctctgtgtcccttattcggcgggtgtctctgtggccaccgggtcttacagtgggttttggggcagggaagtttgcatgtctaagctgttcactccactttgacactgaagttcagtttccccatcagtaaaatggggagaaaattccaagcacacttctcagagcagagcagaagaggttgactatggagaggagaatgaaggtactgtgctattatccaccccctccagtttgcttagggataatggacctcagctttagtccttggtggcctcttggcatggaagctggaactttctcaattctgatataaaacccttgagcaagagagaaactcatgtgtgatggggtagggagtggggaccctctggtagctgtgggcaagcatgcccaaggacttggaagacagaagcctgtggaaccccatctcctctttgccttctttctcctggcctttcattaagggctggtaattttgaagtcggcaggggcctgagagaaggtgagctaatgcaaggcccagggtcacacagccagggaatggcaggcggagggggccagaaccaggccttctcactctgccagtgcccattctgctggcccaccctccacagcttggctctccctggcctgccctcagttagacttcggactgaggcctccagtggggtgtggggtattgctggaagcagggcctgaataaagtctggggctagcgggagggcatctgtcctcccggaggctcccaggactgtgcatttgtgtgtgttggatttgttcactagatggggcacttcctttggggcaggaagctttgatttcctgtggtgatggtgaggaggggttggtaagg

SEQ ID NO: 12136 - DNA, 1029 bp, Homo sapiens
tgagctcagacccccactctcattccccaggtggctgacccagtccctgggggaagccctggatttcagaaagagcaagtctggatctgggaccctttccttccttccctggcttgtaactccaccaacccatcagaaggagaaggaaggagactcacctctgcctcaatgtgaatcagaccctaccccaccacgatgtggccctggcctgctgggctctccacctcagccttggataatgctgttgcctcatctataacatgcatttgtctttgtaatgtcaccaccttcccagctctccctctggccctgccttcttcggggaactcctggaaatatcagttactcagccctgggccccaccacctaggccactcctccaaaggaagtctaggagctgggaggaaaagaaaagaggggaaaatgagtttttatggggctgaacggggagaaaaggtcatcatcgattctactttagaatgagagtgtgaaatagacatttgtaaatgtaaaacttttaaggtatatcattataactgaaggagaaggtgccccaaaatgcaagattttccacaagattcccagagacaggaaaatcctctggctggctaactggaagcatgtaggagaatccaagcgaggtcaacagagaaggcaggaatgtgtggcagatttagtgaaagctagagatatggcagcgaaaggatgtaaacagtgcctgctgaatgatttccaaagagaaaaaaagtttgccagaagtttgtcaagtcaaccaatgtagaaagctttgcttatggtaataaaaatggctcatacttatatagcacttactttgttgcaagtactgctgtaaataaatgctttatgcaaaccaatttgccttatccttataaggaccttatgggagatgaatcattattacccccatttgacagaaaggatagcttgagcaatgccacactagcaagggatgggatttgaaccttcagcagctaggttcagaagccacaaattaactgctacattgtc

SEQ ID NO: 12137 - DNA, 1004 bp, Homo sapiens
cactcggcttccatcctcatgtcaggcagcagtccttgtctacacaggcttcatccttccctgctctagtggggagtaggacagagggcccccacggccctttccagatacagtgattccaggttcagtgattccaatggtggctgagattgcatacacgggaaagctgccctaaaaagaaagttactcattaaatcggattactccaatgctgcccccttcactaaggaaccccagcctccaatttctcccatgctcaaggcccctatccattgccctcccacatgtaccctgacacaaatagcactactctcagtttctcttcccgaggttaagttgaagtctgccctcttcctttcatcatgttctcctctgtcccctagtctgtccttgcaactcatggctaaagtgaggtacatatggcaggtacaggagctgcccagccattgatgcaaaatgggttaaactgatcctgaacatgctagggttggcttctctgtcttcagtatgacttgagaagtcccagagcagaaggtatgccaatgaaaatggagcaggccttgctaagagagcttgcagggacactggtatggacgctctctgtgactggacagaggtgatgctgagcctggactggagcccaaacctaggctccaactgggcccagggtgggccagcccagtagctctctggttctgctgctttccacacttaggggttctattgttccaagacatagaagaacagtggctgcatccctggtggctttgatcttgctgcctgcaggcaggggcggagggtgtggggaaggcaggatgagacttctgtgtgggtgtgtgggggcacaggatgagtctccagtgggggcatgagaccaacgtggggcagggctggatgggctgttcttggtgtgaactgtgctacagtgtggccttggcctgctctctcctcccatctctcctcccttagcctctcagtctcaccccacaaatctccctccctgc

SEQ ID NO: 12138 - DNA, 1985 bp, Homo sapiens
ggtcccaaagttccaagcagtcctttccgtgaaagcaggggtttgcatgtgctaccaacacatgatacggggaagacccacccagggagcggtttcagtggcgcaacaaagcaccacttttactgttgcctacttctgaccaagaagaaaaaggaccttagtatttagcataaaattccagcgctggatgaatgcagatctagtttggtctgtggctagtttaaatatgtttctaaccacagagaatttcatatatatatacatatatatatacacatacatatatatatatatatatgtatgtataaaatttcacagggatatgcttttttttttaaagactgaatgtgttcaccatttagcctgtagatttatttccattttccaaattccagcacacagagatcccagcccctatgagtagggtgtttgtggactacctaatggaatatttttgaggcctggatgaactttgccatatgggtagaggttacagagggaggtgatattttcagctaaaaaaaaaaacgggtggagtttggactgatcaacttgagatttaaaaactgctattccttttgttctttctagcatctctccccaccctctgagagctcctcaggcttagatagtgaagtgatcaaatgccagtgtcattttgtacttaagttccaaagtaggaacattttatacttttttctgtattgtaataggtagttttgtatgaaatcttttctcctctcccgttgtaccgcattctttccagcattgtgctttttccctgggcttatttgaaaattttactgttttatacaagctcgtttagtacatttttctatgttttaccacaagttacaatttgaaaagaaaactattttttttaaatattccattgttaactgaatgttactgtttccactccagcaactacatgtcctcccttcaactgcctgccttttggggaaagaccaccttttgtgtgtttgttttttctctctctttctttccctttctctttctatctctctttatttttctttctttttctttgtttttgagttttctataggaaataaatagctttctatatatgagttgctggggaccttcacattctcttttagaaagctgtggcatgcagtctcattgcaggactcctggaatattgtctggttcttggtatttactgtatgtaagcaacaacttgaaaggtggcaatatggtgtcgatttggactatgaatcaaaagacctttttcaggttctttcactattgtctgggggactcagaacaagattgttctctgtatttattgtttgtccatttaggtaacatctgtcttaccttcctcacagactttgtacagaccaaagcaacaaatatttattgccatgtatagcagaaaatgaaacatgcaacaaaagcactttgaaaaatatataaggaattgttgagcctgtctgaatttgggccccctttctgactaatgcagttttgcacaaggtagaagttagtgaccctgagaccatcttaccaccctggacctggtccaaatacagacttacacagtggaccattctttcctgagctagccaacaagagcaggagtagtatctggaaactttcccctttgtttaggggtaggctttgatgaccaggaaaaaaaaaaaggtatttctgcattttatggcccaaaggcatgttattaatatcttatgtaatttactttaaactaaataagacttttttctcctgtgttcccctttctcctgtgtccactgctcatattcacctgccttccctaaaaaaggaatatttgagggatgataagcactagatgccagctatagagacctcaacagaaaccataatcccaagaatcactccgagaccctgaacagagaatatcagacagacctttcttacccatttgagaaacacatggtctgaggcacagaggctagttacatcccatttgtcacctg

SEQ ID NO: 12139 - DNA, 1048 bp, Homo sapiens
ggtatacaaagcacttctttcacaagcctcactttctcacttttaacaaatatttactgagagcctactgtgtgccaggtactagtataaatattgaggataatagggaacaatgtgaagtccctattctcaaggagcttgcattctacttgaggggaaggatgaaggacaatgtgaagtccctatgctcaaggagcttgcattctacttgaggggaaggataaacaaatgtatatgccttgtgataagtgctatgaagaaaattgaagcagggtaatatatagagtaggattgggaggatactatttgtatagggtggtcatggaaagtctctgataaagtgacttgagcagagacatgatggaggtaagagggagccatatggaaatatgggactctttcatgtgtttttataagctggactattttcagtttgcaaatacaataagcatttcttaccttcacattcagtgttctttttgcctggaatgtcctccgtacctcaactttgtctgtcagtagtgttttatcttttaggtctcaactcacatgtgaacttctgcatgaaactttacttatctggaggtatcaaatacttcttcctctgtaatacagtaatagtaatccatagtaaccattactatgattgctatgcctttgccatatatggctttgggaattcaattgctaggatgagaataatatcagttttccgttgagaagattaagagtaatgaaatattctttctcatctcagttcccctacttctttgcagctccccatatgttctaagctttaaatatttcttaaaattctctatttgttaagtcttttggggagacttcatagtttggattctttatttcttacatcttttttggagtcagatctgccttctgatcttgggttggaaaaggcttcatgtagctttggacaagttactcttatgaacctcagtttccttatcaataaaatgccagtattgataccttacacttaattgtgaagattaacttacagataaaacacttatttttataagtgctt

SEQ ID NO: 12140 - DNA, 1090 bp, Homo sapiens
aattacaggcgtgcgccaccatgcccagctaattttttttgtatttttagtacagatgggctttcaccatgttggtaaggctggtctcgaactcctgacctcaggtgatccacccacctcagccttccaaagtgctgggattacaggtgtgagccaccacgccccacctttaactcattttaaaatctgcaaattttcctaaaactgaaagtacattttattattctgaattttaattttttcctagttttatataaatgactccagggtagttatacttttgctttccttacctattttagaatactacctcaaatatttccttttttttttttttttttttgagatagagtctcactctgttgcccaggctggagtgcggtggcccgatctcggctcactgcaagctctgcctcccaggttcacgccattctcctgccccagcctcccaagtagttgggactacaggcgcccaccaccacgtccagctaatttttttgtattttttgtagagacggggtttcactgtgttagccaagatggtctggatctcctgaccttgtgatccacccatctcggcctcccaaagtgctgggattacaggcatgagccaccacgccctgccaaatatttcctttttttcctcttctgaacacatttgaaaatgtttcagataacttttcattattaagatatatttgctccatagccttcttcctctcttttcacacataacaatcacttctatactgtttagtcagtcgaccaaccaatatttgttaaatacctaccttttgtgagattctgtggctggccttacatgggtgaaaaagtagaagacaaagtccttgccttccagttgattacagtttcgatggagaaacaatatgtacataactatattgcaaggcccagtgttataaataacttaatggtggtgctgatcataaaaaccacaaaaattcaaagaaggaaaataatgttttttgacctcttcagccttttaaaaatcctattccttgcctagtcgtttgtaaaccacacagagctccacgggggtcttagtacctcttggggaaatctcgtgcta

SEQ ID NO: 12141 - DNA, 1137 bp, Homo sapiens
cctttgctttttgatccttcactaacccttgaagatcatttagtcaaagaaattgctgaagacccagtggatattttggcaagtgaagaacagtcccacctgtttccctcatgtagtgacctggccaggcagagggttccctgctagatagcatgtgctcctggaggggagtggggtgtcatcactagtataaagatgctccacatgtctctcacttattgaataccatataagcaaagcacttttaaaaatgccctactctgctcctgtgtacccttgttgctgtagttctccagatgggctcttagaacacctaatggcccgtgatcctcatatcccagagtaggacatacatttatttaaataaaagcttgagacaaggaatctagggaaatcataccttctgagggagagttcatcactgaaattgttctcattgtagaaggaccagtaaagtaatgtgatttgagttctgtccgtgagccttgggtagaattccagtggccctgactgaagaccagcagttgtactgtggctgttggtttcaagcagaggcctaaaggactgtcttcctgtggtctgttggctgttctgggacctcagtagggaatggctatttcatttggaagaaacaacctacagctcaccatcccattggaagaggctcaggaataggctcttccaagggactaggatagctaatatgggaagagcatctgtccagaattaatttctgttgtattgttcttattgctagtttaagtggccactgataagtcagattcatacttcagaccacagtgaatgaattactaactgaagtgcctttatttcttttaacagggccagatgcagatggctggagatgggtgcagatcccagggatctcgaaattctgagaaagcctctgcaccattgtctcagagtggattggctactgcaaatgggaagccagaacccacttctattagttgatagtttggggaaccattttactttggtggatttaaatttctcgttcttcaaagaagtatttctgatcatctctcacaaaacacaggcaacccagactaccttgtttttcttctggattgagtattatagtcaaacgtaaagccaaattttgaggacgtggac

SEQ ID NO: 12142 - DNA, 1053 bp, Homo sapiens
tgttagcatattcatttagagaaatctaccctaccttatatttttttccagactcttcccatacctttttagggatacaatttacatactataaattgcactctttgaaagtgtataattgagtgatttttagtatattcgcaaagttacgcaactaccaccactatctaatttcagaaggttttcaccatctccaaaagaaactcagtacctattatgacactcttcattttcttctcccctcagcccctggccacgatgaatctactttttgtctctgattttgcttattctggacatttcatatcaatgtaatagtatatgtatccttttgtgtcttgcttgtttcacttagcataatgttttcaaggtttatccatactataatatgtatcaatacttcattcctttttgtgactgaattaatattccattgtttggaaataccacgctttaaaaatatatcagttgatggatatttgtgctgtttctactttctggctattaaggaatatactgttaagaacttttgagacagagtttctgtcggtggcatgagccaccacgcccagcttagttatcatttttataacttttttttttttaaattggggtcttgctctgttgctcaggctggagtgcagtggcatgatcatggctccgtgcagcctcgaactcctgggcttaagtgatcctcctgtctcagcctcccaagtagctgggactataggtttatgccaccatgcccagccaattttttattttttgtatagatgagatctccctatgttgcatgggctggtcttcaactcctaggctcaagtgatcctcttaccttggcctcaagtgatcctcttaccttggcctcccaaagtgctgggattacaagtgtgaaccactgtgcctggccactataacttggcttttttttttttagactgagtcttgttctgttgttcaagctggagtgcagtgatgtgatctcagctcactgcagcctctgccttcagggttcaagtgattcttgtgcttcaccctcctgggtagctggga

SEQ ID NO: 12143 - DNA, 1044 bp, Homo sapiens
ggctcatgcctgtaatcccagcactttgggaggccaaggcaggcggatcatgaggtcaggagatcgagaccacaatgaaaccctgtctctactaaaaatacaaaaaaaaaattagccgggcgtggtggcgggcacctgtagtcccagctactcaggaggctgaggcaggagaatggcgtgaacctggggggcggagcttgcagtgagccaagattgcgccactgcactccagcctggacaacagagcgagactgtgcctcaaaaaaaaaaaaaattttttttccagctttgttataatcttatgggaccaccatagtatgtatggtcaatgattgattaaaaagtggttatatagtgcatgactataattagatttatttctgtcttggtacctggattgggggtcatttgcttttgaaactgcctatcttatgcccaaggattttcctgtttacttgttgacttggagacgtaaccttgatggattgcttggcaaataacatcttgactcttgtaactctaggcagtagtctcctgactggcccagagggacttttggccaaagaacgagagaacttaaagcgattaaaatgtctgcgacgataccgccagcgctatggagtggaagccttactgcataggcagttgaaggaacggagaatgctggccacagatggtgctgcccaacaggtaatttgtgtgtatacctttaaggtatatacgttcactttatttattgtttttattttttcgagacggagtctcgcactgtcactcgggctggagtgcagtggtgcgatgtcggctcactgagatctctcaacctctgcctcccagtttcaagcaattctcctgcctcagcctcccgagtagctgggattacaggtgcccaccaccatgcgcccagctaatgtttttgtattttttggggtttcactatgttggccaggctggtctccaatgcctgacctcgtgatctacccacctcggcctcccaaagtgttgggattgcagacatgagccaccgtgcctgttcatgttcac

SEQ ID NO: 12144 - DNA, 1050 bp, Homo sapiens
aacctctgcttcctaggttcaagcagttctcccacctcagcctcccaagtagctgggattacaggcacattccaccatgcccggctaatttttttatttttagtagagggggggttttgccatgttggccaggctgctctcggaactcctgacttcaagtgatccccctaccttggcctcccaaagtgctgggatttcaggcatgagccactgcgcctggcctataagcttttttttaaagagacagaatcttgctgtgtcactgaggccagagtgcagtagcgtagtcctcactcactgcagccttcaactcctggactcaggctatcctgcctcagcctcctgagtaactaggactacagatgcaccaccacactcagctaatttttaaatttttgtagagacagggtctcgctatgttgcccaggttagtcttgaactcctgggctcaagtgatcctccgaccgtggcttcccaaagtgctgggattgattacaggcatgagccactgcacctggcctttataaacttaaaaaaatttttaagaaaaacttctggactctgtaataacacttagcttaaaacacaaacactgtacagctgtacaaaaattttttttatatccctataagcttttctagttttaattaaaaaaaaatccttttaaacttctgttaaaaactaagatgcaaacacgtacattagcctaggcctacatgggcctagtgtcactgtctttcacctccacatcttgtcccagtggaaggtcttcggggacaatctcatgcagcgaactgtcatctcatgataacaatgtcttctgcaatactttctgagagaactgcctgaggctgttttacatttaactttttttttttaataaatagagtggagtacattctaaggataaatatagtaaatatataaaccagtaacatagttgtttattatcgagtattaggtactgtgcataattgtaggtgctagatttttttttttttttttgtgatatagtctcactctgtcgccaggctggagtgcagtgtgtga

SEQ ID NO: 12145 - DNA, 1054 bp, Homo sapiens
gtaattagcatattcatcagctcaagcatttagtgtttttttgtgtgtggattttttttttaaaaagaagaataaaaaggtattcaagagtttggtttcatgcctaagaaagagaaaccgatttagaaacccaaaagtgattatatcttaatcaggtttatatcttagtaagcttctgctcttcacttaacccatcatcaccgtaggagttgtagaagcataaaaacattaccactctggagtctcatatttctgtgtctcaaggtctgggtgtagtttttaaaaatgtttgcctgctgacttctgtgtcttaacactttgtactgacagtttatgtaaagggactgtaaatagtggaaggggtaatttctagattgactattgggcttttgttcttgcaatagcattttcttcattactttggattctttggtttataagaagtcatttagggttacattttctcctgaccctgcttagcttctgagatcagaggaggttgggcatgttccggatagtatggccgtatgttagggttacgttttctgagtagaataatttcatccatttctattgagtaatctcactgtggtcaactattcaggaagtactagtttagaaaacccatctaagtagttggaaagggaatgactgttctcttgcaggattctctcacaaatagtaacttaaaccaacatattcattccttttttttttttttttttttttttttgagatggagtcttgcactgtcacccaggctggagtgcagtggcatgatctcagttcactgcaacctccgcctcccaggttcaagcaattctcctgcctcagcctccctcccaagtagctgggattataggcacccaccaccacacccaggtaattttttgtatttttagtagagatggggtttcaccatgttggccaggctggtctcgaattcctgacctcgtgattcacctgcctcggcctcccaaagtgctgggattacaggcatgagccatcaggcccagcttcattccttttttttccattgtggttctagatggcc

SEQ ID NO: 12146 - DNA, 1047 bp, Homo sapiens
tgctgttagctgaactgtagtgaagcatcgatccaaatcggtcttctgaagtatcagttatgcttttgagtttagaaaatacttaggtgttagtctagtcttcccattcatgaatcagtgtatgtccatatcagagagcctcaacttcttttttcttcctttttaaaaatgattttagtgttttgatttagtgtatactacatagttcagtattattggctttaccagtgttgacagaaaaattttaaatctccagttgcaaacagcaatggattaggatatggaaataaaatcatggtgacatcactgctgagttatcttaaacctctgctacttaattctccatattgaaatgcatactcctccacatacatggcttccaagtaaaggcaattgtagaggggccctgtctatcccagtatggttggattttaaacatatctgtgtttccgttattttgggaactgattaatatttacaattttttttgtttatgagttattttgatactaagaaaagagagaatctagaacatcttgcagttgaaatacaaattttattcttttggtcttgggagaatttaagcagtctatgcaactcatcaaatggtgagaaatagccctccgaggttccagtaagctttcagtgactttgatacctccccaagtttcttgagttgctgcttgttaacacccagcttttaactgagtgtttgctcctgatggtttaggagattttcatgttgtatcacactgtcaagttttattttgtctttttatccctccgtggatgtgagtttgaaacaagcacggtacagtaatcctgcctgatagagtagtctggaatgagaattactttttgggtgagagagttctccattttaatgtttctaaagtttttcatatgaacttggcattggaaaagggaggtaaagaaaaaggacgtttactaaaagcagtgtctactcttcccctttgtgagtgtttattcatggctaatgaaaaaaagagaaggactcttgggttttgtgttgccatgttaagcatg

SEQ ID NO: 12147 - DNA, 1029 bp, Homo sapiens
ggagcttgtgaatttaacagtactggtgccatgagaatgagcaaagcctagccaatggatactattgtgtttagattgttcatctttggtagctttaggttcttgatcgaggttcttaagatttctaagtcctttataaaaataggtcaagagtcctgttgttatggaggcttgattatcccagatattaggagtgaacatttttaataaatctttcagaaaatcttggctagaaagaattctaagttagttgtctaaccactgaaaactacctagccagagatcatttaatgagatattctttgatcttcattgcattttttttgctctggaaaaggtggttcaatttgagtttgttttcatgatttgattgcagcttacttcatgccaaggattttttagggagaggtcgaattatttttcatttggaagtcatagggagacaggagttgtacttatgctgctacttgccaggaacaggttgggaagaaaattgtggctgttggaattgatgatgtactggcctaatatagaaaggaatttgtaggcaggagtaaacgttaactgacggtgggttagtgccctgcatcttgcatatttgaactgtctagagttcctgccattgctgggtataaaacgaggagctctctgttgacctgtaaatcattaatacttcttgacttagagtgtcacttcactttatagatgacattttcctctttccccttgatattttctatgttgtgttagataattggtagatatatagttgtggtttagtacatttagggcttctatttatttagattttgtttgttggagtctgtttccaaaagggaatgtgccatttagtctgcatctgtatctttgtggacttgatgatcactggtttgattttgaaaaatgtcttttccagcttttagttactctcatcaaatgtcacatattttctaatcacatgcactcctttaccacagaggcacataatcatttggcctcatagcagttatccatggccgtactgtagta

SEQ ID NO: 12148 - DNA, 1201 bp, Homo sapiens
ggctgtgtttgatcatccagccaagattgccaagagtactaaatcctcttccctaaatttctccttcccttcacttcctacaatgggtcagatgcctgggcatagctcagacacaagtggcctttccttttcacagcccagctgtaaaactcgtgtccctcattcgaaactggataaagggcccactggggccaatggtcacaacacgacccagacaatagactatcaagacactgtgaatatgcttcactccctgctcagtgcccagggtgttcagcccactcagcccactgcatttgaatttgttcgtccttatagtgactatctgaatcctcggtctggtggaatctcctcgagatctggcaatacagacaaaccccggccaccacctctgccatcagaacctcctccaccacttccaccccttcctaagtaaaaaaagaaaaagaagaggagaaaaaaacttctttaaaaaaacacataatttttcttttttttttttggactaagaaaattacttatgaaatatgtcatccttggactagggaataaattgatattgagacatagttaggagggtggtagaaggccttggctatatatctgctgtctcatgcatttaactattttcttacagtttttactggtattagagaggtgttgaagctgtgaaggattaaggacacattctgaattcttggcctctccaccatctaattaggttgattggagttgatatcttccctcttcttgccagagctgaaaaatggagggtttcttgtatcagacaattgtggatcctttcggtgtttaatatatcagaagagaggaagtatttaaacgtcaaatcttttaatagacttaataatttaaagaaagtaagttatctgtttagtttttttatataattgggaaggggatagggattttgctgtgtgtatatgatacatagcagtaactcctggtgggtgggattggagggtgggaatgtgtgagggtgggtgggaggctaggtttttggctaggagttctgaaataggctcaggccacttttttcagacttttaagtgtgtatgtaagtgtgggtatgtgtgtttttaagtgtgtgtgtttaaaaataatgttttatcttccctccctgttccttaccgttttcattttccaacagtctactagagaaaaacatggttggccttgagaa

SEQ ID NO: 12149 - DNA, 1046 bp, Homo sapiens
taatatattacattatttgatgatttggggattaattaattaaatcttaattagggctacttaattaaaaacttttttttttttttgagacggagttttgctcttgttgcccagggtggagtgcagtagcacgatctcagctcaccacaacctccgcctcccgggttcaagcgattctcctgcctcagtcttccgagtagctgggattacaggcatgcgccaccaccccagctaattttttatttttagtagagacggggtttctccatgttggtcaggctggtcttgaactctggacctcaggtgatccgcccacctcggcgtcccaaagtgctgggattacaggcgtgagccaccgtgcccagccttaattaaaaactttcttaacagcaaaagtcacttttcccaaatatgtcaaagtcttctagattctgatcttgcttctagatcatcttagttcatcctgtagtttagtgattctcagtgaatccttacatcagaatctctgggttacttgttaaaaaatgcttgcacccttctccaaacatttaattaaattttagggagcaggtccaagaattgcatttaaacaagtacctcagatatgtggtgtgcagaataaagcttgagtacctagatctggaagcagcatagttattaatgttaaaattaaaaatcattgatctgtctactttggcagaatgtaaacgtcaggtttacagggaccatgtgtgtctcatttgccactatattcacagtaccttgcaaatattaaatgcttactaaatatttgttgagaatgaatggaactaataacttttttcctcccccacccctgactttttttttttttctttagcaagcaaggacttagcacagacttcttacttcatggcaaccaacaggtttatattttaatttttttttctcttcgatttttggtataggactttacttgagtttgatacagtgtgctatagataattctctggtgaatgttgatttttctgcacagttttcatgttgtactttaaatttccatggta

SEQ ID NO: 12150 - DNA, 1031 bp, Homo sapiens
ggaaatggctaggggtgagccaggcctccccctcagttttacccaagaggaaactgaggtcccaaagtttaagtgacctgcccaattttgcaggactagttctagttcaagttagagcccagaacctctggcttccaggaagtgcttctgctgtttctctcccttctccttaaaccagagccctgccccatccaactctggggtggagccgcaagctccaggttaattcctgagtttccagaaacactgaggccagcttcccttagacttgctctctagccagtgccgctgatgatgattgggggctgaacattcctagggtggggccctaggcctagggcctggcagggctgagtgtcagagggagttacaccttgaggggtggccaggcatggtggaccccatctccaattaggggacatcctttgtatcagtagaactgatgactctcaagccagggctctgaggttgggcttgagagcttgactcagtagagtgagtaggaatcttggaaacctggaatgcactacaaagtatggaatgcagtagatagatagtaggattaggacacaggatttggaatctgattgtcctgggttcaagtctcacactagccactaacagctgtgtgatcttggggaagttacttggcctctctgtgcctcattcccttacctttaaaatgggatattgttacctatttcacagagttttaagaaatgtgttaggggccaggtgcggtggatcatgcctgtaatccatgcccgtaagcactttgggaagccgaggtgggcggatcacttgaggtcaggagttcaagaccagcctgaccaacatggtgaaaccccgtctctactaaaaaaatatacaaaaattagccagtcatggtggcaggtggctgtaatcccagctactctggaggctgaggcaggagaatcgcttgaactgggaggcggaggttgcagtgagccgagatcaggccactgcactccagtctgggtgacagagcaaggctctgtcaaaaaaaaaaa

SEQ ID NO: 12151 - DNA, 1079 bp, Homo sapiens
ccagattacatccaccgcattggccgcacgggacgagcaggcaagagtggggtggccatcaccttcctcacaaaagaggactctgctgtgttctacgagctgaagcaagctatcctggaaagcccagtgtcttcctgtccccccgaactagccaaccacccagatgcccagcataagccaggcaccatcctcaccaagaagcgccgggaagagaccatctttgcctgacacagcactcttcctgtgggctgagggcatctccaaagctgcctgatgcctgtttttcagaaccctcacatccctctttccaggtcctcactcttgggatatgggggcttaggaaaacaatccaactccctagcccagaccctcaggtcaggaggcctgcgtgtggggctgcaaaaggagaggacgacgctgtcggaggcagggagagcaaattaccacagcttcttggcccagttctgcccttctttgctttgggattgcactgggccatcagctcatgccaggctatgggggcagccagttggcattgctccccagactgaacagaaacctggccgccggatgggacctcctttggcacagacttgactgtgtaactgcataaactgcagtagcatcattgccctagatgccccaggagacctggcaccatgaggattacagacagtggaatcttactgtcatctggacagctgttttcctgtttggatggtaaaggaagttgagagtctttagacctgtgcacagccccgcaccaaggggtgctgtatgctctaggcatcccctcccccaggggattttctaagtagatggggggacacggtgaactggctgtgtccatctttgtcactgagtgaaatctctgttttctattctctgagaagataagtttgtatgttctgagaataaatacatgaatattaagactgttagatctagttctagttaaacttcccagcttctccctggcaggagggacaccactgggtgcggggtgggttggcttggaaaatgagagacagccacattaagagaagagtagaggggtctctgctgatagtcttgagtct

SEQ ID NO: 12152 - DNA, 1072 bp, Homo sapiens
tccagcctgaaaaaacatatgaattctgtaggggacatagttcagtccataaccgagtccaaggcctatttgtgttttcctcaacaggcttaatgcctgagcaaatacttttgggttccctgccatctccccatcagtgatgtgattgtaccctgctcccagatcctttgttgacagttccaatctcttttgtagcccaagttcctctctaaagcagaacgagaggctgaagctctaaagcgacggcagcaggaggtggaagagcggcagaggatgcttgaagaagagaggaagaaaaggaaacagttccaagacttgggcaggaagatgttgggtttgttattctaccctgtgtagcccctagatggaagaggaaagagtgggatgagatacagtgtctcttaggagagatagaaacctgttcactctggagtttggaaaggggaaggatggtgggagtttatgagaaaacatttttctgttagatctccatttaccccatatcataagtctacccctttttttcttcatttggggttcctcgtctggattccctccattccctctcctcttttcttccatgagctcttctgcagctttgctttctttggtctgcagaagatcctcaggaacgggaacgtcgggaacgcagggagaggatggaacgggagaccaatggaaatgaggatgaggaagggcggcagaagatccgggaagagaaggataagagcaaggaactgcatgccattaaggtgcaggccttggctccatcttcacttctctcccacacaaaaatgaggtttagttatttggccattgtgatctctgcatgtgagaattgggcctcaaagctcatgtgctttgtgttctgtccctgggtaggagcgttacctgggtggcatcaaaaagcggcgccgaacgagacatctcaatgaccggaaatttgtttttgagtgggatgcatctgaggacacatccattgactacaaccccctgtgagtggcttcaggcctgagttctaggtcttttccactaggcagtcctagagagctgatgactacggaggtggagg

SEQ ID NO: 12153 - DNA, 1051 bp, Homo sapiens
tacatcctggaactttctccacagatcttctactctgttctccaggtgcagtcttagaaagtgcttctcttctaaattctagcaagtgaccccaaaatagcaaatgtttggaattaccttattagtgccctttcacttctaccagcaatcccaccctcttgaactgtttgtagcatagtttagtacagaggtctcccatgaaaatgcctacacaagaccaggcagatgatataaatatgttttgtgggccgggtggggcctgtggtgaactggagaggaaatgctgcatttgggaggaggaggggcagtcactgagctccacgtgagccttgccatttggaaatgtggcccagtgttgccagatctttaaatttttcaagggaagctgaaaatttggatgtttttgtgaaatctccaatttttaagtgtaggatgcttattcaaaaaattgtataaaacactgtggggtaaataaaaacaaagaactccatacccaaacctaggtctgtgggctggctaagattgcaacctcgaggacagtggaaagcactttggatcaaggggcaggagacctagattctcctgattctaccacaaaccagcagcatgactttggcaggtcattttacttacttgtgccttactttcttcatctgaaaatcacaggggtgaagccagatgatctccttggtgctttttagctctaaaatgcattcccttgacaatttagaatggtcctccctcccaaccaattttcacaaaattacaaaaagcattagggatacctacagggggcaatagatgttttattgactgtgttggctaaaggggtctcttctacttctagtagccttgagcatttttctttttttctttttttaatttttttgagacagggtctcgctctgtcacccaggctggagggcagtgttgctatcacagttcactacagcctccatcttctgggctcaagcgatcatcctacctcagcctcttaagtagcttggaccataggcacacactaccacgcctggctattttctttcttttt

SEQ ID NO: 12154 - DNA, 1023 bp, Homo sapiens
atagcaacatccctacatttctcaaaaaaaaaaaaaaatctctaggagttgaaagatttttttccttagatcacaggttgtggaagatcatctgggctgcttcaattatattttaagtggttggatgttgtttatcacctggatgggctatacgtatggacaagggctggagtaagttgctttgatagttgactataaagagtgggttgagctggctcagcacttcgtcactcactgagatgccatccaagtactgcttcagcatctcccgcagcttcccattgatatctagcagctgggctcgtctatgttggaggctcagttgctccagtttcactttgttgtaccttttccagaaattctccattcctatgtagtccaccatcacctgggagtggagttacagggagaaggtgtgcagcgagacccattagcaaatgctgcccaatgccccaccatcccccgggctttaccttggtgagctcctcagtaagctcttctagattattcttctgaatcccctcctgctccttaggagtcaatactgatgaataaaaaggcagcactttttcttcttcggtttcaaatttcctacatatttcagcaagtttaaggatcttttcaccctatttgaagcgggaagagagtttatattaggaaagggagtgaagagggaagctagtggagttggttcccctgtttgaacccagggaagctactcatccaagtgggaaacaatagcaataaatacatatagcaaatggaggttaccatgtaacacacactattccaagtattttcttattgtaaaattgattcatagcctgggaaacatagaaagaccccatctctacaaaaaattatttaaaagccaggcatggtagcacatgcctacagtctcagctactggggaggctgagatggaaggatcacttgagcccaggaggcagaggctggagtgagacgagatggtgccaccacactccagcctgggcaactgagcgagaccctgtctcaaaaaaa

SEQ ID NO: 12155 - DNA, 1072 bp, Homo sapiens
aaaaaaaaaagaaatctggtggctcacgcctgtaatcctagcactttgagagaccgaggcaggcggatcacctgacatcaggagtttgagaccagcctggccaacatggtgaaaccccttatctactaaaaatacaaaaattagccgggcgtggtggcgggtgtaatcccagctacttgggaggctgaggcaggagaatcgcttgaacctgggaggcggaggttgcagtgagtggagatggcaccactgcactccagcctgggccacagagcgagactccatctcaaaaaaaaaaaaaaaaaaaaaagtgaagtctttacataaatggattacgtgtgctgccctttgagaagtttgttgatgaaaggagaaaggaaatagtagcaccagaggaaaagatcagggatttaccctgttcttacaggataacagctccttgctcttttcagctagcttttcaaaggacagggataggacagccccctgccttatttcggatacttggatctataacctccagaaattcaagctgaagtagctggaggtcggagaggaatgagaactgcctgggtggggtctgccagccagacactgccaggatagccacaaggagacgacttggaagaacagacagcaaccacgttggactcaggcagtcctgggtttgaatcctgtctctgtcaccacctagcctgatgaccttgggcacatcctgagcaccctgtgccttatctgtaaaatggaaacaatcatgccgacctttcagggtggttttgaggattagagactagctcctgacacacagtaggtaatcgtaaatgggtgctattgtttggcccgacccacgttataggacagaacgtctaacggatgcgtcagaacctgcgccctccggatcttggagggtacagagggcgcccctcggcctcctccctttcggaggtggggacaaggtggaggaagggctgcaggaggaggagctctagcatcgcgacccgccccgtcccgtccagtctggcctgggcgccgcgggaacgctgtcctggctgccgccacccgaacagcctgtcct

SEQ ID NO: 12156 - DNA, 1046 bp, Homo sapiens
tgcttctttttgcttcaccatcctagcgtgcagcttccatcctcatggtcatctcatggtctaatatggcttctagagcttaattcatctcatctgcattccagatagcagacagaaggaaggaaagatgattagggggagagagagcagcacagaaggacgctttctagttaactctttaaagggccttcttggaagtccaggacaatacttccaacacttctgtttatgttctcttggccagaacttagtcaactggccatatccagctttaagggagacttggagttttgtggtttttttgtttaacttaaaaaatatcttgatacgtaattcgcaaacagtgaaatgcacagattgtaagtatacagtttgataagttctgacaaatgcatacacccatgtaacccacatccttctgaaaatatagagcatttcatcacccctagaaattccctcctgctgaggggactttttttttttaaacaatacaaatgagagataatgaaggcttcttatcctgaggtgggagggttgtagctatgggaatggaagggaagagctggagagactttggaaggagaatccagagtagacccgttggatgtgggagatgagagaagaacgaatgctggtagcagagccactaacagaaacaggagatagggaggaagtctaggttgttgcaggtggattggaagaatgagtacagttaagactgttggctgggcgcattggctcacgcctgtaatcccagcacttcgggatgctgaggctggcggatcacgaggtcagcagtttgagagcagtctggccaacatggcgaaaccccatctctactaaaaatacaaaaattagccaggcgtggtggtgggtgcctataatcccagctactcgggaggctgagagaaaagaatcgcttgaacccgggaggtggaggttgcagtgagccaagatcgtgccattgcactccagcctgggcgacaagagtgaaactccgtctcaacaaacaacaacaacaaaaacttttaaaaagtgggctgggc

SEQ ID NO: 12157 - DNA, 1044 bp, Homo sapiens
agtgaatgtcctttaggaatgttcatagcagctttctgtacatggactgagctacttcgaaaagtaaagtttcttgttaatggggatgaaagtcccttccaaatctgagatgctttggtgaacaaacttggtgaaagcatgaaagataaattgaagaacagatagatttgggccaaggaccccagtttaaacaacgttgcagaggtgagaggtaaaagcctaaattaaggctgtgatattggcaatgagagagatggatctgagacatttctaacataccagcttagctgataagtgttaagaagacagctgtgcaaaacaaaaaaacaagatgggaaccacagcgagaataataggattggagggacaaatgttttgtttcgtattcaagcatttgaggagtctctgtgacatctatggttgtcaaacaaataattggaaatgtagatcagaagtttggaagaaattgcgagtctatttgtcagatgtagactgtgtctctgtaatattttgtacttgcgtggtacagtggtactttctcaggtcccttatgttattaaaagtagaaaggaggccaggagcagtggctcttgcctgtaatcccagaattttgggaggccaaggtggccggatcgcttgagcccaggagctcaagactagcctggtcaacatagcgagaccccatctctacaaaaaaatacaaaaagtagctgggcctggtggtatgttcctgtagtcccagcagcccgggaggcagaagtcggagaagctggggaagttgaagatgcagtgatctgtgatcatgccgctgcactccagcctgaatgacagagtgacaccctgtctcaaaaaaaaaaaaaaaggtagaaaggagtagatgtaattacataatcccccctctgatatggtgaaacaggcagaaagttaaaagtcacggccaggctcggtggcgcatacctgtaatcccagcactttgggaggccgaggcgggtggatcacgaggtcaggagtttaagaccagcctggccaacatagtgaaacccc

SEQ ID NO: 12158 - DNA, 1033 bp, Homo sapiens
atggtaggggggtgtggggcggacacatggagctccccttgtgggggggccccctccattacccgacctaccgcccttttcctcaccccccaccccactccccaccccctggctgtgactgctgtaagatgggggtatagaggctgggcaattcccaccccctgttgtatagttggactatgttataacgcacaaaagagagctgaccccagggggagccagagggtgatgggttccttgcctccctttccttcccctttctgcccaagcttgtgctgcagttgaacctcttcctgggggtgggagtaggtaaggggtgggtgaggccccaaacccctctctggtagggaaccgtggggatgaagatgaagcttatatgcagttctcttctaggggctgtgggcaaagggcattttgtaattaatattttcaagaatcagatgtctggagtgtaggggtgggcttggtggtggtggacgggcgggcctgctggagggggagcttggtcgctgttgtgattttaggtttgtttttgttttgttttgaatttggggggttgtggattgttgggggtagggagattttttttttttaaagctgcttcctcaactgtttcaagctgcaaatgtttaagagaataacagcccccactcccacaggaaccgctgtaattaaatcagacagtaggaagactgggctgctgccctcaaagccacagcccttggatgttccttttccgagagcagaaggtctaggctacagggagggggagattggctcccgtgagtcaggctgtgtttggggcttgggccctgggattgggaaaaggggatggggcagactttgtaagcatatgctaggtatccgatagtcctgtagaatttagtgaagaaaccttatacagtttttaatttttatataaactataactcagacccaagctacaaggttggaattttggttggttttttttttaagtaccctgcctgtataattgcatcagaatcccccaccccaccccccgcccccgtgt

SEQ ID NO: 12159 - DNA, 1045 bp, Homo sapiens
tgggggcgcggctttctgccctttcctctccctgagccggggcggctgaaaagcgcctttgtggccggagctgctgagtccgcttctcccagcgcgttcccggcctgggctcaggattctcgctcggttaagtcatcccggataatggccattgtacttcgcgcaacccccgccaccccaatcctttttccagcagccttgatcccgcacagctcctcttgggcacctctctggggggcacccagagcacgaaggggttaatgctaagggcccaaaggaggaggaggaaggaaggaaggaagcgatgcccggtgccagggaaggcaatgaaacaaaagatgaatcaggcggagggaggggagccggtgcctggggcgggggccaggctcaaacaggggctctccgggagcaaccaggccctccctgaccacgcttccattcgccctcctaactctgtccttctcccaggttgagccgctgtccctgaaccaataggggtgagggacgggcattaaaaatggggaaggagctaggtatgggcaccccctctcaacctcagaggtgagcccacagttctccaacgacgtcctgggaacagagtgcagattggtgactaccatcgactcagattctcatttctccaggacactcaaaagctgggaggggtaagagtagggccggaataacaaagaatcaaccctcctatccaggtcccttttgccccaagggtggtggtggggagactgactcctttattccccgccagcgttgtaaggagcgggtgaacgctttggccattgccgtgatgaacatgtggcccggagtgcgcctacgagtgactgagggctgggacgaggacggccaccacgctcaggattcactccactacgaaggccgtgctttggacatcactacgtctgaccgcgaccgcaacaagtatgggttgctggcgcgcctcgcagtggaagccggcttcgactgggtctactacgagtcccgcaaccacgtccacgtgtcggtcaaagctggtacagtaggaggaggg

SEQ ID NO: 12160 - DNA, 1896 bp, Homo sapiens
gcccctggggccctgactagaaggaagtacctgggggatcagaacagaacatacttccagatggaacccttggaagtatggagccttatcttgaggaagtgatggcctggaattaacagagaggcccttggggctgtggagtgtgctgaaggttagagcttctcatcccagctcatattctgctacagatatcaacacttctgtttgcaacactgtacatcctctgccacatcttcctgacccgcttcaagaagcctgctgagttcaccacaggtactttgatttccctccctcctgctagagtccctgttgccatggaccagcctcaggggaatgggcctatggtacccactgggaaaggagcagtggctgtgtggggctgttctggagcctttgcctcttcagcctccctttctgcaagataggggcaagggcggctagatggatgtgtctgctgggcaagtcatataacatttctgatcctcagtttcatcctacaaaatgggcgtaacaatgtctacctactccattgtgtggaccaaaggagatggttaatgtgaaagccctttgtgaacctgaagtgagcaactgctggatgaatgtcattacgggcacaggctctgtgtcatctcctctcctagtgcttccacagccaggaccagagacctccctgatgactggggaacctggtgatggtggcctttctctttatggggagcctgagtatgctcagatcgcagctttccttccctagacattgtgtaattgggggtgggggcacacttgccccagttcctagctccagcctttcctcctcttaggatggctcaggatgagtcccccctcaacaaggcagctacccaagagtaattcccctggggactttctgtgtgaatctccccttccccctcctctcttttccctttcctggacccagccactgatgtaaccaacctcacagactagttgtttattatattaatagtttgagcatataaagaggaacttgtgatgggagagatctagggaggagtaaagaagtataggaatgtctggcctgtattctcttcacctgggaccactgatttttaagctgccaccttggctggagaacaggctatggagttcataatgtgtggtctcctggagcctcctgttcagctctgccttctttgagggggcagggatggggcagggagcacattgtaatactaacggcctcagagctgccccctgatgtcctcctgcctgttccccgtgcctctgtctcttacagtggatgatgaagatgccaccgtcaacaagattgcgtaagtgtccctgcctcagcacctaacatcagtggtctttaggaactgggatctagggaggcctggagctggagggagaagggggaagtctcacacagtgaagagagagtttctgtttccaccccatttctggcttccggctttacctcaccctggggatgctcagaaaagctgctgttcctgtcttcctggttaggccaggagcttgtgggagcctcatggccaggaacgtccgctggggcctgagtcaccggaaatggctccagcttggcttcacctcccagcgaccaatagggagggagtggagtggggatgcacattgatggaaaaagagcagggtgtggggaaggtgggaacccctgagggaggggcatgcttggttctgggagaaaggcccatattccaggctgccagtgttcactggtacatacagaaaaagatagagatatgactcctttgagtcaatagatcagaaggcagccctccacccttgatggaccaaagagctagaagtgcccatcttcaatatatgcagcccggggcatagaccttggctatgaagctaggtttcagttccctcttgtcc

SEQ ID NO: 12161 - DNA, 1071 bp, Homo sapiens
gttgccagagctggagtgcagtggcacaatctcggctcactacaacctccgcctcccgggttcaagcaattctcctgcctcagcctctcaagtagctgagactacaggtgcatgccaccacgcctggctaatttttgtatttttagtagagacagggtttcgccatgttggccaggatggtcttgatctcttgacctcgtgatcctcccgcctcggcctcccaaaatgctgggattataggcgtgagccactgcgcccagccaatttttgtaattttttttgagatggagtcttgctctgtcacccaggctagagtgcagtggcgccatcacagctcactgcaacctccacctcctgaattcaagtgattctcctgcctcagcctcttgagtagctgggattacaggtatgcaccaccacacccagctaatttttgtttttttagtagagatggggttccaccatgttggtcaggctggtcttgaactcctgacctcatgatcctcccactgtggcctcccaaagtgctgagattacaggcgtgagcctcaacgcccagcccaatttttgtatttttaatagagacggggtttcaccatgttggccaggctagtcttgaactcctgacctcaagtgattcatctgcctcggcctcccaaagtgctgggattacaggtatgagccacagtgcctggcggagactctctgttcttgattatagagccaagctggccaatggctcctcctctgggcagcagcagcttacttggagtagagtaggaatgaatatgcagattaacctggctgagttccgccatcactgtcacttggcagtccagccagctctagaaacactatagatattgggccccagctaaagcccactgttaggggtagaggattaaatgagactctggtttggcccagagcagacctgatctttcaggcccctgaataagcatggaatagaagttgtgacttggtctagaaacatgacaccttctttgggtcaaggcagcagtgtgcatggaggtaggagggtggggtagcaatggggtgccaggacaatgc

SEQ ID NO: 12162 - DNA, 1050 bp, Homo sapiens
tgaccctcgccatggtaaatacatggcttgctgcctgttgtaccgtggtgacgtggttcccaaagatgtcaatgctgccattgccaccatcaaaaccaagcgcagcatccagtttgtggattggtgccccactggcttcaaggttggcatcaactaccagcctcccactgtggtgcctggtggagacctggccaaggtacagagagctgtgtgcatgctgagcaacaccacagccattgctgaggcctgggctcgcctggaccacaagtttgacctgatgtatgccaagcgtgcctttgttcactggtacgtgggtgaggggatggaggaaggcgagttttcagaggcccgtgaagatatggctgcccttgagaaggattatgaggaggttggtgtggattctgttgaaggagagggtgaggaagaaggagaggaatactaattatccattccttttggccctgcagcatgtcatgctcccagaatttcagcttcagcttaactgacagacgttaaagctttctggttagattgttttcacttggtgatcatgtcttttccatgtgtacctgtaatatttttccatcatatctcaaagtaaagtcattaacatcaaaagctttgtttcctgcgtttttttctaaaagtgccttggtttttagattcatctatacttggagtatagagagtctggtgtcaaggatcccacttactgtgcaggcacctctagggaaaagggagctcaacagactagaaaggcaggagccctagattctcagactagtttaccacctcaacgcttgcatagggggtggggaaagtcattctgctaatctaaagctcatttagctcttcagagtaagactgggtagttactaatgagtaatgtataggaagtgtaagttttgaatatccactgagatgctgctgtttaaagtggcctgctaacttgttagtgtaattaagaaatttccaagtgatctttggctggtcatggtggctcacacctctgatcccaggcattcaagaccagcctgggagacatgatga

SEQ ID NO: 12163 - DNA, 1051 bp, Homo sapiens
agcgaggtcaagtccctagtctgaggtgcactgcctcctccagcagctccaggcacaatgcccatgtcaccctttgctgccctggttcccacttccaggagaagaaaatacactaatatttatggaatgttattaccattcttattgcagagtgaaaagtcaaaggcctgtttgggcctttaaaccccttcccccattgcccctcaaagaactcatgtgaatgcgtactgggagggggtaccgccactgaccctttcctttatgtggcctgttttagatgagcgtgatcaggcacaggatctcagcccactatcctctctcttcacctttacccagtccctcagatcttcctgccagacctggcttttgtttgtatggattcccccagctcttagtcacaattccctatcttttttttctattcttttttaatttttatgttttttcttttattccttttttttgaacggagtcttgctctgtcacccaggctggagtgcaatggcatgatctcggctcactgcaacatctgcatcctgggttcaaatgattctcctgcctcagcctcccgagtagctgtgattacaggtgcctgccaccatgcccagctagtttttgtatttttagtagagacgaggtttcacctgggttgccaggctggtcttgaactcctgacctcaggtgatccacctgcctcggcctcccaaaatgctgggattacaggcatgagccaccttgcttggtcctcttttattcttttaattccctatcttttccttccatctttcctccagcccccaacccacatgcacaaagggcagggacccacatttaggagagagtaagacgggcattggggagttgaaaattgagcagggccctgggagatgggcaccatagtcctcctcactgtaactccttttcctctccccttccgccagctcttgacgcatttggccgtggtggggagtcacagggaggggaatgttgaggaggatccctgttcagagatgctcaaagcctctgtcaacaagaaactcgggaggctgca

SEQ ID NO: 12164 - DNA, 1053 bp, Homo sapiens
gtcccggccccgcccccccggcacggagaaccaggccccgcccccgcgccgccgcgtcccgggtccgccccccggggggcggggcacgcctgctcccgcctctgactgacggtcgggggccggcgcctctgcctctccccgctgcctgcgtcctggcttcgcagtcgccggcgctccaggagccgaagcgttcacgcagtgtgtagggtgcctttgcgctgcacagcgaatttaatttgctgtgtagctcttttacagtacttttaagttagttaactccagaactatttgttgagcacctgtgaggtggcagggtctgtctcagggactgagcacacagcagcttggaaaaaaaaaaaaaaaaagacaaatccccgaaatcacgcccttgtggggcgtacacgtgcttctcgcgtgaccctgaagttcacttttgggacctggctcccactgagcgctgaactcatgagagcagggcccactctttgacagaagttaaaaatgtgaggtacatgcttgctgtgcggctgaggaaactgtaacctggagctctgcggggaatgcgctgaaggccttggggctggagagtgacaggccccaggcacacgggtgcagaaaggcgctgaccgccagcctgcaaagccccgcaaaaggcgcttcctgttccctttattcccccctcacctgagccgggactcgcgtgatgccgtgctaggttcctgagagccaaagaactccggagaggtagaaaaactcctgacacgaagagttagaggtgacacctgggaggaaaaggaagtgggattcacccttgtgggctgctgtagagagaaaatgctttgtggtttaatcaaaatgatacccacatggtctcaaatgaaggcccagctctgcggttttcttttcttatttgaggcagcgtattgatctgtcacccaggctggagtgcagtggcacaatcagggttcactgcagcctcagcctcctggtctcaaccggtccttctccctcagcctccgagtagctgggactacaggcgtgtgccacaacgcc

SEQ ID NO: 12165 - DNA, 1144 bp, Homo sapiens
ccaatgctgggtgggctgtcatgaggtcctccactagtatgaggctacagcgttttccttgctcacctattcctgccaggacctggatcttgataagtttgaagaattattcaagacaaaagcgcagggccctgcccttgacctcatctgctccaaaaacaagacagcgcaaaaagctgccagcaaggtgactctgttggaagccaatcgtgccaagaacctggccatcaccctacgcaaggctggccgctcggctgaggagatctgcagggccattcatacgtgaggctcccactgacctggctctggtccctagtctgttggcaacccagttctccacccaggagcctgggtttccctagattccaggtcatctgacagaactccctcacatccccctagtcatccactggcttggctagaatttactgcatctgtgctggcagttcagcccagaccttcacccaaggagctctcagtctattgggaacagtgcagtaacactgagtgataccaccaggatggtagaagtatacaggcagctttgggagaatagggaggttcatgtagctgagcttggtgatgaatgagggaagccttcccagaggaggtaatgtctcaactgggacctgaagaaaagatatgagttagtccagttcagggcctggagggagaagcatagtgccttgggtactaaaaattgaatctggctttagtgtagggagaggagcaggagaaggtagagagttgggcagaagtcttgcaggctggacctcgtaagccatgctcaggtgtttggacttcaccctaggtacagtgggagtacatcaaagggcttattaaacaggagcatggagtgttcccccgggatcattgctggtgctgtgacagatgatgcaatgggtcctttgcctttggctgtgttccgtgtacagtcccctgtccagttcttctaggagcttggagaataaaagggatgagggaaaacgtggagagatgtgagaactgaggtggtccctccctcctccacaggtttgacttgcagacactacctgtggacttcgtggagtgcctgatgcgcttcctgcccacagaggctgaggtaaagctgctgcggcaatatgagcgggagcggcagcccctg

SEQ ID NO: 12166 - DNA, 1026 bp, Homo sapiens
ctggggaggctgtagagtttggcaggaccagggctggaggcctagagtccagggaggtaactgctgcctttcatcctttatattcttgagtgctttggtgtggtggtggggtggtacagctgaagtgtttgcccctactctatcgaggcagggcagggggttgcctgtccttctggccaagtgttattgactgttctgtgatttcctttctgccacaggatatagatctttgcccagaacctttcatagttgactcagcccatttcaggctgtctgtttcaagttatcttctccaaacccgagctctggagaggaggatgggagggagtcaaagcaaggagagcagtcttgagctttgtctccccaggttggcagcgaagccaggcttggccttggtctgtgagagctgcagtgagatctgaccatccatctgttccatttcctcccctgtgctaccccagccagtcacaaggctggggaaaagtgtgggtgtttggaggggctgccgtacttcccatgtctggaccttttaaaattttagctcttggacctttgatcaaactctctgattttttttgattcccttttacaaaggattgcagttttgaggggagttagaaggagctgtgctggaacaatgagataaacaaacagtgacgtggaggcggcggcagcagcagtgtaggcaatgggctgggccggctggcctgccgtctgggcgggctgggtggaggaggactcccgccctgctcactggccagctggcttgtgttaaagtgctggctgaaaataactctcattgtctaggagctgctactgcggcaggactggctgtggccgccaaggggccaaggcagcaggagctggtacctcccacctccttgggctcttgccctttgggagcagggcccaactggccacagctgtgcctactgcccaccagtagagacatgtggaggccgttccttacactctgtccttttggcagctagtaatgggcctttgtgccttgtgttgcctgctttg

SEQ ID NO: 12167 - DNA, 1087 bp, Homo sapiens
agtccgttccaccctcaccaagaacactcctaggtatgcagaattggccttcctaggaaataaaaaacaactactttcttagacttcttattatattgaagcttattgaaagaaaaattgcattcgattttagctagcaactagactttaaaagggaacgtggggctataaggattccttctttaaaaaggttctgaaagtctttactatttcccctctctcgttgttggtgactaagaatacttaagcaactattgcaaaatagttgtctagggtttcctacttataatgggttatatcaagtaatattatagttgtttattcaaccattttttatagaatatttttccagttcattctctttttattgtagatttgggagcaaaagcaagtctgccactaacctaggacgacaaggcaacttttttgcttctccaatgctcaagtgaagtcacatctgcctgttacttcccagcattgactgactataagaaaggacacatctgtactctgctctgcagcctcctgtactcattactacttttagcattctccaggcttttactcaagtttaattgtgcatgagggttttattaaaactatatatatctccccttccttctcctcaagtcacataatatcagcactttgtgctggtcattgttgggagcttttagatgagacatctttccaggggtagaagggttagtatggaattggttgtgattctttttggggaagggggttattgttcctttggcttaaagccaaatgctgctcatagaatgatctttctctagtttcatttagaactgatttccgtgagacaatgacagaaaccctacctatctgataagattagcttgtctcagggtgggaagtgggagggcagggcaaagaaaggattagaccagaggatttaggatgcctccttctaagaaccagaagttctcattccccattatgaactgagctataatatggagctttcataaaaatgggatgcattgaggacagaactagtgatgggagtatgcgtagctttgatttggatgattaggtctttaatagtgttgagtggcacaac

SEQ ID NO: 12168 - DNA, 1043 bp, Homo sapiens
accctgactaactttcaactgcccttataaggtctttgctgaaaaagcaactgtgttgcacctgtactcatgcacacacactcctccgtggaaaccatacaaagtagcctaccacagggtttgagattgtaattgtctctatagtgaagattttgctatgaaattaactgatgttacctgaccagtaggacttgttctgaatgttggtgaattttacattccacagtctaccatgtctaacgttgtattgtttcactgatctagactatcaaccattgatgaatctggttccattttatcagatatcagctttgacaagactgatgaatcactggtaataaacatttgatctctgagaattacctacttttcttacctctgcttccccaggaatatctctcctgtcttctcttctgaacatcctatattactattttattagttgatgtgttatagattctgagctagcaatttaaaatataaatccacatgagctataagaggctggcttatatattagtttctgaagtgagaatatataattcagaatttggcataagttgagttcatttaatagatctctgtgtgccacatgtactaactgattatattttgacttattaaagccccagctaataataaaaatattagcaagactgtatgtcgtcagggtttatttgctgctcttaaatagacttgtgccttatttctgaattagtttggttcttggggaaagcatagtcatacttcacaattagaaggaaaccaaggtcctgggatttcagccagaaaagtgtgattagagtttctaggcactatataatgctttcatcaacaatggttaacatgttaaactatttgttgccctgcttttatggggcggcacacttcttttaacttacagtgatgcttctgcataaaaggtcatctcctgatacagtctttgatatagttcattgatttgtgcatcttttctgttactagctgaaaactagcaaacaaaacaaatcaggaagtttttggtgactggttttctggtatag

SEQ ID NO: 12169 - DNA, 1927 bp, Homo sapiens
ggtatttagtttgcaaacatatatgtttttttctttaagctaaaaaaaaaaacccacaaaaaagtagtatgttccagactaacccagcatattatttcttaaaactatttgaattgtaatatttttttaattgttgatatccgcattgtttaagataactaggtcataataacctattttgctgaaatttgtggtttgtaaaaactaaagtttccttattacttggtttttctggaacaaattggtatcctgatttgtaagtttgatatttggtcaaatgattaaaattgtttaaaaaggactatgtattgtttctatgcttttaggttaaattcataggggaaaagtgcccttactacctaagaatctgctagctgtgtgtgaatttggcctagtttcagttttaactgggttagtttgaccagcagcagatgtacaccttgagaccttcttccttgatgttggtggagagtgatccttagagatagacggaggttaactagaaaattgtaaggcacttttgcaaatacattgcagaacagctttgccaatagcaggagataagaatgaatgccaacagggttatcttcttcctttgagatgctgccttggaagtgatgttctctttgcagacatttgaagagacttcacattctgctatcagggatgttccaaaagctagtttgatcttctcttcctgtttttttttttttcaactggaatgtttacatacccttcagggcagtgttaaacagcaaaagcaaattggctttttactttcaaatcaatatttgtataattatatagccaaatggaattgtaggtctagacatctgtaatattaatctacatctactggagcatattacagcagttacatttgaatttgctgtttaacatctctctggtgcagcaatgcgtgactgtaaaggaaactgtttttgttttatagctgtaactgtcctggtgcatgacagctgccccaaaggtatccccctttgattgccttctgttcaggagctttcagtgttagtgttacatctggagccaggtgactaatgagttacatattccatagcagatgccactggctaagccaaaagtaagtggcctattgaataggaattgctacccacaaagttctcatcagagtgacaaacatatccaggatctgctcctagttattttcagctggatttgcccatagttcagctggttccttaattatgaatttcaaataaagctaaccgtaggactcatttattagagcagttatactctgtttggtgcttgaattattaaagattccccctttcctcagaatttatccagttggcgaaggactttgaggatttccgtaaaaagtggcagaggactgaccatgagctggggaaatacaaggatcttttgatgaaagcagagactgagcgaagtgctctggatgttaagctgaagcatgcacgtaatcaggtggatgtagagatcaaacggagacagagagctgaggctgactgcgaaaagctggtgtgtattgttttccgtgctagaacagtgatgatgcaggagggggaaggcattgtctgacagtttccacttgccaaatatacctagtttcttcttccacattaaagaactgaaagtgacctgttctttaacagcttgcccatgattagagctgaaattgcagactaggaatcttgttcttcataatttgaaatttaaatgtttttgtcacttagacttgaaacttacttaacagacagatttcaaatgagaacttaaagaattagaggaaaagggagggagggagatcctaacgtacttgatctgtcacaagttattggccatccttcattgtttattttaagtgctacccggaatatccatccttacatgagtagctggtactttgtcatacatacaggca

SEQ ID NO: 12170 - DNA, 1635 bp, Homo sapiens
actagaatgttgaagcattggttaagagaaacacaagaatcctttaatggtatttctgaggacattaaatttctaataaaatttgactttttatttcatttccttgatagttttcataacatccagttaatgtctttctttcttgactgttaagtgaagatcttatttcctcaaagtgttcccagttaaagtctatttggaatagaaccgcctgtaacgacactgttttttctatagtatcagcaggcctttgaggggaaatacaaagtctgaaattcactatacaggacacagtagcaaatgatttttgctttgcccttcgaactgtgaaggtgctgtattgtctctctgatgccagaatgtggtacaacataatcctttgcctctacttagtataaatttattagacgtagttcctgcacgcagcccagcagagagccctgtattacagaaataattcttgtgctgctgagctggcgattttcccacttaatcactcatgtgacgtcatctgtgcttttggtaggaaatgtgctgaccatgtcctgcattttaaaaggcagttgcaacaggggcattagctaaaaatgaaattaaaaatagatattttaagttacattgtaggtcttcaaagcccacaaggaataaactggcaaaattattatattaatcaataggcttgacttgaagaaccacattttcttgttggtcagtcacttgctaatgaactgacatgctctttcctatttgttttctgctccaagtgattggaggggctgttatattcaaaggtctgaaatggttttctaattttcagatgagtcttaaacattccaagtttgtttttataataagaatcacacaaaacatctgttgttagcttgagattcttataatggtagttataaatggaagagtccagatgttggtcactaatggctggattgctatagaatcttttgttgtgggcgagaaggcaggacccctaatgtatatttgatttcttggcagaaagatggatactatgatgctgaatgtgcggaatctgtttgagcagcttgtgcgccgggtggagattctcagtgaaggaaatgaagtccgtaagtcattctgagctggcctgtccaaaggaaaaacagatttcaaatttgggatttttacaaagctgaagtattttccaatcttaaagttgttttccatttgggttacctaaaaagaaagcagtgatcacttacgtggtcaaagcctaatgggcactcattctaaatggtcactaaaattcttttctatagctgctcttaataggttttagccaggcttttttattatctttatttatttatttttttgagatggagtctctctctgtcacccaggctggagtgcagtggcgacatctcggctcactgcaacctctgctccccgggttcaagcgattccttgtctcagcctctcgagtagcagggattacagacacacgccaccacgcccggctaattttttgtatttttagtagagacgggattttgccatgttgcacaggctattcttgaacttctgacctcaggtgatccgcccgcctcggcctcccaaagtgctgggattacaggcgtgagccaccgtgcccggctgctt

SEQ ID NO: 12171 - DNA, 1029 bp, Homo sapiens
aaaattggaagtcagtagggtatgggatagggtaggtcagtgagtagcgtagttgatggacatgaacaggaagagtagaacagtgtcaggaggctgaggccggagaatcacttgaacctgggaagcagaggttgcagtcagctgaggtggcgccagtggactctggcctgggggacagagcaagattctgtctcaaaaaattaaaaaaaaaaaaatggacaagagaacaggttatattgtaatttaagacttaaaaccccccctaaaaaagcttttttttaaacaaccagttttcaacatcctagcaccatgaaattttcctttttgaattcttggacagatagaagttttgccgtggtattgagctgtcttatagtctcacgatatataagtgaatgccgagatgatagaaagtaataccttatattaaaactactgattagagtcttccatttttacctcaggagagccaaaggaaatcaacatttgaattgactacccaatgtcctgcccctgtttctgtcctgtagcacttagggtatgttgcctatttcattatatgttaaatccatggcatctccatgaattccacagctcttcctgccggttttaatgctatccttttagttttgttcttagtttagagaaagatctttgtaataaatttgttggtctggttgcttagcagcttgctgtgattatgtagcttggaacagatacttgccgtttgaaaatcttggtttccggccctgattcaggtatatgttgcatccaggcttggaactgagaactttttttctattatagcaattatcatatgagtataaatgtataattctgcagcatttaatatataaaatatcttcatgtttatatattcttttttttttttttttgagacagagtcttactctggcacccagactggagtgcagtggcaccatcttagcttactacaacctctgcctcccaggttcaagcgatcctcctgcctcagcctcccaagtagctggaattacaggcacacat

SEQ ID NO: 12172 - DNA, 1123 bp, Homo sapiens
catgagggtgaaaatgtgacccagcaggaaaattacaactattttcaattgacgttgaatagggtgagtaaattttagctttttgagttacaatttggctgagatatcagagttagtactgatatagaaagatatttttgtcatctataaataattcctgagagtcacttctgtagaatgttaataaaaatatatggtcccctagcatataaagagaagaggattatattctgctagtgccatttttggattaccctaagtaaatctatgttagaggaaaaaataactcttcagaagcagcaaacctcatctagaacagcttgtttaaaagcctagacctggccaaattttgctgtttccttgattcttcttggtctgggttccagctataatttgtgttttatatgtgttgctgtttgtatgacatgttatggtttgcaggaggtctctgagtaggtctgcaacatatatggtctaattgatatttttgtaacttatctcttcaatgtgttgggttggagagaatatagattttggactcagacctgggtttcaatgagaactcgacatttattggttaatttaaggtttctggacttagttgcccattgtctgtaaaatggagataattaagttagtgaggccaggcatggtggctcacgcctgtaatcccagcactttgggaggccgaggcaagcagattgctagaggtcaggagttcgagaccagcctgaccaacttggtgaaactccatctctactaaaaatacaaaaaaaaaaattagctgggcctggtggtgggcacctgtaatcccagctactcgggaggctgaggcaggagaatcactcgaaccctgaaaatggaagttgcggtgaaccgagatggtgctactgcactccagcctgggtgacagagcaagacaccgtctcagaaaaaaagtcaaattcacttaaagaaaaagtgtacgtgaagtgtctagtttagtgcccgaatcatttcaaagcacctagtaaatactggattcttttctttctaattgtatagtattatttttaaaaatggtctaaaattctgaatttactgatatccttatttggagacagcctaggggggaaaacaccta

SEQ ID NO: 12173 - DNA, 1034 bp, Homo sapiens
ataaccaatacgaataaatgcattgtccacaaccaccagaagatagaagcattgctgacagtcatacgtattgttcgtgttggccttccctgttctttgaagtggaagaagagaaagggtgtctgaaacctaaaccaggtctcagtgaatgatgtcagttctcttaggctggtcctgaaagacacactcctctaccaaagtagcttcaattccacagagaacagaattggagatgacaagggagaaaactagaaagcaggtaaagcatagtcacaacagtagccatagtccagacaatacttctttgagttagatgtcatcagaaagcagaccagactgggaacacagtgcccacacctgggtctctgagcttaggtgtcttacagttctttcctcacttttctgtctttggtctcatcccacccaggtatcgaaggatgatcgcagtgatgtggagagcagctcagaggaagaagatgtgaccacctgcacaaaaagtccctgtgacagtagctccagcaatggtgccaatcgggtgaatggtcacatgggaggcagctactgggctgaagagtaaggtggttgctatagggacttcagcacacatggacttgtagggccactggcaacatactcctcttggcccttcccatatctactcttctgtgattgggagactgcaaggcactgaggagtatcaaagaagcaaatattttcactttgaaagaaaactgccattttgtatttaatagcctccaggttctttcagtaatgttatttgctctgtgtgtttttgtgtgtttgttgatgtgcgtttgtgcatatgcgtgagtttcattgccggggttggggcacaattgtggactggggccatgaggccttccctggtccccactgaacccaccttagttccacatttggctgcatcttgaattatgccaactccagacttctccttcttttttgcccttggctcttgacactctaaacccctggaccatctgaatggagcagccaagttcagtcccacattt

SEQ ID NO: 12174 - DNA, 1160 bp, Homo sapiens
cgactcctgaaagatctaagtatttccataatctcttggttaggcaggaaggtatccaagatccaggatatctatatgcaggaagagcttagtctcagttctacttttccctccaattaagatcttggtcttttgatgtaaggaaactgccatttattaatcacctcctttgtgccagggtctttcatatacattatctcactgaattacttacaagattcttatgaagtagattagtggttctcacattttaatggacatgtgaatcacctggggatcttgttaaaatgcagattctgattttgcaagtctgagatgggctcaagattatgcatctctaaaaagcttccagccagcacagtggcccacgcctgtaatcccagcattttgggagactgaggctggtgaacattgtcaccctaaagaagtgataaatgttgaaagtgatggatatggtaattaccccagtttcatcattatactatgtatacatgcattgaaacatcacattgtaccccataaatatgtacaattattatgtgtcaactataaataaaatttttttaaaaagaattggcccgtgggttttctccattacagatttattgccaaaccctgtgcactctgtattggcatcgaggacagtggtccttatcaggcccaacccaatgccatccttgaaaaggtgttcatatctattaccaaggtaagtgggcaaagaaacagagaggaatattcacataaggcgttgctccatggggcaggggaggatagagagcacgtacctctaagggtaaggataggatgggatggtccttcatatttgagtagtccatgtagctatatggagagctttatcccctcagggaaaacctttgggccctacgtatgtcaagtttacgtacgtagtaggtttgagttttaggcccagcagccacccttacccctctttccccagacacataccatatctggtttttgtttttccttgttccagtttctgtcactgcctagttgtgtgatcgagatggagacagtactgatagcctttgcagtttgggttttttgttttttggagagacaaggttttgccatgttgcccaggctggtctcggactcctgggctcaagccatccttcggccctcagccttcaaaaatc

SEQ ID NO: 12175 - DNA, 1013 bp, Homo sapiens
accaccctaggtacctattttttttttttttttttttggagatggagtctcgctctgttacccaggccagagagagtgcaatggcgtgatctcagctcattgtaatttccgcctcctgggtaaaagcaattctcctgcttcagcctcctgagtagctggggttacaggcacacaccaccacgcctgtctaactttttgtatttttagtagagatggggtttcaccatgttggataggctggtctcgaactcctgacctcgtgatccgcccgcctcagcctcccaaagtgctgggattacaggcatgagccaccgcgcctggcctagatacctgttttataagttataccaaataccaaccttttgtatgatgtagaattaatactttctcaaaagctataatttcaaataatttcactttcttcagtaaggtaattcattaactgtgtataactaaatctatatatttaatttttatcacaaattagaaaagattattttccaatcacatctggaaaatataataaagcttcattctgtagcacaaaataaacaatcaacaagtatttgtcaaatgttctttttttttttttttttttgagacggagtctcactttgtcgcccaggctggagtgcagtggcgcgatctcggctcactgcaagctccgcctcccgggttcatgccattctcccgcctcagtctcccgagtagctgggattacaggcgcccgccaccacgcccggctaattttttgtatttttagtagagacggggtttcaccgtggtctcgatctcctgacctcgtgatccgcccacctcggcctcccaaagtgctgggattacaagcgtgagccactgcgcccggctgtcaaatgttcttacgctccatatagctggaactgactggatatgagtagctttatgcttttcaccgaactctgaactaacgagggcaggatgtgagctaatgacaattctagattgttaagtccactccatgatccagataatag

SEQ ID NO: 12176 - DNA, 1031 bp, Homo sapiens
gttttactgtgttggccaggctggtctcaaactcctgacctcaggtgatccgcccgcctccgcctcccaaagtgctgggattacaggcatgagccactgcgtctggcctcatttatttttgagaaagtttttgctaaatactcagagctgactaacgttagtctgtcagtcctttcaggtaaaagtggtattctatggaaaaagcgacttagtttattcagcttgcagtagtcatacaaatggttttccttgggagccatatactttggtatgcatcagaagtgctttttgggtacatccattttatcacagaataagtggagactgggtttcaccatgttggccagggtggtctcgaactcctgacctcaagtgatccgcttgcctcagcctcctaaagtgctgggattacaggcataagccactgtgcccaatcacagaatacttttaaaaaatatattcaagggtcaagatttaataaaagtaataatttgtagtgcttcatcaaggacattcttaagcaaaactggcatgttttaaaaattgagaagacctagctctacagtatagtaactactagtatggtttggtgtcactaccttgatttggtctaaagtaccataatgttttacctaccattgatttgcacaatcactgcaaatgtcaacacagtgaaaaaggcaaataataatattgttatgaaaatagtttagtttgtagagcccctgagagtgcctcaggaaccctcagggatctgcagtccataccttgagaccctctaccataactgaatgaggttactgagggtgagcgtgtagagtacgaaaagaacctctaagtgaaccctgaggaaacaccatgtttcaggaaaaggcagaggaaaaataaactgcaaaggagatagaggaatgacagccatacgttatttgataatattagtagttggtataggccgcgcacggcgactcacgcctgtaatcccaacactttgggaggccgaggtgggtgaatccactagaggccaggagttc

SEQ ID NO: 12177 - DNA, 1062 bp, Homo sapiens
atctggaggggccggccgacggctacggttacccccgcggccggcacatcctctcggtgttcccgctggcggcgggcatcttcttcgtgaggctgctcttcgagcggtgagagcccgggagcgagcggctcgggggccgggcgcgggccgggggcgccccgctgtgggaagggccgagggccggaagcagaactgcaaggaaagcccggaagcaggggctgggggagcttgggccgcggcgggtgatgctaggcgcgtgggcgaggtggtagcctagatggagaaggagtttggggcgtgggcaagagaaagagtgagggtctaggggaatgctgggccccttcaatgttagatccggagttggattgggggggtcatataggcctcctcccaacctccaagggtcctacagatgaggaaacaggttcagtgtgagctctggcagaggccccgaagagagggataggaaggggccaggagaaccagagctagttgtgaccatggaagccgaggggtcaacgcaagggccagacgttccaagggaaaggaatggactcatcagactcttaagatttgttaggacgcttgagtttccgagaattggggggaacaggattagtttggccctaagagttggtttggtatgtcaactcatgcacgtttgttggtaggagggtagaaatctggttgggatagggtgtggtggagccctaggcttccaaagtaatggaaagatgtcagattagttgcagaacaggccttggggcctgaaatggaaggaggagtgtgttcgaagggatggaggagagccacagggctttatcagaggacagctatattgagccagattcttttttcttttcttttttttttttttttttttgagacagagtttcgctcttgttgcccaggctggcgtgcaatggcacgatctcggcttaccgcgacctccgcctcccctgttgaagcgattctcctgcctcagcctcccgagtagctggaattacaggcacgcgccaccacgcccggctactttttgtatttttagtagagacggggttt

SEQ ID NO: 12178 - DNA, 1029 bp, Homo sapiens
ttccactcagctttgttccttccttcttaaatcccttgggcactacttgggagtttaccactaattttattaaacttccttttatagatttctttattttcattttatgcacattttctgctctcacttcctgcccaaatctacttggaaaaccatttttattttttgctttacctcctagtgaatcatgtggcaagtgaaccaacagtctgaattttttatgggcctgttttgggttttttttttttttttttttttttgagaccaagtctcactctgttgcccaagctggagtgcagtggctcaatctcggctcactgcaacctctgcctcccaggttcaagcgattctcctgcctcagcctcccgagtagctgggactataggcacacgccaccatgcccggctaatttttgtatttttagtagagatggggtttcactatgttggccaggctggtcttgaactcctgacctcgtgatctgcctacctcaacctcccaaagtgtgggattatgggcgtgagacactacacccagcctattttggattttttttactcaaaattctatcttgcccataacctggttcatttcaggcttaactatccaggtcctgggccttgggattaatttgcattacttaccatcatgtgttttctggtgagagcccaggctgatcatggcagcaaaagcacctcctaattgctgatgagagcttcctggccacctaagctgtctcccgcatctactggttgaggtgtttgtgttgggcaagtcaagggttaactcccatacacctagggactttgcattcccatctactccccaccccttagtagccatgtaactatttcttttctttattttttgagatggagtctcactctgtcgcccaggctggagtgcagtggcgccatctcggctcactacaagctctgcctcccgggttcacgccattctcctgcctcagcctcccgagtaactgggattacacgagtgtaccactacgcctgcctaatttttgtattt

SEQ ID NO: 12179 - DNA, 1027 bp, Homo sapiens
aatggttcctatatttaaatactttatctttccttggagtgggttatggttatacggtgaggagctttgctctccttgatagagggctttgttttgctttgttttttgagagcagaaaaatatggtttagaagttgttttataaagggagatgatgcacacttttggcagttgagtgcagtctgtttctcgggttactctgtaattgagaggcatgttaatatcctcataaaagacattttgctgcctcttgttcaaatgctcagctgttctggtgcccgttatttcccctaggcagccagtgactgactggagtcagcaggtttttatggcattaacagcagtttgctcttttatttttaatatgactcttaatccccctctaactttttttttttttttttttttgtagatttctgcaaatgagaatagcctggcagtccgttccacccctgccgaagatgactcccgtaagcattctttcttagatctggaggatgaggttcttgttttctatctgtatttggttcaggggtgttcccattactgtcagtgctgagaaaataacatagtaaatcctctacttgaatttaagggctaatgcttgaatgtcctttacacacttcatggcttaaggagaagttaaattcaattgaatatagttaacttgggacaaactgaatacttgtaatgcttttctcattgaattcatcctactttttgcaccaaaccctttcagaattgaagctgtataaactaattttgaagtttcattttaacagaagtttggccaatacggattttattcatttataatgttattcataaatacctattctttagtgaataagtatttgaataatctgttaaagatacatattttttccctgtttatctaaatgtatattatagtcaacctcctagccaggttctagggattttcctgctgacagtgaattttgtcacctgtcatcctattttggagtcattttgagcctcccttttcccaaagacaaaaatgttttttt

SEQ ID NO: 12180 - DNA, 1043 bp, Homo sapiens
aaggatcgaacaccttccccccactgtagacctgcgggtgctgccccacgaccgccagaaatcaaggtcatgaagcccgcaaggaccgaacacctccaccccactgtagacctgcggtgctgccccatgactgccaccgaagcccatataaggagcagagttcttaaggactgaagaaaaactagcctctggagaaaaataaaaaaattgcaattgtacttaaaaaaaaaaaaaagattttacttcaaaggccaggcttgaagttctgaacactttgaagtctccaattatgagggatccagtctaagcctctggcttttgctatttagcaataggtgttctatgatgggctgatttggaaggagggagtcagccactcttgagccactgcagtgaagtcacttgatctcagtctggagagaaacactttaatagctaaacattctagctttgatttttctgaagggaatacacctgttttcaattctgggatttttggggtgcttgcttgactgtatatgaacttgtgatccaaggaaaaaataggagaaagaacaatgttggctttttaagtcaggatagttttatgtttgctactagataaggcaaaaataaaaacttatttttataaattcaagaagaaaagtaaggatgtttttataccctagtggtcaataacttagttcatagtatttatttaataaaaggaaggtggcattggtggtatagtggtaagcatagctgccttccaaataatgaaaattgattaaagcctatttctcagttattctctacatttgatgaatagataggttatttaggtcaggtggtttagctgaatatgatggttttatttatttatttttgaaacagagtctcattctattgcccaggatggggtgcagtggcacaatcttggctcactgcaacctctgtctcctaggttcaagcaattctcctgccttagcccccgagtagctgggattacaggtgtccgctgccattcccggctaactttttttgtatttttagtagagatgggg

SEQ ID NO: 12181 - DNA, 1054 bp, Homo sapiens
acgacaaaagataaacttttttagtatgctcttgacaaaagttccgaaagttttctgaaattttactagtttgagatccccaatttaggaaaccgatttagtggagagagctttgcctatttttggccctttgggtcggagaatgtgatataaagccgaagatttactctgccagacagtcttaagaggtcactaacgtttagctattgacattcagcaaaaattgtggattacctattaaatgctagaccaggggacaactgttattaagtcagtgtttcagcattactgaaagaaaagtggcctataaaggtaagggagaggaagagtttctcagataccagccttcgatgattaacaaagtccagcctcaatcattctggaatccagaatattgatggctggaaggctggttgtacaagtttattgttctttggtgtttggttttttcttccgtggaccacagaatgcttaacaaaagttgatcagtaaaaagcgggggaggggctaggcgtcgtggttcatgactgtaattccagcactttgggaggtgggggagggcagatcacctgaggtcaggagttcgagaccagcctggccaacatggtgaaaccccgtctctactaaaaatacaaaaattagccaggtgtggtggcacacacctgtaatcccagcctctcaggaggctgaagcatgagaatcgcttgaacctgggaggcagatgttgcagtgagccaagatcacgccactgcactccagcctgagccacagagggagactgtctccaaagaaaaaaaataaaaacctggaaattttattgaaaaatgaaaccttcaaaatgtgccttgactacttctttagctcctcttccttagtgccttaggtctaaatcaaatgttacgctcgaccagtcctggtggcatgcgcctgtaatcccatctactggggaggctgaggcaggaggatcatttgagctcgggagtttgaggatacagtgagctgtgatcatgccactgcactcaagcctacatgacagatgagacactgtctctaa

SEQ ID NO: 12182 - DNA, 1048 bp, Homo sapiens
atcccaaggtgagcaatgtattgtcctgtttgtctctcacccatgccataggaatctgtgtgtctggcggtatgtgctggcctcattctatagtgagacagtcaaggacttgggggtcagtggccctgaagacagacggtaccaacggaaatactgtagctcctcctgctgccaggccatgttttccccctctttcaaaatctaacttgagactcgcatttcctagaaggttttcttagaaaaactgtgttaccattcactctggcttccagtatctagcaatgcccagcccaaggggaggaggatgctctctctaagcacttttattcatacctccatgttactccatcagtttgcattttatatatgttctttttttgtttgactttgccatcactttgaaaaagtaattttttttctttttagtacaaactatatgtggcaagatctttggatttgctaataattatttttcagtttcccctcccaccgggggctacactgtcctctgcagcttcttctggacattttgggcctttcttaccgttgcctaaggcaagaatgaacactatgtctggaagatatttttaacttagttttgtctcttgttttgtttcttttcctgggtgtgagcaaaaagtatccttatctgcttttcaaaaaaataaaaaaatcttgataatatccccatttactctgatgtgattattacacattttatgcctatatcaaaatatcccatatgccccataatatatacacctactatgtacccataaaatttttaaaaaacaaacaaaaccttggtaatttataatccttctagcttctttttctttctttcttcttattttttgagacggagtctcactctgtcacccatggtggagtgcagtgatgtgatcatggctcactgcagccttgacctcccaggctcaagcgattctcccatctcagcctcccaagtagctgggaccacaggcgagcacgaccacacccagctaattaaaattttttttttttttttttttgtggagatgaggtattg

SEQ ID NO: 12183 - DNA, 1032 bp, Homo sapiens
tgaagggtttcacagtgaaagccagaaagcctgctagacacattctaaaagagctgtaacacttcaatttggttttgaagtcttgccagcaaaatcttgactaagacttttctttttttgttaaatatctgtcagtcatattctgaaaactgtaattattttcaaggttacctaattcagtagaaaaattactcttttcatagtaaggattcagtcatacagagtaacaaactgctggttctgaacttgttagtttgttcttcctaattcttctccctcacttttctcctttccagaatcatattctaagaactcagccactcaggtatccaccatggtgctgggtcctgaacagaagatgtcagatggtaatttaccgctttgtgttattgtctaattttatttgtaattaggtttatgttggtaacagaaatttatcatatttttcctcttgtcatcatctgtcatcatctattctaacaactccattcaaaagtcaccatctggtgacttaggctgtaaatgaaaatggattttttttttttttttgaggtggagtctctgtcacccaggttggagtgcagtggcacaatctcggctcactgcaacctccgcctcatgggttcaagtgatgctcctgcttcagcctcccgagtagctgtgactaaaggcacacgccacaatgcccggctaatttttgtatttttagtagagacagggtttcgccatgttggccaggctgttcgcaaatgcctgacctcaagtgatccgcccgtctcagcctcccaaagtgctgggattacaagcatgagctaccgcgcccatcctgaaaacagaatgttttttttttgtttgtttgtttggttttttttttgaggcggagttttgctctagttgcccaggctagttagtgttcagtggcactgtgtcggctcactgcaacctccgcctccccggttcaatggattctcctgcctcagcatcacgagcacctgggattacaggcacctgccgccacgcccggctaatgtt

SEQ ID NO: 12184 - DNA, 1056 bp, Homo sapiens
aagtgagcttgctaaaatcctccctcccaattaaacttaacaggatgatggacatctggaacttccaccccacccctgactccacccgccccactgcgggttgcttagtacaggacctgtagacaaaggctggcatcccacacgctatgcttaatcctgctggtgcttcagctctcttggagagcttgggaggggctgggccacgggtgactagtttcttctagttgtcagagggttgaggaatgaggtctagaacattatggctgcagactttactttcttaggaagatttgaggctgccaaatagtggccttccactaccagtatgcttgtatggtgctttttcctaccctttctagaagattgaaccatgagcttaaattacatattttagaccaaagagaattacagatttctgtccttaaaaactcataaaataggctgggcgtggtggctcatgcctgtaatcccagcactttgggaagtggggtgggcggatcatgaggtcaggactttgagaccagcgtggccaacatggtcaaaccgtgtctctactaaaaatacaaaaattagccaggcatggtggcacacgcctgtaatctcagctattctggaggctgaggcaggggaatcgcttgaacccaggaggcagaggttgcagcgagctgagatcgtgccactgcactccagcctggacaacagagtgagactccgtctaaaaaaactaaaaaaaaaacaaaaaaaaacaactcataaaatagggggaaatgtgtctggctttagacacttgggataatttggaggcaaaggcagagaatggatacttgcctagcagcctctgtgtagatgcttattaaaaaagtatttgcctggccaggtgcgttggctcatgcctataatcccagcactatgggaggctgaggcgggcggatcacgaggtcagcagatcgagaccatcctggctaacacggtgaaaccctgtctctactaaaaatacaaaaaattggctgggcgtggtggcgggcacctgtaatcccagctactcgggaggctgag

SEQ ID NO: 12185 - DNA, 1030 bp, Homo sapiens
aaaaaaaaaaaaaagccagctgtggtggtacgtgcctgtagtctcagctacttgggaacttgggaggctgaggtgggaggatcacttgagcctgggattgtgcaactgcactgtagcctgggaggctagaaatatgtaaataattgttctgtaagaccctgtctcaaaaaataaaataaaaaacaataccagactttataccttcaagaacaatttggaaattcacatgtctattctaagctgtttctttccccacacctcgaatgggagcagattgagttttagaactaattgggctgggcatggtagctcatacctgtaatcccagcactttggaaggctgaggtggatggatcctttgaccccaggagttcaagaccagcctgggcaacatggtgaaaccatgtctctacaacaaatacaaaaattggcagggcatggcacacgcctctagtcccagctacttgggaggctgaggcgggaggatcacttgagcccaggaggttgaagctacagtgagctgagaccacgccactgcactccagcctgggtgacagagcaagacactatctcaaaaaaaaaaaaaaaaaaaaagttggatggatatttttgatagactcagaaaatgctgcttcttcatgacctagaatggaaaaatagagggagagtaataatctcttattttaaaaaagtgattaataaccttcctcattaaaatacatagggttcagaaaataattagctctgtttgagctgctagaatatttcagaaagttttgttgactgtcagtcatccaaatggcaggagcccaccttcatgaagagcacctggtacaacaaggtgttgtgttaataatacagtaatggtttagtagaactgtcaagtactttggccttgaagtagaccattagggaaaagagaattttagaagaatctagaaaccttttcattttctttaggacaaatataatttttttaaaaaatgagaattctttgttattctctaataaacactttgggtgtcgctaa

SEQ ID NO: 12186 - DNA, 1028 bp, Homo sapiens
gagtgcacggctttctttaaacacctaacttaagcggggggttttcacttgggtgctttgtaagttcatgatcctggtgatcacaaagacacatggatccatgaaattcatggtatatgagaaacaaccacagtatcttgtaaaaggagaaacagggcaggtcattttattcaggtttatggtaacacagcagcaagccttccttccaacccagctacagatggtagccctgaccatcttactggaggttttgattccttgacctttagcagaaggttgggttccagtcaagtgaagaggctttctcctgtgagatgtagcttattactttggactcatttaagaaagagacttatattacctaaactttgcaaatagattcttccagaaaattttgcctgggcagtccctcttgctgctctcacatatgctgtttttttttgttgttgttgttgtttgtttgtttgtttgttttggtggttataggaatccttttaggcctgaaaaaaacttagatctagtactaaaatatacatattctggtggaactgtttattaggtgctagcctgatgtattctgtgctctggatcttaactatttcatataactttggaaaatgttcagctagaaactcttgagaaaagaccattagacatgtagccagaaagtgtcagctgacctttcatttcactggcatttaaaagctttaaagagagttgcattattttctccaaaagcatttgttgagttggtcattttgacagttaactgtcggtttttacctgcattcctaggtgctaaaacttacaagtgtatctcttgaacacaggcattgatcctctaccaatgaataattgagagaggtaggaatgactgatttttctagttgtagtttgaaagattaatttgatgaattggaaagtatggaaactattctgttactattgcaaagaaagatttatttttttaaaaaatttatttttatttattttattttatttttttaggcaggtctggctctgtcacc

SEQ ID NO: 12187 - DNA, 1049 bp, Homo sapiens
agaagctatgtcacttggtttgcagttaagttgtgtcttcccacgttgctacacagagtagaatttgtttttcctaagtcatagggtataaaggaaagatcttcacaaatacacatgcagtcacttttcatggtgtctgcctctctgatttctaattggttaaaatttccttttggtaaacatagttgttaagaaaaatttaactgctactaattttacctgagaaaacattggttctcatgcagtgatcctgatatctgtatgataagttgaccttaagatgaatctaacacaactaatattgtggagtgggacccacttgatgctctattgtttgaatcattgataccaaaacagtagtatagttaataccacagttctgataatacatattacctggccttaactccccagtttgatcattaataggagaaatcagggaatgctatttgaatatctgctgtgtggaatggaaagaaaagttctactcaaacccattaattcttgcttcccttttaagtaaagatttgtcactctgttataggattatttgatgacttggtaagtcagcatcaaccatctttttttttttttttttgagacagagtcttgctctgtcatccaggctggagtacaatggcatgatctcggctcactgcaacctctgtctcccgggttcaagccattctcatgcctcagactcctgagtagctgggattataggcatccacaaccacgcccagctaatttttatatttgtagtagagacaagttttcaccatgttggccaggctggtctcgaactcctgacctcaaatgatccacccgccttggcctcccaaagtactgggattgcaggcgtgagccaccacgcttggcctgcatcaatctttatgttaaaattttcccactttcattcatgatataatgctttctaccttcatatagacactctgctgcaccccttcaatagcaatactcttaatgtgcttttggcaatgaaactaattttcaaactgtagttgaaatagattataaattacagtttt

SEQ ID NO: 12188 - DNA, 1031 bp, Homo sapiens
tgtgcaagttggaagccgcggaggctctcggaacatgacctacctgccggcggggcagtccgctcctccggctgccccatgagggcccaccctgcctgcacctccgcaggctgactgggccacagccccaatgattcttaacactgccttacccccctaccccagaaatcactgaaatttcataattggcttaaagtgaaggaaataaaagtaaaatcacttcagaactcttaaaaaaaaaagaagaagaagaaaagaaaaaaataaccaattagttgggccaggtggctcatgcctgtaattctagcactttgggaggctaagagagaagagcttgagctcaggagttcaagaccagtctgagcaacatgatgagaccccatctctacaaaaaatttaagaattagccagacatggtggtgcatacctgtagtcccagctacttgggaggctgaggctggaggatcccttgaacccaggaattgaaggcagcagtgagctttgatcacgccactgtaccccatcctgggtgacagagtgagaccccctcaaaaaagaaaaaaaaaagaaaagtagctggttggttaacatcaggttacttcaggctactgtttttgtgtgaggattaaagcagagggaacttcattatcatgctgtttgaagatttaaactgtcctgtttgggaaattaggtgtcctctctctcctgatttcttagaagataacatagcttagtttaggtttagcgatgtagaccttaaggtgaatgactccatttttatttttagtctgccctgttggggcctagtataggagtttagtggcctcctataatttttatttcacaaaacaaaagtatacatcatatcagtgaatatttgctaagaacaggaaagagaagtcttcctttcaaatagcttattgttcattggaatgaattaatctaggcacagtggctcatgcctgtgatcccaacactttgggagaagaggtgggaggattacttgaggcttggagtttgagactactctg

SEQ ID NO: 12189 - DNA, 1032 bp, Homo sapiens
tagctgggactacaggtgtgcaccaccacacctagctaattttttaaaaattttagagagatggggtcttgctatgttgcccaggctggtctagaattggcctcaagccatccccctgccttggcctgccaaagtgctggaattacaaacatgagctgctgtgcccagccaacactgtattatgtatattttactacagattttaaaaatggaaaacaaaaagaatgcaaatagttctcctttgcccaagtcctgatccctcagctagctgcgaaagtatcaccaccaatgatggttgccaggggctagttactgttcagtggctataagagtttcagccttgcaagatgaaaagagttctggagatggatgatggtgatggttgtacaacaatatgattgtacttaataccactgaactgtccacttaaaagtgattaagatagtaaattttgttatgtgtattttatcacaataaaaagcagttgggaaaaaataatttcagacttgtataatatttgcatgaatactacaaagaatttgtgaaaacctttcacctggattccccaaaggataatattttaatatatttgctttatccttctctttctcagaatttcttacacactcagaattatttttttctgaatgatttaaaggtaaaaggcagatgtggcgccccaaacacctaaatacttcagtttgtattttttaaaaacaaattctcttacataactatggtataatgatcaaaatcgggaacttaacgctgacacaatgctataatctatagaccttattcagattttgtcagttgtcctaataatatccattatagtaaaagaatatccaatatgatgtgttgattcagtgaccttgtctctttcatctcctttaatctggaacagttcttgttccttgtatttttatgacactgacaatttgataagtgcagggtagttattttgtagagcatccttcaatttgtttttgtctgttgtttcctcgtggttagattcaggttatgcacgtt

SEQ ID NO: 12190 - DNA, 1050 bp, Homo sapiens
gccaccatgcccagctaatttttaaatttttagtggagacggggctttgccatgttggccaggctggtctcaaactcctggccttaagtgatccacccaccttggcctcccaaagtgctggctttacaggcgtgagccactgcgcctggcctatagactaacatttcttagaaacattgatgtaaaaatcatcaacaaaataccagcaaaccagatttaacagcatattaaaaggattatacaccatgaccaataagcacatgaaaagatactcaatgttgctaattaaggaaatgcaagtcaaaactccaagatgctacctcacacccattaggatggctgctatcaagaacagcagaaaataattgttgggaaggacatggaaaaattggaaccactgtacactgttgttagtcgtgtcaaatggcatagcctatgtgaaaaactggtggttcttccaaaaattaaaaataaaattaccatatgtatcaggattttccagagagacaaaaccaataggatatagatggatggatgggtgaatgagaggggatttattaggggaattggcttactcaattatggaaactaagaaggctgtgataggccatctgcaactagagaaccagggatgccagtagcatggctcaatctaagtctcaaagcctcagaaccagggaaaccaatggcataactctcagaccgaggctgaaggcctgaaaacctgagaggctactggtgtaagtcctggggtccaaaggctggagaacttggagtactgatatcaaagggcaggagaaggatgtcccagccccaggagaaaaaatgaatttacctttactctgcctttttgttctatctgggcacccagccctttagatgttgccctcccacattgaggatggatcttactccctcaatcaacctactcacacaccagtcttctctggaaacactctcacagatacagtcagaaatcatgctttacccgctttttaagtatcctttaatccggtcaagttgacacctaaaaatcatcacaccatatca

SEQ ID NO: 12191 - DNA, 1008 bp, Homo sapiens
tgatggtttcatcttcaaatctattaatttgtattttataaagagtcatcttaattagatttatttaatccttattagtggtccttttattattctttttttcttatatttttattgtggcacaaactttatactaaaaggaaaaggagattcattgtgaatacatgataagtgaaggagccagtcacaaaagaccacatacatatgattccatttctatgacatttctagaatgggcagatctgtagagaaaataaattagtggttgactagaactatggaggaggagggaatggagagggactactagtgggaatggagtttcttttcagggtgttaaaaatgttctaaaattgtttgtgatgatggttatgatatcaaactaggttcgtcctgcccacgtgcagcaagccaatcactatgatgatgggttttgcaaaagagacaagattttattcatagggctgctgaatgaggagacaggagagcaaatcccaaatctggcaccctgaaaatagggcttggcagtatttgtggggtaggacgcagggtggtctaaagcatggggaaaggtgattggcaggtaggaaaggtgaggtaatcaaggtttctgcacaagcgtaattgagctacattgctcttcataggccatgtgcagaaaatggcagtgttaacatgatctaagtgtggagtttttgtccctctgacatgaaaaggtcactttttgggcactcatgcaggtccagttgagggattggtggtctcaactgggtaagagctgtcccctaattcctgaaaaacaactttaagcatctgttaatatagtgacccacagtcagagatgtcatcttttttttctttcctttttttttcttttgaggcagggtcatgctatgttgcccaggctgttcacagatgttaacttttatttatttattatttattattattattattttttgagatggagttttcgatcttgttgcccaggctggagtgcaatggcat

SEQ ID NO: 12192 - DNA, 1031 bp, Homo sapiens
aaatctcctttcggccgggtgcggtggctcacgcctgtaatcccagcgctttgggaggctgaggcgggcggatcacttgagctcaggagttcgagaccatcgtggccaacgtggtgaaaccccgtctctactaaaaatacaaaaattagccgggtgtggtggcgcgggcctgtaatcccagccactcgggaggctgaggcaggagaatcgcttgaacccgggaggcggaggttgcagtgagcagagatggtgtcattgcactccagcctgggcaacaaagtgagactccatttgaaaaacaaagcaaaacaaaacaaaaactcctttgaaagcaacattattgcctatataacttgttgcatgcattggctgcttcattcctccagtatagtttatttcatttatagatgtgtaagaatcctgtatggaaatgttgaaacagctgcatcttaggggtagatggactataattgggtttcctaatgcattattaagacttaatctaaataagtgagtcaagagactagaacttaacattttcattgggtttatgagttcataggggaaagatgctttttagggggaaagtagatgcatttttcattctgataatgagatcttttaagagttatataaagttcctttattcctgccaattcaaagtagacttacctcactgaagtaaaattatgagttagaatttaatacttcaggccgggcacggtggctcatgcctgtaatcccagcactttggtaggctgaggtgggcggatcacgaggtcaggagttcgagaacagcctggccaacatggtgaaaccccgtctctactaaaaattcaaaaaattagacgggtgtggtggcgcacgcctgtaatcccagctacttgggaggctgaggcaggagaattgcttgaaccgggaggcggaggttgcagtgagcagagatcgcatcattgcactccagcttaggcaacaagagtaaaactccgtctcaaaaaaaaaaagggggagagaatttaatacttcagcat

SEQ ID NO: 12193 - DNA, 1039 bp, Homo sapiens
ggcgggggaaaaggtgcaaaagcagcgtgggagcgccgggctggcttcctgcggctgctgctggtctgactgggaagcagcaagccaccactacgaactctcaagaggagtgggagtgcgggagtccagagctgcctctgggaagtctgcagtagttgagcaaaggggtcctcacgttcctgagagctgggcaggggggattttggaacctggggcagccaagaacgagcagccaagggtacgggagattagttgtgcacagagcagtgctggtcgggcttgggggtggctggtgggcactgcgtgggaaaccttggtttgtagttttcttggtttgcgttactcctgttgggtagaattaccctccgcgcctttgtacaagacacggtgtctcctggggcaaggaaggagccaggatggcctgggctctgaagctgcctctggccgacgaagtgattgaatccgggttggtgcaggactttgatgctagcctgtccgggatcggccaggaactgggtgctggtgcctatagcatgaggtgagtgagattttcccagaccctacaccttctgaataacaaaggcggatagacactaagaaaaggggttgagtgggaaggaggtgtatagagttttaaaaagctgtttacgattggggaaaagggacttgttcttttgtcgctttgagtagttagtgttgtggaagaaatggaaaaagcgattgtaggcgatatgaagcctgtgcagaatcagtggaagaaggaagtggtccctgattagtaaccagatgaatgttgagaggcttttgtgccaatgtgggagacttggggactgatggtgtatgtgtgggtaagtctgacgttgtgtgaagaagggttacatatagcataggaatggtatctaggaagttgggaaattgggagctggtgcttaatgatgaatattggttcgtttcttgttggaaagatatggaagtccttgatgaagaagtccgtacagctctatcttaccactagcttgctttaagactttacttaatt

SEQ ID NO: 12194 - DNA, 1033 bp, Homo sapiens
gacttcgtgggtaacagcagttctgattttccttacagattactattcaaggtcgacttccaaacaaagggtgtgaatgatggaagtgaaccgtgagactgggaaaagggtgcagggctgaggggtgaggaggaatatcctcactggaaaagcgggggatcaggtttggttttttgtttgttctgagacggagtctcgctcttttgcccaggctggagtgcagtggcgcgatctcggctcactgcaacctccgtctcctgggttcaagcaattctcctaccccagcctcccgagtagctgggattacaggcgcccgccaccacgcccagctgatttttgtattttttaatagagacggggtttcaccacgttggccaggctggtctcgaactcttgacctcaggtgatccgcccgcctcgacctcccaaactgctgggattacaggcgtgagcaacctcgctcggccttttttttttttttttttctattccttttttaccccctcaacctattcctgcgttatgggaatcatgttccgacagacacactggtacaaccacagaaaaggggagaagttctgatcccgtcagcgaagggcgagggggtgcgaagggaaggaaaagagacctcacaggccccggcccacgaaccaactccagcaattcagtagttaagttcggccccgctgggggttccggagcgcggcgccccgcctccgccggctctccattggcctacgcgaatgcctgcgctagcgctctatttgctcctgcggatgcccatcatgtcaagcccccccaccacccgagcccgcagctccaaactgcgccacagagtttacggaggaaagggcctggaggcagcaagctgccgtaatttgggtatgacgaaggcgtcaggcgcagcgccctggactgcagccggccaaggagcatggcgcagcccaccccaaacctggcgtttggtgaccctgggctccgaatccgctcgctctgggccagcagtactccccccgacggcctctgccaccct

SEQ ID NO: 12195 - DNA, 1034 bp, Homo sapiens
cctgtccccattaggccccctgagaaagtcatcaagtttcctctcagctagtcttgcttctcctttcccctgtgtttgggaccctgggcggacctttcccagcaggaaaggctgcagggtttttcagcgggcgaggatgcatctagagccccctggtgtgccgctcccctagctgtgctgctttccccggcctcccagaaagtgtgtgggggaagacagcgtgggcattcagcaaggggtgctctcccctttgcctcccaccccatcctgctcttccatgctggcctagaactttggggccacattgtatctctaggattctttccctttcagccaggagtttttgtcagacctgggaaagtgggacccagactgccttgggcccaggtttccagggtgggtgtcagcctgtcccctgacccccatctggctcttcccccacagctgctggagtacttagggaagggcaaaagcatcgtggatgtggggctggcccaggcccggcacccactcagcacccgcagccactacttcgaggtggagatcgtggaccctggagagaaatgctacatcgccctggggctggcacggaaggtgggcacaaaggctgagcttttttgctcatggagctgctcaggtctggggctgttggggcagcaccaggaagctcttaggagaaaccaggggagcccaggctttggagggagggtgctaagctgagatggaacacagttgtatgtgtctgctgtgtaagagtacacaccccatgtgaccaaggacctgagacaggtcatgactgcaccacacactaaggcctggggggagggggtgggacatgccatggctctggccttaaaagcttaactaacactttcctcaccctccctggttcccctgaagccccagtgcctgcagggtatgagtgtgcagggttggcactctctgggctgtggtctgtcccagaggttcagatgctactcgccactctctcctgtcttgtttatgcatgggaccatagattttcttttctcttc

SEQ ID NO: 12196 - DNA, 1067 bp, Homo sapiens
cccaggcaatcttttctaattgatgcagaatcctgtagacatttataaatagccttccttcctccccaccctccccccaacaccttcagccacttatttaagagtgtttttcttttttagacataagctgttgaattgggcccttctctcagaccctcaccccagcttgggccaggtggcagggtgggagcactactcctggggcacccgttcctctggggccaacttggatgtgagcttcctgagggacatgtgcctttttccagtcatgccaactttccttttttttttttttttttttttaagacaggctatcactctgtcacccagactggagtgctggttcacttcagcctccaactcccaggctcaagggatcctcccaccttggcctcccaaattgctgggattagaggcatgagccactgccctgggcctcaacagttgttagatttgagtctttggatatagacagacctggctctttcttgagtggaattcttcccctgcctcctgtggcctgtttccccctcctaaagagtctacctcctcagagctctgaggggttgaggaattgctggggcacttgcctctcacctcatccctgcctccaggcctcgcaaagtgaggtaatgtggtggaggggagctgggggcggtaggtaacagctgggggattagactcattctgtgtttgtgccctgttcacagctcctctgacaactccttagtgacaggggcaacagctttggtacacacagggtggtgaatgaggccccgccctcccaggggtcctccccagacccagcccagagggaggctgtgctggagcctgagctggccaggagagtgtgtacttggttcctgtttcagttgcttctgggccctcagggcactgagcccttccttgctcctgtcaagagggattagggtctctgctggcaaggggaggagggcggataccggcaggggagaagaggctgggaaggtgctactggtagagggagggtgtggagtgcacgagactgtccacactctggtctgcagccgccactctgtggcactgag

SEQ ID NO: 12197 - DNA, 1074 bp, Homo sapiens
tgcactccagcctgggcaacaagagcgaaactctgtctcaaaaaataaataaataaataaataaataaatagatgggtctccacgctttgttgccttaggctggtttccaactcgtgagctcaagtgatcctcccacttcagccttccaaataggtgggactattttattgctctttgaccattttaattgtttttgtaaactgtctgttcatatcctttgcccattaaaaaaaggtagatcatttgtatatttcttattgatggtagaaatcctgtctgtgttatggataataactattctttgtcgtctgcatttaaaatattttctctttttcacttatctttcagcttttgagacaaaagtcatgctttatgggaaaatatttgaaacatttctgtctttgctaggaacaagccagggatgtttactattaaaactaagattttaggagagctcctggccaccctaaagcctccttgatttcatatatattcatcttacaaagagaaacgattgacaatgtatcaaaactatggagttcagcaacatgaccagatgtcagattaacaaacaaaaattatataaataaaatataagaatataaccaacactaaaataccatagaataaataatctgattcacaataaaaacattatattttggccaggcgaggtggctcacacctgtaatcccagtgctttgggaggctgaggtgggaggattgcttgaagccaagagtttaagaccagcctgggcaacatagtgagaccctgtttacaaaaaattaaaaaattaacccggcatgctggcatgtgcctgtagtcctagctactcaggaggctgaggtgggagaattgtttgagcccaagagttcgaagctgcagtaagacatgattgtgctactgcacttcagcctgggtgatacagcaaaacttattctctaaaataataaataaatattttttttttttttgagatggagtctcgctctgtcacccaggctggagtgcagtggcatgatctcggctcactgcaagctccgcctcccgggttctcgccgttctcctgcct

SEQ ID NO: 12198 - DNA, 1034 bp, Homo sapiens
cttgattcactgccctctagcaccacccatcctggtagatggagtgcttaaccccaaccgtgccctatgtacagcctgaaccaccaaacagacaccaaaaaaattcttcctgtggtttctggggctcccctgctccacactgagaggctccttaaaggtgctagcccctgatacagctatccccgccagttttctccttttttcataacttccttcccatccccaaatcattaatttttcattaatattgtacattatatacacaggaaggaaatacattattttttttaaatttcataaccagcctgtttagattccagtcttcctagctatatcacatatgccttgttgatatgctctttctgctttctttagacttaatgtttgacgggggtgggggtgtctggaagaacaggaaaggtggggatcctaaggcagattaaaggactccctccaccccactacagcctcccataactctagtcatccctctcatagtacaggactgatttctctgtgtctgtttgtacacacaaatgtgcatacagacataaattcccccaccccataccaaggtggttacctagcaggaatgagcgtaggtggctgctggccaccattaccaccgtctgcatcagctgtgttgtctctctttggggtaaagtcctaccccagaatgagaaaaggctggggagagtagggcaggttaaaggagcttatgtcctctgtagatgtaggtttgtatcatagctactagggtttatttttttaatggggggctaatagcacagagttatctcaccagcagtagctactggtgagtgatgttttagctgtaagaagtggctatgagcaatagtttcactgactttaccttagggcagtgccacagtaatctgggaacttgttagaaatacacattctcaggccccatcccagacttattgaatcacagactctgggggcagggtttaaaagcactccaagtgattctaatgcacactaaaggttgagaaccatttcttagggataag

SEQ ID NO: 12199 - DNA, 1095 bp, Homo sapiens
ttcacttacggagaatgtaaggttacctttgatgtatgaagtagcagtattttccagtttttccataagctttattccttctctctacctgccaccaaaaagaaagaaaccctcaagagttctaattctttttcatctatttgcagagctatttgggtacctcattttgtcccttgactttagtgtagtggtggggtctttcccaccaccccactaagccttggcaacctcattttgtggccttattattaaagattgcttggtagtgaaaagggaagggcccagaatctgactggctgattctgtctcctcccctccctccttctttagtttaaccatcagggcagacaggaacaaagtatttcaaagcttgttccatcaagttagggattaatcgattcctttatgttttataagagtttaccggccaaagcatattgtcatctttggtcatttttctgctcctgcttctctctcttcattcccctatcaacattaccgcccctgtctctcttctgtaactacttcagactcagccctcctggaggctgtcatgtaggggactctcgagttcctttgttctaccccatctctccccctcacacatctgtctgcttttctgagctagagtcttctgttcacaagtgcccatcaccgtctggactatcttctttctctttcaccaggttcctagcttagccactaggtcttccaggtcctccagagtttcttcaacccatttcttctctcttctctttacatgcagtgctccaggatcttgaagcgtcatagccaagatgctgagtgggtttacttgagtataagattgaaaggagggaggaagaggagagggaaagtgcagaactggtcccagcaaaggaccccaggttctggcctgggaaattggtgactattgctctcaaccattcttactttgaagagttgggttgcagagggagcaattcatctctcttgtccctcttccacgttaaggcttctcatctccccttggctctgaactatgcagtttctaccaggaccataggaagcaattcagagccagaggcctgtggatagataggtcagctttaattg

SEQ ID NO: 12200 - DNA, 1032 bp, Homo sapiens
cattaaattgagttggaaatttcttctccatttttttattttgggagagataatattagtctgaattttaaaaaattatttcttggccgggcagggtggctcacatctgtaatcccagcactttgggaggctgaggcgggtggatcccaaggttaggagatcaagaccatcctggctaacacggtgaaaccctgtctctactaaaaatataaaaaattagccaggcatggtggcaggcgcctgtagtcccagctactcaggagactgaggcaggagaattgcttgaacctgggaggtggaggttacagtgagccaagattgcaccactgcactccagcctgggtgacacagcaagactccatctcaaaaaaaaatcatttcttaattatctatattaatggagaatataattcagtagggcctagagtagagtacaagattcttttttttttgtcagagtctcactctgtcactctggctggagtgcagtggtgtgatcttggctcactgcaacctccatcctggtctaagccatgcctccacctcccaagtagccaggattacaggtgtgcaccaccacgcccagctgatttttatatttttagtagaggtgggatttcaccatgttggccaggctagtcttgaactcatggcctcaagtgaccacctgcctcggcctcccaaagtgttgggattacaggcatgaaccaccatgcccagcatcttttttttatttgtttttgagtcaggttcttgctctgttgcccaggctggagtgcaatgggacagtcatggctcacttgcagcctcaaccttctgggctcaaatgatcctcccactagagcctcctaagaagctggaatgacaggaatgcatcaccatgcccagctaattttatttatttgtagaaacggatctcactatgttgcccagactggtctctaactcctgggctccagtgatcctcccaacctcggcctcccaaagtgctgggattacaggcataagccactgcgcctggcctcacatgta

SEQ ID NO: 12201 - DNA, 1009 bp, Homo sapiens
gggttaaactctgttcatttttctttcacaacaggctgctgctgggccccttgacatgtctctgccttccacaccagacatcaaaatcaaagaagaagagccagtggaggtagactcatccccacctgatagccctgcctctagtccctgttccccaccactgaaggagaaggtaaattctctaccaaggatcatctcaaatgttaattgataaagttttgattcattaattatataaatagtatgtcctaactactcaggaggccaagatgggagaatcacttgagcccagaaattcaagaccagcctgggcaacatggagaaaccccatctccacttaaaatacaaaaattacctgggcgtggtggagcatgcctgtagttccagctacttgagagtatgaggtggaggatcacttaagccctagaggtcgaggctgcagtgagctgtgattgctccactgcaccccagcctgggcaacagagtgagactgtctcaagaaaaaaaaaagtatgtattataggaggaccgattgtatttaaaggaatatttagaagatttatataaattatacctattctccttcccagcaatttcacttataagtctatatggaagagaaattagtgcatatgtctaccaaaagaagtatgttagaatgttcatagcaattgtattcttttgttgttgttgttgttgttgagacagtctcactctgtcacccaggctggagtgcaatggcgtgatcttggctcactgcaacctctgcctcccaggtttgagcgattctcctgcctcagcctcccaagtagctgggactacaggtgcgtgccaccacgcccggctaatttttgtacttttagtagagatggggtttcaccacatttgtcaggctggtctcgatctcctgacctcaggcgatctgcccgcctcggcctcccaaagtgctagggttacaggattgagccaccgcgcccggccagcaattgtattcttaatagccaaaaat

SEQ ID NO: 12202 - DNA, 1051 bp, Homo sapiens
aatttatttttatttttgttagaaatagggtctgctgatattgcccaggctgatctcaaactcccgggctaaagcagtcctcccgcctcagcctcccagagtgttgggattacaggcatgagccaccgtgcctagctcattttccttctctctaaagaacttcttttaagatttctggcaaggcaagtctgtgggcaacaatttctccgtattttggtttgcttgagaaagtctttatttttccttcacttttttttttttttttttttgagagaagatctcactgtgttgcccaggctagagtgcagtggtgtgatctcagctcacctcaacctcctgggcttaagcgatcctcccacctcagcctcccaaatagctaggactataggtacacgccaggacacttggctaattttgtttatttttcattgagatgagatctcactgtgttgcccaggctagtctcaaactcctggacacaagcaatccatctgccgtgctgggattatagacgtgagccacaccacatgtggcctttcttctgaagaattgtgcaggatacagaattctaggctgatagggttttctctctttgactgtactctctgcttgcatggtttctgagaggttagatgtaattcttgtttttgctcctctgtaggtaaggtgattttccctctgccttctttcaagatgtttctctttctctttgattttctgaagtttggatatgatatatctaggtgtagttttttgtttgtttgtttgtttgtcatttagcctgcttattgttcttatggtgtggtgtctgacattgatttggggggacatttttagttatcgctttagttattgtttagcaataccaaatattgtgtgtgtttctttctttctttctttctttcttttttttttttttcagagacggagtctcgctctttctcccaggccggactgcagtggcgctatctcggctcactgcaagctccgcctcccgggttcacgccattcttctgcctcagcctcccgagtagctgggattacaggcgcc

SEQ ID NO: 12203 - DNA, 1031 bp, Homo sapiens
gtgagcgtgcacgtgtgtgcgtgtgtgtgtgtatttgtgtgtgtgtgagagagtgatgacaggagttcctataaaaaagtaaatgcaaagaaaaagtggttcagggcagcagcctgtagaactgagctaaaagcttggctcctgagaagttatcagagagacagtgacagtttaataggatggatgaagactacattttaatgctaagctttgattacctccattttatgtctctgttctcaagctcactgacaataacaaatcttacattggcatagttatttgaatcaagtgaaaagaggtgttcagatagttttaaagatctcagttgtagtacatacctggagtttgtataatactagaatgggtaaatagtattatagacatctgtcacttcagtgaacatctttttttttttttacatggtggcaatctatgcacattaattttttaaattacattatgttcataacttcagacatttgtcattttacttcagtttcaggtattttttaggactaacggagactgtagtctccttaggttgtacgtattgtgagggaacaataaaagtagtctaaaaatttcaggggtctagatgtctgtgtatgttttataaaatatcatattatattcaacactttaactttccctcttcagtctttcctgttctttccttctaggctttacctagataattgcaatagtggataggggagactttatttcagccttctttcactttctgtgcatttgaaactataactagacaggaccttatggaggtttgtactttcagttatgcatatttgactgcccagatgaggagattgtattcacatacatagctgctcttggcagagtcatggttaaaggtttgaacatactgtaccttgttggctattcccatagtcctaagggaggcattttgcttctccatagacagtaatcggcttgtcagagtggagtggctttttgtttttcctttatctagtagaatggagtgggctaagcctttctgggaagcaatt

SEQ ID NO: 12204 - DNA, 1048 bp, Homo sapiens
ccagccctcccattaaatgggccatactggtactgtgggactctggatctttaattctgtccctttggcaagttgccctattatctggcataagcacaaaagaaaagcaggaaagaatgagttggtggtgattactaattctttatgttagggaagcatcttgaattggagaattacgaggggaagcaatggctctggtaggtaaatgccatttgtggtagtatatgctatgtttacatgtttcgacaggtgaaggcaatttcaggcaaaaaaataagccttttttccccaccctctgccaagagttttttaaaattctaatttttattaaataattcatatttcattcaataattcatctagttcccatctggtaagagtgcctgcatgctgtcaggcagctgaaaatacacggcattatacacaaattaggccaaatgctaaaccttattttttgtattatgttgactttgcagtaactttcagttcactctctggatgctgcagtaacctgtggtggaagtagaccgctcttacgtatcatatagacaaaactgggactgggatttttttttttctttttttttttttgagatggggtctcgctctgtcacccaagctggagtgcagtggtgtgatctcggctcactgcaacctctacctcccaggttcaagcgattctcctgcctcagtctccccagtactgggactataagcgcccaccaccatacctggctaatttttgtattttttagtagaaatggggtgtcgccatgttggccaggctggtcttgaactcctgacctcaggtgatccgcctgcctcagcctcccaaagtgctgagattacaggcgtaagccaccgcacttggcctgggactggaatttttaaaatgtagacatgctaagagcaggaattaaactcaagtttcttaatgtcagatctgatactcttgacacttgcccttagaaacatgtagttgattatttttgtttttcatgttatatttaaacaaatatatgtatgttactagagcacagtagattaa

SEQ ID NO: 12205 - DNA, 1120 bp, Homo sapiens
tcagcaagaactctttccctcctctaaataggtagaaaaatgagaaaatttagcatcaaataacagaatcaagataaaagtaaggaatcctgcctgatccttgtgttgtgtctactctagcccttgtagtttacttcctggttgaaaatatattagaggacctcgttgaaataaaattctcattttgtgattatattaggaaagcagattctgggacatgtagtgaaattttctctagcacaggagttaggaatttttgcagagatgaattgctttccagacatgctctaagttttcagccttaatggtcctggtcattgcatttatttacttttgtttacttgtatttattttttgtagcatgttgtagttcccgaaagtgctaaaaaaatcatgtatttaaaacaaaccaaccaaccagaaaacccccctcatcctggggctgtgtgaagaagaatgaagctctcatttcccagtacccaatcatcagcttgagctggcctctcctaggaacagaatttattgaagcaatttatcctggctaaatgtgatataaatccatgtacatgtatgtacgtataggctctgttccattacagtagtgctgtagcatcattttccttcctagttagaccatgtttctatcacactgaaagatgaccaagaaaccccttctattttatggggcaccccacaattttaaacaccgattagttgtggaattactgattagacaacgagaaatactggtttctaaccccacagtgagtcctaagagagtaggagagatgttacctagctaccctctgagttttaagcatggttttccgattaccagattcagtctagcacgttaacattttatttcaacgcgagcctgacagattgtcctgacatttcagtttatttccaagataaaaatttgaaatttggttacagttctgaagtcacttgcaggcatattcaaattgtagttcctctctcatcttccctcgttcgtattcttttgtatacctttctctttcatggaaggatgtttgaaaatatcctttaggagtttataagactattttaccccccactccatttttctcttccaccttccaaaatacagtttatc

SEQ ID NO: 12206 - DNA, 1025 bp, Homo sapiens
tggcgtgatctcggcccactgcaacctccaactccctggtttgagcgattctcctgcctcagcctccggagcacgtgccaccatgcccagctaatttttgtatttttggtagagacggggtttcaccattttggccaggagtgtctcgatctcctgacctcgtaatctgcccaccttggcctcccaaaatgccgggattacaggtgtgagccaccacacccagcctggataatgaattttaaaataattacaataaaacatgcttaatgttaaaaatgtgaatattagctgggtacaatggctcacccttgtaatcccagaactttgggaggccaaggcaggaggatcgcttgagcccaggaattttgagaccagcctgggctacatggcaagaccccctgtctctacaaaaaaaaaaaatgagctgggcatggtggtgtgcacctatagtcccagctactcaagaggccgagacaggaggatcacttgaactaggaggtcgaggctgtagtgaactgtgatcatgccactgtactccagcctgggtgacagcgagaccttgtctcaaacaaacaagaaaactcaccataaaaaacaaactatgagcatcacttaattttcctaaataaaatgataccccagaacatgtagcccctcaaattcatgtttcgggacatttatttatataataagcatatgtaacatgtttatatataataagcatatataacagtacctgttacgctctgaagtgttggtaaaacatgattcagttgtaagtagacaactttttagaggttgtaaatagatgtggtgtccattcttgtacctttttttttttttttttttgagacagagtctcactctattgcccaggctggagtgcagtggtgtgatctcagctcactgcaacctccgccttctgggttcaagtgattctcccacctcaccctcccaagtagctgggattacaggtgcctgccatgacacccggctaatttttgtatttttagtagagatagggt

SEQ ID NO: 12207 - DNA, 1132 bp, Homo sapiens
gtttcggaaacttttttttttttctgaggcagggtctccctctgtctcccaggctggagtgcaatggcgccatcttggctcactgcagtctctgcctcctgggctcaagtgattatcctgcctccgcctcctgagtagctaggactacagatgtgcgccaccgtgcccatctaatttttgtattttttgtagagacagagtttcccatgttgcctaggctggtcttgaattcctaagttcaggtgatctgcctgctttggcctcccaaagtgctggaattacaggctgggcccccatgcccagcttgttttggaaactcttcttttttttttctttttttttttttttttgacacggagtctcgctctgtctcccaggatgcagtgcagtggtgtaatctcagctcactgcaacttctgcctcctgggttcaaggagttctccccctcagcctcccaagtagctgggactgcaggcacatgccaccacgcctggctaatttttgtatttttagtagagacgtggtttcaccatgttgcaggctggtctcaaactcctggcctcagttgatgcgcccacctgggcctcccaaagtgctgggcttacagtgtgagccacctgcccttggaaactcttttaggaaaaaaactttattccctggacatttcaacttagaaatgaaagaattaaactactctctgaaaacaattttatgtagtttccctgtaatgttgacatctccaatttagacctaacttttcattttcttctttttttttttttttggagacagagtcttgctatgtcagccaggctggagtgcagtggtgcagtcttggctcactgcaacctctgcctcccaggttcaagcaattctcatgcctcagcctcccaagtagctgggactacaggtgcccaccactgcgcccggctaactttttgtgttttagtagagatggggtttcaccatgttgctcagggtggtctcgaacgcctgagctcaggcaatccacctacctcagcgtcccaaagtgctgggattacaggcaagaaccatcgcgtccgaccctaacttttcattttctgtttggaataaaaacctataccaactataaacacacacacacacacac

SEQ ID NO: 12208 - DNA, 1034 bp, Homo sapiens
acttttgagaagggaaataatgtctgaaatatcagtaaagctattacatgaagagaaaccagagtacgtagttgtattaacctttggttttctgcaatcagctgaagcctttctccctggccaagaagttgcccctatagcacattgagaccaattcattgctgacccgttagcattaactactgagctgggttctagtatttcacagtaagtgcattgctattggacattcagaacatttccagtttgcctggcagcagtacagaaaattacccagtgagagagcagagtcccttgttttggtcttctgccctagaattggtgattgctttgactagggcactattaaacccaagattttttttttctcactagtgctaccatctagcagaaagctagagtgataacactgctcatctttcaacttgtggatcaaagtttacaccctgtggtagtttcagtgttgtaatttttaaacacgtttgtttaccacggttttaaaatgttaatagctctacttactgtatcttgttctctttcctttcctcatttccaacccaaaatgaaaattgttttttcaaccaactcttaaactacttctttgcctggagtaaagtcactggctctgtctgaacacagctgctctgaagttctcagaagttattgttttgtgcatgtcaagaccgagtttttcctaggctacagtgggagggagttagtgttacagcagcctcctatccacgtctgataaggaggagccttctccttgcaaggaagttttaggtggaacagatagaactccacgtaaatgtctaataaagctagctcttttcttgagactagttagcatactggtatataattgtcccttatcccttaataaaagtactaaagttaaggtacaggtgtttctttgagaaaaacaaatgcagcattcatttaaaaggaaaaagcattcatttcttttgttgttggtttctcagaaaatggtcctacgattttggagttcatgaaaaagtcttctgtctctttaa

SEQ ID NO: 12209 - DNA, 1025 bp, Homo sapiens
tttgggcatgatggtgttaccctaaaagcttctttattatgtgagataatcttgaagagggggattctccctgagcccatcttagatatttatccttttctttgtgtgaactagaaattcagtcttttctcttctccttctaccaggaacccttctctgaagcaacagctcttctcctacgccattctgggctttgccctctcggaggccatggggctcttttgtctgatggtagcctttctcatcctctttgccatgtgaaggagccgtctccacctcccatagttctcccgcgtctggttggccccgtgtgttccttttcctatacctccccaggcagcctggggaacgtggttggctcagggtttgacagagaaaagacaaataaatactgtattaataagatgtttcttgagtctcctgtgtatatttcttttccacagttggctgagtgccttcgtgagagtacaaggcccgaagggtagtgatggtgctaaactcaacatggatttggctgagctcactttttcttaattctgtttcaggaaagctttatttgaaatagcataacattttaaattattttcacctggcatggcctgctacttgcctgggaagattggggtcagtagcaacttcaagttctggcttaaaatgttggctaataggctttctgtttccactgtcactctcctggctcaggcccttattgtcatccacctcgtctattgcaagaacctcttaactggccttctgcctccagtctcttccctccagcatttacttctccttaccactgccaggtgaatcctccttaagcataagactggttttatcagttaatggttcaaaaagtcacctcaactttctctgctttatctgtttagtcctatacactacataaagtgactgtcatttttcagatgttttcctgtctttaccatatcttcctgccttttcctttctctgctcatttctgctttctttccctgcatctttgctcactttcctctttttcgaactct

SEQ ID NO: 12210 - DNA, 1039 bp, Homo sapiens
tgcccgcttttctttcagggctcaggatgagtgactgcccccagtgggggtgcttggcaggtgggggaggggaagaggcttcagggcagaaggctcaatcgcttttattgaccccaactgggtgatgaaaggtgatcaatgatgatcgatggaaatgacagcctgaggcttggggctgagagggcatccagacagcagtggtcagcccatccttgtgcctcctttaaccctggctgcctttctgtctcagaccatctgtctgtccccagtactaaccatcaaaccctgtgtagggctagatatctcaatgtagtccctgtacttagtcccaaaggctagttgggctagagggaaacaaattcttctggaccacggttcacaatgaagaactggaaaaagacagacaggctcaaaccatagggccaagaatccttgtctcaggcctttgggtgaaggtaggggtagggggtgcaggctggatcctcatgtaaggtataaagaagtcagttggtccagagcccgggcctcaggtctccagtttgaagcctttcatgtctctctccttcctcacaggtgccctttggggaagtaagcatggtccgggactggttgggcattgtggggcctgtgctgacccctccccaagagcatcctaaacgaccagtgctgggactggagtgcccacagtcagaagtgagtggtgcccgattctggggctttttccggaacctctgtggacagcctgaggtcttcttccatcactgttttgtccacaatctatgccctctgcttttcctggctcccagcgggcgcaaccttactcctgctgagctgcctgccaagcagcgagaacagcttcttgggatctgtgatgcagccctctgccggcaggtgcagctgctgggggtgcggctggtggtgggagttgggcgactggcagagcagcgggcacgacgggctctggcaggcctgatgccagaggtccaggtggaagggctcctgcatccctctccccgtaacccacaggccaacaagggct

SEQ ID NO: 12211 - DNA, 1076 bp, Homo sapiens
gattcccaggcctcacacgggacctacttgtgttgggggtggggttgggacactatggcaaatactgcagtgttctgaggagggaagactttatcaaagggatggtttgagctgcattttgaaggatgggagtgatttggatatgtggacaggttggggaatcaacagtcctagttgactggatgactgctggatgatgtcctggttgacttcaggagtgtatttggttggactgtagaaatggtatgtgcaaggttttgggagttgaggcaggaaaggcattttgaaaatgtgagtagaatggtcaggttggaacactgggtttgaatgggagtggagtgaagcaatggcctttgcagtttacaaagcttgctgtcatgttcctgccccctcccttctccttcctcccacctcccttctctcttccctttcttcttcctctcccatttcttttctcccttcacctaaacataacatctcattccatccttacgtctgtttgtttgttttgagacagtctccctctgtagcccaggctggagtgcagtggcacaatctcggctcactgcaacctctgcctcccaggtcctggttcaagcaattctcctgcctcagcctcccatgtagctggaattacaggcacgtgccaccatgcccagctaatttttgtatttttagttgagacggggtttcaccatgttggccaggttgatcttgaactcctgacctcgtgatccacctgcctcagcctcccaaagtactgggattacaggcatgagctgttgcgcccggcaaatttatttatttatttatttatttatttatttatttatttattttttattttatttttttttgagatggagtcttgctcttttgcccaggcttgagtgcagtggcacgatcttggctcactgcaacctcagcctcccgggttcaggcagttctccctgcctcagcctcccgagtagctgggattacaggtgcccaccacaacgcccagctaattttttttttttgagagagagtttcactgttgttgcccgtgctggagtgcaatggcacgatcttggctc

SEQ ID NO: 12212 - DNA, 1038 bp, Homo sapiens
gagtgcctccaaaggacaggggagtgcatatgtgatttcgattccttcctcacttcccggatttgatgtcagagaagtctgacatcagtctgaagtcggcccttggtggtcagccttatcgcttggtccaactccgctgtctttgtgcttaatgtagtatgacaccgtattttataaaatatctacatttcttaagcctctggctcttggggcgactttgggtagaacttacaagttcctcctttgggttctcttagtgttttgttccgggtattaaagctcacatcacactgtattacagttagttgtttatttgccctcacagcagattatgagcttacagaaagcctggcctacattttactctttttggatttcttcctcatcaagagactgctgcagtgcctgtcatgtaagagactcataagtattgaaaaaaaaaatgagttaacaggtggtaggttggatggagtatgtgattttccatagagaagagagttaaatgagttgctcaagagaaccttcttagagatgaaacaggagtagaattcaaatcaattgacttccagcctgtggctcttgctatgagatcaggctttgaagttatggaacaatgaaagtagtatcttgccactcttttccccagccttgctgtttccaacacaggtgtctaaatgtcaaaggtgggctcaagacttctcgagattctagagctggagcagccaatctgctaatgttggtgttgcatggggagatgcaaagcaaggtcccctgaaacactggcgttctccacagcacccttctcagcttttgtatgagcccagtttgtcctgggtagccacctggacaacagatcagttaaagactactgagacagtcagggaaggacttcctaagttgggcctctgatttcttttctctcccacttcccctaggctagggtgagaaaataggtttatcgagctgttgtgtcaaccttgagttcttatcttggagaagtcactcctgacccaggcagaaagttgagaggaaggaatg

SEQ ID NO: 12213 - DNA, 2174 bp, Homo sapiens
aaaaaaaaatctatttaggtcttggaatggttcctgtacctagagtatccatattgaaccttttttttttttttttttttttttttttgagatggaaacttgctcttttgcccaggctggagtgcagtggcgtgatcttggctcactgcaacctccgcctcccgggttcaagcagttctctgcctcagcctcctgagcagctgggattataggcgcctgccaccatgcccggctaatttttgtatttttagtagagacagggttcaccatcttggccgtgctggtcttgaactcctgaccttgtgatccgcctgcctcggccactcaaagtgctgggattgcaggcgtgagccagcacccggccacagtatctttattacagctcactgcagcctcaatctcctgggctcaaatgatcctcctgcctcagcctcccaagcagctgggactacaggcgcacaccacggtgtctggctaattttattatttaaaaaatgttttgtagagacagtctccctgtgttgcccaggctggtctccaactcgtgagctcaagtgatccacgtgcctcagcctcccaaagtgctgggattacaagcataagccaccgcacccggcccctagtgaacattttactgtatgtgttgataaatcatcttttgagtttctgttgtatgtggggacttcctacactggctgctgtgaagaggtatggaagaaaggagaggctttctgcctagaaattctttgagaacacctgaaaagacagtttaatcatgtcacaacactcttaaggctcaagtcagtgttctggtttccggtagctttaggattggattctaaacgagggctggtggtgagtttggtgtttgtctcgtgtcaccctcacccctcacctcctcagtttaggataagagacataatgatttctaccagaatccaaagtaaatccaaagggggagaaaagacataactgttttttcttctaccttttttttgttaaagagttacatctctcacaggaggaaagaattcaagagtctatatgattagttacagagaatattttcatcccctctccctgaatagaaaagcaggggtcaccatttgtatccttacccttgaggtgtttttgaagatgctgtaactcttgaagttgagctgaggcagaaaggttggaaaaatgcagccctctgggtattgtggggagggatgtgatgtagtaagagggtgttttgtggtgctaggattcccacgccaccaacttgcagctttataagagcgctaccaagaaccaccactggggaaaaggttcttattcattgtttctgttggaatgtgatcttgctttctggattttaggaattcaggttactcagtataaaactctgagaaatcagtgtgacttagtccttcacctcctaagataaagtgaatatttctttacaaaataattcatgtccttaatgttaaagatgtaattttattttcaaaacatctataacatgactttcagaagcagttcatttttccaagattcctcacattatactagataaataataggccctcagttaatacccttcagttattgaattaatctagtttgtggaatgaggtgtatcctgccaacttccctctgctcccaagtacactctgagaggtaaaatgctctgggaaatggaacaagaatcgagtggatgctgactctgtgtgcccacctcctcaactgattgataatggttgaccttgggcaagtcacttctttcaatgcctcagttccccatctgtcaaatggggttaataatactgacctacctcacaggggtgttgttgtgaggcattgtaaatcaaagttaatagaatacttcagggtcctctgtggaggatgtcttgagccagagtttaagcctgacacacaggctttggtcctcactgagctgtctccaagactggaactacttagtgactcggcaaattttctgccccccacccctcatcaaagctgctagttcagatgttgacagtgttttcatgaatgttggaatcttactagtccagacttacttaggatgttgttggggaaggcacttgggattttctgtgtcttgcattcacagagggaggccatttcagattcaagagcattggattagggaatcgtgaggcagggat

SEQ ID NO: 12214 - DNA, 1487 bp, Homo sapiens
gaataaaaaatatagtgttgagatccgtacttttgtaatcagaccaccaagcatgcctgtggcaaggcagagaggaaaggtctggagccagtgtattgcagtttcatgctacctttacctgctaatcataaaaattatgttttcaaaagtagatgatactagccttacacccaaaaacatgttctgaattagatgccccctcacccaatttttattaagctttctaaattccagccacattgctgtacatcaacattggtttcattcaacagacatttttttggcctgaagatacaaggttcagaaagaggccatccctgccctcaaataactttcatactggtgtatgatgaactgaccattaatagtttaagtgcttacaagctatgtttctgttcaaaaaaaaaatagtttggtataataaatgctataaaccaatacacatttctgacttgggggcagagacagactggctgatgttgtatagtttgtagccctggagtaagaagttgacattaatttcggcctatatgtggaaaagacctataacattgggtgaactgagccagctggccatagaacacaagaacatattccaggaaataaatatagctggagggttggaaatgctgttattactgagagagaaaacaggtgagttgggattgagaactcctgattttcatccctggtttagattcttggccaaagtagtggtagagttaatctttgcttgtggaaagcattaactatgttgcagattcagttgtgttacattattgtgggttctataacaacatattcctcatggacactttaccagagttgctcacacctttttcaatttctcatcccttttggaggaatgaacatgagacttaactgcctttaagcctaaaacggacatgctttccaatgacaagagattttctaaagagaagtcttggagcacatctgttaatacctgagcatctactctgagcagtgcagttttattcaatactggagagagggtgatttctttttttttgagacggagtcttgctctgtctcccaggctggagtgcagtggcgcaatctcggctcactgcaagctccacctcccgggttcacgccattctcctgcctcagcctcccgaggagctgggactacaggcgccggccaccacgcccggctaattttttgtatttttagtagagacggggtttcaccttgttagccaggatggtctcaatctcctgacctcatgatccacccacctcggcctcccagagtgctgggattacaggcgtgagccaccgccgggccgagagggtgatttctaagcagagaattgtatcagttatgtggaaacctttgccagaaatacatataccttgtatattaaatctgagtctcagatttaatcatcgaagcgtagctgggttaagaaacagtctgatcgtaaggatgttgtcgattctgacccatggatgaccacaagaaa

SEQ ID NO: 12215 - DNA, 1038 bp, Homo sapiens
atccaagtggcccagtgtatgcctcccagtagcagtgggcatgtaaactgcagcgaccttatttttaaaaccaaaaacctagtatgtggacaaagaacatgacaatatttggtactgagattggttctgagaaacctggggcatgtggctgctgtggttataggtaatatttaagacattcataaaaatctgatattcttttaccgaaataaccccagtatcatctactacttaccatctgttaatagactttactctgtcttttttgtcttcggtttattgtactgagtgccgccaaaacaacttttgttctcttcctgcctacctgcagctggttctataggaatgtagggagccagaggccagtattgatttcagcccttagcacaaaggaaatcagatgcctgcttccagcatttgttagtgttgagtagatgttcttgccctagaagaattacagcctcaaacagaaacctgtttcatggagctttctcccctcagaagagttaatagttaagagctaagcactcttaaacacctaagtctcaaatgctaaaaatttatttttcttgtgtttagtcctctttcaagacatctttctaagcctttcagtaatcaacattaaaagatctccctttcttcagagttatagcacagctttgcccagtagaggctaccaaggacagcttagcagccctttgattgctgggctgggcagatggccttcaagttaagatcaaatgccgggaaaatcagcctacatgggagcacccattttaaacctggagagaaccatgatgttttcttcttcaaataacaatctagttttttttcccccagtactaaaattgtattgtctttcagacaatataatttttatttaaaattggaacatactatcttcatgctttctaagctaaatcttcatttagatttcactcctcagtagatcccagagaagaagctatataggatccagattcaaatttaacagtgtcttctacttttttagttatgttttctatcaactcctgctgc

SEQ ID NO: 12216 - DNA, 2318 bp, Homo sapiens
ttacttacatttcttcttgaaaatattgaaagggtccttttcaccttgaaaccaaggtgaggaggaaatcaagtcaactaaatccatataatgacataaacgtatgtctggacagattctttcactcttcctctccttttaagtctcatattctttctctccaggaaagacacagatgaagctgacctggttcttgcaaaagaagctaatgtgaaatgtccacaaattgtgatagcattttatgaagagagactgacatggcatgcatatcctgaggatgcggaaaacaaagagaaagaaacagcaaagagctaaaggaggggatggtctctgtcatttctctttgtacataatacattcacctccctgcctcctctcctttctacccacccctttctatcctaaacacatccataaaaaatgtgcttatcactgtgctccacaggagaaatgttggtattggttctcttgtaacataactgatggtctgattaatgataagtgtctctctgtgaagaccaggcatttacatactgagtgtaatacccacaatttttttttcctttgccctgatctcttccttctgcttccctgtgacctcaagatgagtttcaactttttaatcaccttagagtcttgatcttttcagggttggtcgctttttaggttgggggattttgttacaatgatgttgaattttggtttcttgctttggttcttagaacatgttgctgactagctggcctttgttctgacatgttgagatggaaaggatgttgcccatctgttaaaaagccaatagcaactgcctacctgttggggctttcccaaccttgttcagctctacccaggagaatacagggtttctggtgtggtcttctgggccaccctctgttgttcatcctcactcatcctcccagaattactccatcctttggaagatttgaaattttacactgaaatctgtcaagacactctttttagccccaggactttcggtattgcttttagcactccccacttctgcttctgtaaagtgatatcaatttgtgataaaatgacaagattattaactgtgcagatttgtagctatagtacatgaggatgatggggtagggtacaattgtctttattatcatatatggtatgtatgtatgatttctttccattcctcatatttagactgtatatttatgtaggtgtgagtgattgcctggtgcttgcttgtgccaaggtgctaggcaccctccaaccctgccaacttttgtggcctcccaaagcattcctgttaccaaagaggcttcaaacctgaccctcacttctcagtggacccgagtttcccttccatgccattattttcagtggggaagttttagaggtgagctgttggccacaatatcaattttaagtgttcatagcagttatgtctcctgcattcttggctcctggatttaccaccaagagtccccaaaatattaatgctcttccctttttctaccctcaaacttatagttgtatcttattttttaaaatgaattttcatggccaggcacagtggctaccgcctgtaatcccagcactttgggaggctgaggcaggagaattgcttgaagccagaagtttgagaccagcctgggcaatgtagtgagaccccctgtctctaaaaaatataaataaaaataaaggcatgttcctgaaagactgtcaccttggaaagtgacaggccctggcattagcatgttgacacacccttttcttcttactcagcaaaatacttcgttttggtttcttcttgtgttgctattgagaaatttgtctgatcatatccttctgcctttgtcccccaagaaatgccctactttatccttttctttttgtagttgaggagggctagagaatcacaattaaaagtaaggaaatagcagggttttgaggatccttgtcccagccccaaagctgaggaaataagaataaatgcttaatatagccttaattctagagcgcaccagccatgaggctgcttttcttgttgtttttgatttttaaaacatacagctgtctggccaggagcatctaccatttctagattattcagagtaatgaggggaatggatggattgctccagtccacagatgagccacataatatgcaaatcatatacccattcatagcatttgttaacattgcttccctgctcagctgctgattgaattctgtgtgcttatataaattatgtcaaaaattatactgcataattgaggtgacagctgttgctgcagtgacatgacagactggaacaatgaagcttttggtttaa

SEQ ID NO: 12217 - DNA, 1128 bp, Homo sapiens
ccctggaatatgacatttcctgtctctggtgaggttggaggctgttttattttaaataaagcacataagatattttcttgaagcttaggactcttctaaattcatggaaaaattattttaacccccccgcacctacattttgctactacttcctcttccaaatagagtattttaataaaaacttagtcttatagggcagtaatgggtataggcagttttttaggtgggcagacctatagctaataagttctggagatatggtctccaactatatattcttgtaataatttttaaaattttgctaatttgaagtgaattgataattgccactttttatgtgacttgaacatcattctgaggttagtagtgggccctccctgacccagtggttttctggtcagggtggaaatatttagagggtgctgataaacatctttaaagattacaggaaaataataatggagttcagctaagaaaacaatttctgctactctgtaatccagactgtaggcaccatttagcatggttaaggaagaattcttaaaaatgattatggaacaacaacatgggaatttttaaaactagattctctgttgagtaccccctggtgtgcatatttctgagcttaactcaatttccatttgtgtttccttgcttcagctttccttgggcctatgaatggttcctctgtattttgaggaggcttcatgttgatgctgagtctggggccagacttctttttcctcctcctcttcctttggccctgagtcaacttcagttaagagggagaggtaccttcttaactatttgggttagttgcatcttgggaattactgaataatctagtgactaattttgaattttaggactgaaaaattttttctcctttctgcctccctcccatccccaaattagctttctaaaaaggaagattagtgtgtttgagatgtcagccttgcttttgtgagctgatggatgctctgaagggacaagctcaatttgtttaagggaaatgtaccaagtcactgaaaatgtggtgaaaggtgcctaagcaagccttttttgtgtgctgctaagagactgggcaagatgctcagagcacagaaaactcatattttagtggctttt

SEQ ID NO: 12218 - DNA, 1049 bp, Homo sapiens
tggggtattaacacaggataactaacctgtatttgttagctgtgtgcttaaacctttctgaagaaaagattttctacaagggatgtaatagactagctggaacattttcactacatttttagtgagactatagactgtgtagcctgaattttctttccagtagtagtagttcatcaaaattaaacactgacagatttttttctacctgaaactaggtcatagagtaaaaattttcacttgcagtcttactcttcagactcactgaatgcctgttccatcctgtttcattgctaggaaggacactagataaagccatgagcttgagatggtgtacttgaaaggaccgtttcaagatcaggttttataacacactcattatttatttcttctgtggagaggagaaaccaaattggattcaagtatttttctgatagtaatctatgtttcttagaataaagcaagttcatatctgagccagagggcataattatgtcagaataaaatataattatgtcggaataaaatgccctgtactaaagaggtcaactaacaggctgggaaatcttaagttttgtttttaagacaaatccttgaactctctgtgcctcgtttctcatccctaaatctgtgcaactcacctcacagggagttgtggagggtaatatactgctaatttgttcagtgtttcacaacaataaattatgcctaagatctgataaaacatagcaaacctcatttatgtaagtagagacaagcatggataagacttacagataataaagaaaattcattaaaatttttttaacttccttgattattaaacatttttccttctgtttcctatatattttccaaagtattttcctattgtttttccataatagacttatgagatagggcaaataacaaacaccaggttatataataaatgaataaattcatcaagcggacataacaatcctaaatgtcctaaaagctaataataaagcttcaacatacacaaaggaaaacagaaatgaagtaacaagccaggtgcagtggctcacgcc

SEQ ID NO: 12219 - DNA, 1034 bp, Homo sapiens
ttttcctgggattcttttggatccacgtctcaaaacttttttgaccgcaataagaaatatattttacactaatcctgtacacacattgaaacatttcactaaacgtgcagagtactctgatattcttttgtctgcagtatactatttcattgtcttaagaaagcagtcaatttccattgaactgatttcacagctgtttatagacccagggttttgggggaaaaagactgctgatctgaagaataggtcaccaaatcatgccaactttgattgctttctgagtcagttccttccatctccagccccagccacttgtacagatggtcccttgcttgtgatatttcgacttaagatttttcacctttacaacggtgtggaaagcaatttgcattcagtagaaaccatatttcaagtatccacataaccattctgtttttcactttcggtacagtaatcaaccaattacatgagatattcaacactttattataaaacaggctttgtgttaggtgattttgtccaacagtaggctaatgtaagtattctgaacacatttaaggtaggctaggctaagctatgatgttcagtagattaggtgtaggaaatgaattttcaatttttcatattttcaacctatgatgggtttatcaggacataaccccatcaaggagtatctatgtaaacagattaagcagtgacccattatttggtgtttttactcatgtgttttactttgaaagattataggagccaaaccgagactttctagtttactgtcgtgtgcaagtgaaaactgcttgttttattgtgaagtctcacaatgcttaaagagggaaaacaataaaaatattgcaaaatgtctcccaatgtgataggttttttttttttttttttttggaatggagtctcgctcttgttgcccagtctggagtgcggtggcacgatcttgactcacctcaacctccgcctcccaggttcaagcaattctcctgctccagcctcctgagtagctgggattacaggcatacgtccgg

SEQ ID NO: 12220 - DNA, 1034 bp, Homo sapiens
acataagagcaggatgtctcctgcttgaagcctaactgtccaccagaaaggactgctctttgggtgagttgaacttcttccattatagaaagaattgaaggctgagaaactcaggtaagcacttttgttgtgggtatacttttaccttcttggtctcctcatctcccaggtggtaacaaacagaaatgactaaagcctatatgtgtgtgtagtggaaaggagcagagggaactgaatacagagaggatcctgaatacacgatgctgaatagagagaggggactcctgggggtctttggggatggggaaggaattaaaaaagttggagggcactgggtttactgagagcagcgggatggatatagaagaggactgaggtttggagcagaataagactaagatatttaggcaagagatatttagataaaaacttggggaaatatttgagaatgggaaaggactaagagaacctaaggagagagttagggatcttgagatgaagaggcctgggaatggttcaggaggatactgaattaaggtgaggtccaggaacagtttagatgtccagggtcccagaactgttcaagagatctaagttgaatgctaggttctgattccctcttcctcttccaccctctgcctctttagcctctatcatgtggaacagctctgacgccaacttctcctgctaccatgagtctgtgctgggctatcgttatgttgcagttagctggggggtggtggtggctgtgacaggcaccgtgggcaatgtgctcaccctactggccttggccatccagcccaagctccgtacccgattcaacctgctcatagccaacctcacactggctgatctcctctactgcacgctccttcagcccttctctgtggacacctacctccacctgcactggcgcaccggtgccaccttctgcagggtatttgggctcctcctttttgcctccaattctgtctccatcctgaccctctgcctcatcgcactgggacgctacctcctcattgcccaccctaagc

SEQ ID NO: 12221 - DNA, 1070 bp, Homo sapiens
tgagtcactcctcgggaaggggagaaggggaccaaaacctcctcttacctcagagacagggttggggatggcacatggccaagcatgaccacatgtgcactgctgtatggccccagggcactgccatgccttccaccccattgagctagtgcacacatgaatggggggtgcctcctttccctcgcacggccaagtgttcctcaacatgctggcatgggccccaagtgcacgctgggcctgcagctggggcctgcatgctccaacacactagcccacacctcatcactgccattcccgtctccgcacgctgctgctggctgagctgacactcggtgagtgtgatgccacatctgggggaccccaggaagcctgggttggggacagggtggggagagggctagaaagaagaggcagggcttccccgtgtgcctgtctaactcagtgtccggcctgaggggtgttccttgcgccctgccctgggcactaacaggtctgtccttgcaggcacggccagggtggagctctgtgcacagggctcagcggacctggcacacctggacgacggtccctacgaggcggggggagagaaggagcaggacccccgcctcatcccggtccctgccaacagctactttggtagggacctctccccggcccagaactgctctaaccctctgctcctctctcttgtcctctctctccatgctcccatccttctgtctctgtttctgtctctcaccttgtctctctctgtctttctgtctctggctgtgatctctctggtctctttttctctctccacctcttcttcttccaccattttctggcctttctgtggctctgtctccctactctgtggcccctactctggatgtcccctccctggtgtctcaccccaccccccacagggttgctttttgtgaccaacattgatagctcagaccccgaccagctggtgtataaaactttggaccctgctgaccggctcccaggaccagccggagacttggccctcaatagctacttaggtttgtaagctcccacctcctggactctaggggcatggccca

SEQ ID NO: 12222 - DNA, 1030 bp, Homo sapiens
aggggccaaagaggggctggacttgggctggggccctggagtgtgtggagaatcgagaagtgcagtggtcgtgggctactcctttgtcttcacttagctgagctcccagggggtccctctgccccccagctgccaacacttttttttttttttttttgcttttctctctgcagtggctacactgtggctgtccagaagactggggtggttagggcgtatggcatgaagccaggaaggagtgtgtgtggctggaccagaggtggagggactagagaggatgctgctgggtgctcttgttccactaaggatcgattggtctcttctccaccaagagcggactgggcatatctatgcactcagcttctttcttccacatgggcccctcccctcctccctacttttggcctccagaggagatgtgaacatagaacaaggataacttatctgggtgcttagctatgcactgaccagctgtgacactgggtatctctatgagtccacaaaatgtgtgtgttcagtaaacacattctgacactccctatggggcaagcacaaagatgaaaagacagccccgacactcagagagatggccacttctatgtttggaggctgggggtactgctgacttgcctgaaggttgccatttatttatgcagggctgtatcaccccgtttccttttctgcccagggtaccctcatctccccactctctccttccctttctggggtggtctcagtgttctagagacaggtcagtcactgggtggagtgacaaagtgttggagttaggcccatgtggatttgaattccagcatcactgcttaatgtctttgagtgagttttctcatctgaaagacaagaaaagaatccttatctcataggattgttctgatgattaaatgacataatgcatgtgacttgcctatcctggtgcttggcacatatgtggacagtgatgaatgttagtttcttatatccctggtgtctagcctcggatctgacgtcatagtaggtgctgaataaatatgat

SEQ ID NO: 12223 - DNA, 1258 bp, Homo sapiens
ctatgtgtttagagataaggtaagcagggaataatgggaagggcctgcctcagccgggtctgggaccctggtgcttgaattctgactgcaacagtgctcctccgtactctcaggtgatgtcagagtttaataacaacttccggcagcagatggagaattacccgaaaaacaaccacactgcttcgatcctggacaggatgcaggcagatgtgagtggggttgctgggagcaggggtggtgggaatagagaattctcatctccaaggctgggtgtggtgactcacgcctgtaatctcagcacttttgaaggccgaggtgggcagatcacctgaggtcagaagttcaagactagcctggccaacgtggtgaaaccctgtctctactaaaaatacaaaaattagccaggtgtggtggtgagtgcctgtaatcccacctactcaggagggtgaggcaggagaatcgcttgaacccgggaggcggaggttgcagtgagccgagattgagccaccgctgggcacttgtctgggcaacagagcaagtctctgtctcaaaaaaaaaaaaaaaaaaaaaaaaagaattctcatctccatattgaaggtgaaggttcacttaacaaccttcttctccatatttcttccctcccccagtttaagtgctgtggggctgctaactacacagattgggagaaaatcccttccatgtcgaagaaccgagtccccgactcctgctgcattaatgttactgtgggctgtgggattaatttcaacgagaaggcgatccataaggaggtagggaggagactgtgtatgggacttgggaaacctgggaaatgttttagaatgcaagagacccaggatggaggtggacagggtcagggatggggaggggatctggaaatgctaagggtggggtgaaaggtacaggggcagggaagagactgatggaccaagggagggggttggggtgggaagtttctgatggtgcttttgtcctttgtgcctgccaccttcagggctgtgtggagaagattgggggctggctgaggaaaaatgtgctggtggtagctgcagcagcccttggaattgcttttgtcgaggtaagagataaccctgagcaggggctgggactctgtccagggtgcctggagggaaggggctgaggggaggagggtgctgaacaggaggtactggcctgggagtgtgtgtttggagtctcttgcatgggtctgaggtagctagcccttctgactcctctccac

SEQ ID NO: 12224 - DNA, 1304 bp, Homo sapiens
gtataaggagggatgataagtgagtgagcttgttacacttgaccaggaacagtgcctggcttggttaattcttttggtcgcagagaataacgatgtttcttatttgaatccagtgaaagtactcatgctttgtgttcttgggaattactgagttcaaattcctaatgatgcttgggttacactttgctttgtttctcctagtttctttttatatgatccggagtggcactggtaataagattgaagaaggtgggccgggcacagtggctcacacctgcaatcccagcactttgggaggccggggcaggcggatcacctgaggtcaggagttcgagaccagcctggctaacatggtgaaaccccgtttctactaaaaatacaaacaaacaaacaaacaaacaaaaaacagccaggcgtggtggcatgcgcctgtaatcccagctacttgggaggctgaggcaggagaatcacttgaacccgggaaggagaggttgcagtgagccgagatcacatcattgcacactccagcttgggcaacaagagcgaaactctgttaaaaaaaaaaaaaaaaaagattgaagaaggtgaatgctttcaacacacaacccatgggatgctaattacatcaaattggaccccttttggcagagtaaacagccatggcacacaagcaaggagcagtattctttactgtatttaggataaaattagtaagttttgaaaaatgttctcatgactttatatcttgaagacacaggttgggtttagaaaataaagttagaactccattttgggtagacatagtaatggtactctgctgtaaaaagggaacagacactttagaaaatatctgtggtattcagctgccaattgttgcatctgatcttccttttgcaacttacttcctggctacagtatatatgccatggaaatcattgctaagaacccttaatttaaaatttctagttataggctgggcgtggtggctcatgcctgtaatcacagcactttgggagactgaggcaggcggatcatgaggtcaggagatcgagaccatcctggctaacacggtgtaaacccgtctctactaaaaatacggaaaaaaaaaaaaaaaacctagctgggcgtggtggtgggcgcctgtaagtcccagctactcgggagactgaggcaggagaatggcctgaacccaggaggcggagcttgcagtgagctgagatcacgccactgcactccagcctgggcgacagagcgagactccatctcaaaaaaaaaaaaaaaattctagttataacctgatgact

SEQ ID NO: 12225 - DNA, 1036 bp, Homo sapiens
ggaaactctctgacctcagtttattccatcatctggttcttcatttgtccctgcggaggaacagaacttgtcttttgtctgtaacacaaatacatcatctccctcccttcccagtttcccccacacccacacttcttacttttattatggttccaatcaatgatgtcaattatgtgtgccattcaactgctgttgaacaacttggctataggaatttggaagagcaaagaggcagaatggaatttttctctctcctaactagggcgctagacaatgtattctaaattcaaccagagaagtaggagacaggtgtttctttgctcaacttctctttctactgtcccactattccctaatcctccaacacatactttttacgtagccagtgtatgaggaaaaaattggacaagagacgttagacatataagttgaacattttaagaggaaaggtttggctgggtgtggtggctcacacctgtaataccagcacttagggaggccgaggcaggtggatcatgaggtcaggagatcgagaacatcctggctaacatgatgaaaccctgtctctactaaaaatacaaaaaattagcagcgcatggtggcatgtgcccgtagtcccagctactcgggaggctgaggcaggagaatcgcttgaacccgggaggcagaggttgcagtgagcctagatggtgccactgcactccagcctgggcgacagagcgagactccatctcaaaaaaaaaaataaaaaaaaaaggaaaagtttttaaaatttagagaaacaaggtgaaatttttgatgctatgtcaacattcatggctggtgccttgccctatatttactgtaaactaggtatttgggaaagttatgttagatgtttagacttccctaaaggtgcatggctgagatcattaagctcttgtaccttttaattttatgtatttctctctgatttcattcattgaatttgcacctgaagaacttcaggtaaagaaatttgtagtaagaaaaaactcttttctattttccctggtca

SEQ ID NO: 12226 - DNA, 1184 bp, Homo sapiens
ccatgcctcccaagaggagtagtgtttgggtcagtgccgttggtgaaggacagaacttagcacataggaaaccatttttattatttttttaagacagggtctaactctgtcacccaggctggagtacagtggcgcaatgatagctcactgcagcctcagcctccagggtcaagtgatcctcccacctcagcctcctgagtagctaggactacaggcgtgcgccaccacacccagctaattttagtattttttgtagagatggggtttcaccatgttgcccaggctggtcttgaactcctggactcaagcagtccgccagcctcagcctcccaaagtgctgagattacggccatgagccattgcggctggaaactcatcttggaaaggagtttgaagcctgggcaacatagtgagaccctgtcttctataaaatgtaaaaacaaattagccaggtgcagtgtggcacatgcctgtggtcccagctacttaggagactgaggtgggaggattgcttgagcctaggaactcgagactgcagtgagccatgttcataccactgcacaccagcctgagtgatggagtgagaccccatctccctaaaaaattttaaaaaagaaagaaaagagtgggagatggatagagggaataaagccagctcagttaatctatttgtagtcagaggatattagttttggtaaaaactaagtctgggcttagtactgtagtattaactgctgtgctaatttgagtggattgtttggtatttttcaaacattggcaccctcggaaaggagaaacttcatactttaggacattataggaaatccatctacatgggtatttaaaaaacaaagcaagtctaatcccaggcactaagcagaaaactggaatgtggttgatactcttctccttccccaggaatgtgagggcagtatatgttactgattcttgattactagtagaaggtacaagcattttatatccttattgaccttagtacatcttccttttttatctattagaatagtaccagagtttttctacttccagcccttcatataggtaactgtcctaaagagttgtcttaagtccagtaaaccttgaaggatacttttcccaggtttatgatttttgccactcttctttcctgatggttatgatctgtgttaacacagtgtcacaat

SEQ ID NO: 12227 - DNA, 1036 bp, Homo sapiens
agcataagatgggtatgaaggttctgagagactggtttattttggagttctgatgttcttcttttgatagatatttattctttagatttatgttaaccaccttgtttcatttggttttaggaagaagaaacaaagcccattgagctccctgtcaaagaggaagaaccccctgaaaaaactgttgatgtgtaattatcccttttttataatctgagtacagagcaggcagctcttttcttaatgtatttaatgtttaactttgtttacctcttacatgttcccattggccttttcctttctgattaggtcatttttttgttttttagaagggactacttcaaagtacttggtcccagtgaagtaaagcaaattgtctctgagttatgtaataggtaatgaggaccaggtgacttcaagaccagacatagtttaattctcctagcctttgttgttcttttgtagggtcaccataatagattattctgttactctatagagaatctgtacaattctgtatgcagtgtaaaactgtgtaaactctgttaacttttttttttttgagacaggatctcactctgttgcccagactggagtgcagtggcgtgatcttggctcaccgtaacttctgcttcccaggctcaagcaattctcctgcctcagcctcccgagtagctgggattataggtgtgtgccactactgcccgactgatttttgtatttttagtagagacagggttttaccatgttggccaggctggttttgaactcctgacctcaaatgatccgtctgccttggcgtcccaaagtgctgggattacaggtgtgagccaccgtgcccggcccattctgttaactgttcataagagttttgcacttttctggaaaagtgtaaaactgaggccaggcacggtggcacacacttgtaatcccagcactttgggaggccgaggtgggtggattacgaggtcaggagttcaagaccagcctggccaagatggtgaaaccctgtctcttctaaaaatacaaaaattagttg

SEQ ID NO: 12228 - DNA, 1060 bp, Homo sapiens
agactcttggtagttttttcacacttagatatataaaaaagttaaaaaaatatattaaaaagaagaacattttaaaaagtattttcttttagggtaaattaagatatcttgagtaattgtctgtttgtggtttcacaagtagttttcccattagatgttttggacaaaccaggctgatatagctgaaactgaaaagtgatcctttaaagctcgaaaagtttttttttgtttttgttgctgttaagaaagcttaagggtagtaagggtagggagaggacccttctttagtcacttattagttgaccccaattagtctttctgtgaaactgatgtttttcttactcttggattctaaactctgttagtgggtttttgtgttattctggagttattgttaacttgatgatactgaaatgcatagactatatcagcggtctcttgatctttattgtgatgagttaaaaaaaattgagcaatcatctccactttgtttatatatactgtacttatagaaattgtatacttctggactgttataaaatataacacagaaaaggaatttttgaatgagataaaaaggaactatatatagaagagctaatattttcttcctatttgtcctatttttgaaatccctggagtaagtcaccagctgcccgatgacttacttgcatttatagattgtgttggtttatggagttcctccttccatcaaatctgtatttgtcaggtctatataaaatttgtatttgattggataagtaacttttacgtaaagtcctctgacctgatttcagtgttacagtctaagagaacattaggcactcctgacagcctaaaaaggacttgctctttaatcacatttgcttgtctttgctttttctctagagcacttcttaaccttttggaggtcacagatatctttgaaactctgatgaaaggtatggaccctctccccagaaaaaggcatgtacacatattttgcatgcagtttgaggggcttcataaaactaccttgtagccccgaggagtccatggacctctggttaagaactcatgc

SEQ ID NO: 12229 - DNA, 1049 bp, Homo sapiens
cctttcgcctcccaccatttttcctcagcaacccttacagtctttgcagctcctacctgccagctcagatccccgtccggctatgggcgcggcgccggctaccacacctgaagtctccaggaagtaacgcctctccttctgcccctttcctattggaggaacagaatcagcgctgccaccacccattggttggtggtctgtaatgcagaagcacagttggttgccatttctgtcgttcgcaagatacagtgcccgcccctctcccagttccaccttttgaaagaggtggggcaagctgcctagagaagtgagagcgacgtcagctattgaccaatgggaagagctgatggtatggcgtgggagcaagagtgacaacgattggtcagccttgcatctctacgcctaaggcgggagctcctggaggcggaggccgcgggtgggggcctagtggagtgaggggtaacaagatggcgaccgagacggtggagctccataagctaaaggtaccgtgaatcggggaagggctgagttggacttttctaggaactgaattctacagggtagcttgcgccttctcctacgtcttctccgtgcagccttttccacttcgtttctcggctcccgccgtagctcttttgtgccacccttccacactacgccttccctaatttcccatttctcctcacggctttactgctatatttatttgttatttctgcttccttcatcattgtatcgtccgtcacccttccccactgggttgtgtaagtgccttctacctgttatactcttcgttgcttttcagggctgcattacgtcagttggtccctcctttttgccccatgtcggagccaggatccgtttttcttccctgggatgatgtttccagtctgtcgtccgaagctgagatttccctgttagcaaatggtggcatttttgtgtatttctgtctaaataggtaccagacactcagaaaatacttccactccccttttctaggtgggattacgccccaagccgaattttgaaacagggagaggcctctcaga

SEQ ID NO: 12230 - DNA, 1067 bp, Homo sapiens
cttaactggagactgtaagtcagtatctgttaattgttaatgacatggcaaatgacggctcaagctatttcagtctgtatgactgttacagtcctctttgcttccactccctacagtgtttttgaagattaatatcagttctgcctttatttacttcttttggcagtgtaaaatcatttggttttatttggcacttatcttttctcagtcccttcatttccttactaccaaggaggcagcaaggaatgcttgattacagtattgactgtaatctacattttactgctctctgtaggcttagaactagtataccataatatcttcaaagggttttagatgagaagtctgctttttaacagcttccctatgggcctttctacctggctcttggagctctttctaacccagcatatctcatttcccccatagactcacagcacaataggagagatgctgaggaacttgcgggaagaggtaaactggagcccatagtccatttgctcccagtgtgtcagtagccgagcctttccttggtcaggagtctcaaagggtgtccctttcaccgtatgaaggaagacatacgtagcctgggaacagggaaggtggcagtgtgaggggcagaaagtagtttttcagtcaaagaattatgttaagatcccaaaaggaacacataaatccccaaacaattggtgattttattttgcttttggttgggaaaccctggggtgggtacaagggcgtggtttagtgctcaccaggttatggatgacgttggtcagggtccagacaacaggaatgctgaagaaggggatgctgagtagaaccatatgcagcaatcctaccaagatgatgtaggccagccagatgcctcggctattcatcactcgggtgttggggtttacttcgctgtgtgccacccccacattcatcctagccgtaatgggggatcaggcaggagtccagctcagttttttctcaacccctcttgagctatctcccagttgtctctcagatagccccaatcccctgaactctattgggaatgaagaacttacccatcacgcaga

SEQ ID NO: 12231 - DNA, 1077 bp, Homo sapiens
tagccaggtgtggtgatgcgctgtagtcccagctactcggcaggctgaggcaggaaaatcactttaaccggggaggcggagattgcagtgagccgggatcgggctactgcactccagcctgagagacagagtgagattccgtctcaaaaaaaattttatatatatatatatatatatatatatatatatatgtataaaaccaagccgtacctcaagcacctagggcacatgttctcaggacctcctaaggtcagtgtcagaggccatggtcacttatatttggctcagaatctctaaaaatattttacagagtttgactcttttcatcaacacaggtcaccctcctgagtagctggtagcacaggtacatgccactaaccatacacagctaatttttgtatagttcgtaaagacaggggtctccctatgttgctcaggctggtcttgaatgcctgggctcaagggatcctcccatcttggcctcccaaagtgctgggattacagccatgagccactgtgcctgacctttcgctatttattgataatgcttatcatattcatatgattatctcttcctctcttttttgtttttattttttccgatagtaactgtttatggtaaattgtggacattgagattactaaaataaaaagtgtactgaattatctttgatttcttatcctcttactccttccctagttagtgaattaccaaatgttgattctttgataatgtatctgcccttagtctcttacgttccagtgcccctgtttcagccaattctgtcccttcatgccaggattatcacaatattttttccctaactagtttccatgtctctggtgttttttttttttttccaagtcacccttttattatgctagattaaatactctgaaacactgctttgtataaaggattcattcatttattcaaagccctaagacaatacttcgcataaaggattaattcatttgacaaatatttgttgagtgcatgccatgtgccagatattaaaatctttaactggtattcaaggtctgaacattccagcccttgtctctggctcagcctga

SEQ ID NO: 12232 - DNA, 1022 bp, Homo sapiens
tttcagtgtaagagtttttattgctgacagacttaaggaaatagattgagaattaaaaaacggcagatgtgagaaaatgacaaagcttaaaaagattcttacagtagcagtccccaatctctagtttttgactctctgcaagatattatctgaaagtcctgatattttgcccttggtttttatttctaggggtgggaaccgccaaacctctcccttctttttgacttcacccttggataccatcaaggccagaggatggaaccaagataacataaaataggtgctcctttgtgataatgggctatttgtatctctgagggcttccacacaggatggccattcaagaagcttctgctctgcctttcattacagtctatctttagtcctcctaaaccttcagctataatctctatgcaatcaacttaaatatatgtttgtagtattgtccctttctcccaaattccatgtaaaacacttgcctgaattgaattgtttccacaaagttgttttcccctgtggactttgtttatatcagtagtttttattttcccaattttccaaattcaagagtgataattataaatagttgtgttcttgtttgttatctttctcactagaatgtatactctaagaaggcaagaaccttgcttgctttattcattgttgtattcctagcttctgttacagtgtctggcacaagagtaagtgctcaataaaaatttaaaatccacgtgtgaataaatgtgattaccatgtgccctaccgtatattgagaaaaataagaatacatgtgaaaagcacgagattaaatccactgtgtcactgttttgattatttcctctctaattcacatcttggtaagtctttggatcctgttgatttaatcttcacaatgaatttctccttcattttcctttcattacctgtagaaaccatcgaagtcaagtcttttcacattgcagctgttgttttcattttctctacctttagtttatggtacacatttttcagtttaatcttaa

SEQ ID NO: 12233 - DNA, 1082 bp, Homo sapiens
tctttatggctgtgacagactactttttatttaattaattaatttttttttgttttgagatggagtcttgctcttgttgcccaggctggagtgcaatggtgcgaccttggctccctgcaacctctgcctcctgggttcaagtgatctcttgcctcagcctcccaagtagctgagattataggcacccaccaccacgcccggctaattttttttatttttagtagagacgggctttcaccatgttggccaggctggtctcgagctcctgacctcaggtgatccacccgtcttggtctcccaaagtgctgggattgcaggcatggtgagccactgcgcccagctgacaaactactttttaaatttttttttatttttgagacagagtttcactctgttgcccaggctggagtacagtggtgtgattgcagtttactgctggcttgacctcctgggttcaagtgatcctcccagcttagcctcccaagtagctgggattacaggtgtgcgccaccatgcccagctaatttttgtagagaagaggtttcaccatgttgcccaggctggtcttgaactcctggatgcaagcgatctgcctgcctcagcctcccaaagtgttgggattagaggcatgaaccaccacgcccaacctcagactactttctttttttctttttttgagaccgacttttgctgttgttgcccaggctgtggagtgcaatggcctgacctcggctcaccgcaacatccacctcccgggttcaagtgattcttctgcctcagcctcccgagtagctgggattacagacatgtgccccacacctggctaatttttgtatttttagtagagacggggctttctccatgttggtcaggctggtcttgaactcctgacctcaggtgatccgcccgcctctgcctcccaaagtactgggattacaggcgtgagtcaccgtgcctggctgactacttttaaatgtagtattatcacatgctatgtttttgcccataccctctagtgaaactgggctgtatggctgatgtggaacagcagtgcgatggtgtgtaagctttggcatcagact

SEQ ID NO: 12234 - DNA, 1071 bp, Homo sapiens
gctttgtcaccaggctggagtgcagtggtgcgatctctgctcactacaatctccacctcctgggctcaagtgattctcctgcctcagcctcccgagtagctggaattacaggcatgcacccccactcccaggtaatttttgtatttttagtagagatggtgttttaccatgttgtctaggctggtcttgaactcctggcctcaaaggatcgcccaccttggcctcccagaatgctagaattacaggcatgagccaccgtgctcggcctgattttttaaattatctgtaagatgaggtcttgctatgtttcccaggcaggtctccaactcctgggttcaagtgatcctctcaccttggcctcctgaagtgttgggattataggcatgagcaactagtttttcttttccttttttttttttaaagagacaaggtcttgctctgttgcccaggttagtgtacagtggcacagtcatagcttgctgtagtcttaactgttggggtcaagcaattctcctgcctcctcctcctgagtagctggtactagtactacaggcatgcgccaccatggctggctaatttttgaatttttttatagagctatgttgcccaggctgttctcaaactcattttcacaagcagtgctcccaccatggccttccaaagtggtgggattacaggcatgagccactgcacccagcctagtttttcttttttctttttcttttttttttgagacggagtcttgctctgtctccagtcacccagactggagtgcagtgacgcgatctctgctctgccaactgggctcaagctattctgcctcagcctcccaaatagatgagattacaggcacgcaccactatgcccagctatttttttgtatttttagttagagatggggtttcaccgtgttggccaggctggtctcgaactcctgacctcaggtgatctgcctgccttggcctcccaaagtgctgggattatagacgtgagccaccatgcctggcccccagcctagtttttctaagcacatatgcatatataacattaaggtaaaatgacatattttga

SEQ ID NO: 12235 - DNA, 1080 bp, Homo sapiens
cagtcccgttttcattatttttctcgaagctttatttgctgaagacctcctcgtttctacatagtaccttttcctctcccgtatcttcatttgttgggtcactgaggtttagaggtgtgaagggaagaggaccctaatacaactttcagcttgagttttctccctgatggagccacccttcgctaccttctcccgtgatggtgatagaaattgaggggtctaaggtgggaaaaggcaaacaggaaagtatctagtggcttttctccgaagccctttgacaagtgaataaaacccactattccttctggctagagaagaatttgcagcctggctggccgagatgctgaagtgtctgctgtgtatgtaaggtgtatgtgttggaaacggagaatcacagcttttatcatggttttgtcccttcctaatggcctcatctttaggaaaatatgcatagtagtaatagctactcaatgatgatcaaataatatatgtaaaagcaatttataaaatactgtgcaagtgcaaagtgtttctgtttttgtagccctcatatgtgtagtctgtagtctgtagaagcaacagtgtgcctgtgccttggtacacacggtgttttaaaatgtgccattttgcttcttgctctgctgctttccatgttccttacacctcagcccacctattttatggtatctgatgacaacccaggttgctgctacttctccccaacctcacaatttaaagtggtactacctctttccttctgttctctacccagtagctccttcatgaattaccaacttttaatgtgtgttttgaaaatactacttatccagtatacttctctttactcttaatcattttctttaccctgactccgtgaaaatccaggtatcacatcttaccttaccttgtcactaaaagctgttttctgttttccgtgactatgtggaagagaaaaaggaataaactgcttttttgttttcctttactatgtccagatcattgatctaccactgtcactctaatcctcatggaaggtattgccatgcaattatagcagtttctgtaaaactttagtgtcat

SEQ ID NO: 12236 - DNA, 1124 bp, Homo sapiens
ccctaaaggaagggctggtgaaaggtgtttatacaaggttctattaaccacttctaagggtacacctccctccaaactactgcattttctatggattaaaaaaaaaaaaaaaaagtagattttaaaaagccacattggagctcccttctacccactaaaaaataaccaatttttacattttttgagggggagtgagttttaggaaaggggaattaagattccagggagagctctggggatagaacagggcgcagattccatctctccccaagcccctttttagtgactaagtcaaggccccaactcccctcccccaccctacgctgagcttattcgagttcattcgtactaataatccctcctgcggcttcctcattgttgctgttttaggccaccccagctcagccaatgattcctttccctctgaatgtcagttttgtttttaaaagtcacttgcttagttgatgtcagcgtatgtgtatttggtggggaaaacctaatttcggggatttctgtggtaggtaataggagaagaaagggcactgggggctgttctccttccttccctgggctgtatccatggactcctggaaggcacagagaagggagctataagaggatgtgaagttttaaaacctgaaattgttttttaaagcacttaagcacctccatattatgacttggtgggtcaccccttagcttcctccctctcccaccaagactatgagaacttcagctgatagctgggggctccccagatgaggatgcagggatttgggagcagtggaagagggtgcccaaccttgggttggaccaacccttggctcgcagctcaactctgcttcccgcattcctgctccacgtgtcccagcttctcccctgtgacgggaaggcaggtgtgactccaggctctgcactggttcttcttggttcctcccaccaggccctttgttcctcatgtccccatgtttctctccctctgcgtcttagcacctttcttctgttcaaagttttctgtaaattttctctttttttctttctttcttttttttttttttataaattaatttgctttcagttccatcttgtgggtgcattctgtgttcttacctgtggctgtcagg

SEQ ID NO: 12237 - DNA, 1050 bp, Homo sapiens
agactgtcccaaaaaaaaaaaaagaaaaaagaaaaaagacacggtggctcacgcctataatcccagcacaaaaaagtcaagccctttcaccatgggttgtgaccacagcaaatttgttcttatacctgccagcatccaccctacctttcttctgtattgtcttcagttgggtcctcccactgatgtgctgtctcgcccctccttccctagcacttggctgctgttgaggaaaggaagatcaaatctttggtggccctgctggtggagacccagatgaaaaagttggagatcaaacttcggcactttgaggagctggagactatcatggaccgggagcgagaagcagtgagtagcaggagccctggaaccctgctgcgctgtgcctcagtttaaaatcggaggggcgtgtgtgtgtgtgtgtgtgtgtgtgtgtgtgtgtgtgtgtgtgtgtgtttcagtgaaagagagataagcaacagtggggaaagcctgagtgtgtgtgtgtgtgtgtgtgtttcagtgaaagataagcaacagtggggaaagcctgagacagacagggcttcaaagcagagcagggcaggaacagggcaggagtagggcagccagttagagacagttaagtggtctcacaagtgaagtctggggactgaagtcccacagaaggtcagctccatgaggcagggactctagttggttgttttgattgctgcatctccaggtccttgaacagtgcttggcccatagtagactcaaatagtgattgagtgaatgggcgtaacggatgatgagagagagggtaagagcctcagatccaggaggtgaacttggaaagggaatgggaccgacacagtgttgaaccattttgtctttggaggacataaaaagaaatagacaatagggactgggcacagtggcccacatttgtaatcctagtactttggtacactgaggcagatggatcacttgagcccaggagttcaagaccagcctgggtaacatagtgagatctctgtctcaacaatttattttatttatttatttatttat

SEQ ID NO: 12238 - DNA, 1035 bp, Homo sapiens
gatgttctccccaagcttctaacttcagcaatttcgagctcttttccttctttgccttctaggcttttcctccctttggggcccccatcccttcaccaatgccttcttctgaaaccattctggcttttcttgcagtgttcatgccattgagcggagggctctccccgagttcttcaacggcaagaacaagtccaagactccagagatgtaaggaaatctcatctcatgattctccttctccctcctgtccccacattcacccttcctgatccagtaacattcagtttagcaaacatttcttgagcatcttccatgagccaggcactatgctaggcttacaaaggcacaatatctgcctttaggcagccctggcctagcatgtagacacatgttctttaggatttgcccaagggtgatattaagcatgttctatacataacaagtacctactccagtgcctcaacttctttttaacagggtatagagcctttaaatccatattactgatatcgtctatactgcagatattcctagcacaaaagttttgattaaagtgtaaattactattaccaggctggttcctgagagtaggttttaatagaaaaacaagagaaggaactaatagaagaccagtttatataaattaagggatggagagggctcactgggaaagaagtgtaggagccacggtggctcacgactgtaaatcatcccagctacttgggacactgagacagaaggattccttgaggccaggagttcaagaatagcatgagcaacatagcaagactcccatctctaaagaagtgaaaaaaaattagctgggcctggtggggcatacctgtggtcccagctacttcggaagctgaaatgggaagattgcttgagcccaggagtttgaggctgcagtgagccatgatcacaccactgctctccagcctggctgacacggcaagaccccgtatctaaaaaaattaatgaacaaggctgggtgtggtggctcacgcctgtaatcccagcactttgggaggccga

SEQ ID NO: 12239 - DNA, 1303 bp, Homo sapiens
cactttggagacattgctccaccaatactggtttacagtctgtattctgtagactcaccccaggtattccagaagtgtatttcaggggtaggattagggctgccaccaagaagagttctggcttctacctcctcatcaatcagctctctctcttctctatgtttgctcctgagcatatgtatatgaattcagttgaggaaagtatcctctgctttcaaaaatgtttaacacttaaccattcttccacagagtgatttggtcagattcagtatcagaccattaaaagcttacagatacatagatggagataaaggcctgtcaaagacaagaatcatttatgaatgtacatagagaaataagttaaattaatttttggttggagaagtggggaaagtagcaagaagtttgaagccctagaataattgtgactggagagaattactatattttgcaatcaggtggagacaatttttggagaaagtaggatgtctggaactattaaattgaaggcttgaattaggcaaaatctgtctgataaaatgactctctgttttcgcagtcaacacaaagaaagactcagagtcggccccagtcaaaggcggcaccatgaccgacctgggtaagacaggagcctcttgggcacggcagtcagagccaagggaaggggagggctcagctgcccccttttcgctagcctgatgggcttttggtagggctttcttgcccctcaggaggctccagccttacatcttggtttttctctttcagatgaacaggaagatgaaagcatggagacgacgggcaaggtggagccagtttagagaggccctacctctctatgtgattctgatttgtgattataaagttcattctgcccaaacttttcactgcccagactttacccactgtagactaattccagctttgttcaaaactctgaccctttcagagtcctggggcccatgactgctcagtcccatcacccatctttagtgtccacattcctggggtgtgggagaagcagagggttgctagggaggaagcaggaatgctgagtgtccagcagcctccatactcgtaggatgaggatgagaacagtacggggaacaagggagagcagaccaagaatccagacctgcatgaggacaatgtgactgaacagacccaccacatcatcattcccagctacgctgcctggtttgactacaataggtatggttgtccccaacttctcactgagtccttatttccctgcctccaggggtcaacaggctgttcttctccctgcctcctccaaataagt

SEQ ID NO: 12240 - DNA, 1576 bp, Homo sapiens
ttacgtaagggtgattctttttgttctctatttttgaaatgtttcgtaatgtgcttttactactttataatgaatagaatacaaaaaaaataagccaagaacccaatactttctgtaaatggaaagggtaaaagatctgcactttacttttccacaattctatcccattgattctactgtgtgctcaatttcccatggcagttacgacacgtggatcccagcgagtgaaattgaggcatctgtggaagatgctccaactcctgagaaacctaggaaggtgagcttttcttgtatcccctcttccccaaaaagaatgccaggaacagtctaccctttggaagtgaaacagaggcttgtatgcccttgagctttttctgttaagggtccccagacagagctgtggcttccaggcttctctgcagcatgatctgcctttgtactttaggttcatgcaaagtggatcctggacaccgacaccttcaatgaatggatgaatgaggaagactatgaagtaaatgatgacaaaaaccctgtctcccgccgaaagaagatttcagccaagacactgacagatgaggtgacaaatcctgttctttttttcctggcgcccttagcataagtctcagaacaaatcttcagtggggattgtaggctgacatttgtcctgattctccatcctataggtgaacagcccagattcagatcgacgggacaagaaggggggaaactataagaagaggaagcgctccccctctccttcaccaaccccagaagcaaagaagaaaaatgctaagaaagggtgtgccagcccctagcctgcccccgtgttcaccattctctccacatcatgttgaaggaaggaaagacaaatcccttcctataaccacctggccctgacctgggtgtgccataatactgcaggtgtcctgagagggaagatgaggagatctttagctgctcagttgttagttctggttctggccccactagtacatttaaagagagctttatcaagtgaaaagcctttgccacttcccattactgtgtgattactggtttctgtttgtactcagctctacccttggaattctctgtcacttcccttcccttgaacttcaacttccagggactccttgtccaaggatgactgggttctctttcactctctttccttcccagtccctcaacaccttacactaagtcaaagcgtggccacagagaagaggagcaagaagacctgacaaaggacatggacgagccctcaccagtccccaatgtagaagaggtgacacttcccaaaacaggtacaggccaggctgagctcctgggatccacccccactccccgtcttgactctcctttgccaaaccccaagtgagctgatttctcaggtccacctcccagtctacaggatcttttccttaaatttagctggttattggaattacggtcattaccctggaaaatcctctaactgtatattcatatctgagttgtggactgtgctttgtgcctgatagtagttgtctccaaactctttgattatgtgtttctgacagtaaaatatatttgagca

SEQ ID NO: 12241 - DNA, 1027 bp, Homo sapiens
gccggacaggcgcctgtcctcccagctactcaggaggctgaggcaggagaatggtgtgaacctgggaggcggagcttgcagtgagctgagatcacgccactgcactccagcctgggcaacagagcaagactccgtctcaaaaaaaaaaaaaaaaaaaccagtcttcataagtatttgctgctacctttccctgtcataagaaaaaggatagccagacatggtgggacgccactatgatcccagctccttggaaggctaaggcacaagaatcgcttgaacctgggaggtggaggttgcagtgagctgagatcatgccactgcactccagcctggtgacagagcaagagcctgtctcaaaaaaaaaaaagaaaagaaaagaaaaagggatatcttttcctcctcccagaagtttgttttaaatttgagcatttatcatgcacctgatgtaaacctaatagtactcttgatactctagtggcttgaaaaaaaaaaaaaaggcatttctgtgctgagtctgcgcttctatgcacacaaggtatgtttataaaatactgataagcatgtcacagtatagagcataagaggcaatgtatgtatcctagtgacattagcagtgcttttccccccttaaactcctttaaaattacttttagaacttgctgctcattcttgtgaatgttatgaatggtgtcatattgtccttttacagaagatacgatttttagaaacaaatattcattgaatgtctgccctgtgagatactcactagagtgaacatgaggaggcttatgtagcaaaatggcacctacctgcaaagaacttagtccctaatggagatgaatatataataagggatcataaatgtgctaagtggatttactagtaatatgtgagccaaggacgataaagctcctgattctgatgggtatcaggaaaggcttttcaggaagtgttacttgttataggtcagaggtcagcaaactacaggttacaaccccactgcctgcttttgtaaaaaactttattg

SEQ ID NO: 12242 - DNA, 1101 bp, Homo sapiens
aatgcaaaacacttgaagcagcaactactgtacctgggccccaatcctgcactctcccctggctcctcatatgcaaatcaagggctggttctgcccccacagcctgccccctccccattccctcccactcctagcctggcccctaaccacgcactttaaccttgcttctttcttttatcttcttttgggagggcagagcctgtggtcattcctgccctggctctccttcccttgaactttgaggcttgtcatgaatttttaagtaagcgttttatcctttaggggaagaaacaaattaatttcctgcccatttcaaaaccacagccctagtatgtccactgtgtttcaggcatgtgtttgcatgtatatggagggagggaccatgttcttcctcctgtgccgccaagcccatagtttatctgtgctccctatctgcctccaccttccgttatgtccaagagtacccactgccccagtcactcctgatctgaagccaaagatggtaggaggggcagggccgacaagggaccgtggctactcgggacccaggcttcccctccagtgtgaggaagaagctctgacctagagagagatgaataggtactggggcttggtccctgccttcccagcagggaggaaagatgggattgagctgggggctgcactgataagatttctaaagtcgcaccccaaaagccaaactgggctggagtgaagagggggcagttttctctctaaatgtagcattgaatttggccctggtccctttaagtgctctgtccacccatctcctagtgcagcctcctggacagttggacccactcctgcagcccagtgttcccttcctcacactcaatacctcagccaggggccaagacacagaacttgaatagaggtcatgccccctccgcccccacactgcatccttgcccagtttggctgccatcagtattgtcccctgagaactggacaggcttcgtttacacagtacagggtctcccctgaggggggatccttcagcctccctcccctactcaagtttgctttattcacagtcttacccatcttttagttgtataccctgaatgtcttgccaccctt

SEQ ID NO: 12243 - DNA, 1052 bp, Homo sapiens
aggacggtgagtgatggaagacttgggaagaatcccagttgcctctggcttcccctttctgcttgggcagtatactcttccctattttaatctaccctgatccctgccttacaggaccccccttcacgccgctgccttcgcggacaatgtctctgggctccggatgctgctgcagcatcaagctgaggtgaacgccactgaccacactggccgcactgcgctcatgacggcggctgagaacgggcagaccgctgctgtgggtgtgtaggggccacttgtggaagggaggagctcccctggggcatttgcaggatgggtcagccctgcctgtggaggctggctggggctggggttcagaaagcaagagggttgtctttggatgtctcgccatctgcagacgggatgcaaagtggagagccaggatggctactgctctggagggaggggtcagtccctctatcacatttctctcgtagaatttctgctgtatcgagggaaggcagaccttactgtgttggatgagaacaagaacacggccctccacttggcttgtagcaaggtacttacctgaagtgattgggggactgcataaggggcagagcttgatgaagagaggtaagtctcggttgcagaggggactggggcagaagtgaggattgtccagcctatccgactggttgggcagctgtttgtcctcctgttactctccccaactcctgccctgcaccctgccacatttctacttcacaagtctccactctctgttcccctccctcagggccatgagaaatgtgccctcatgatcctggcagaaacccaagaccttggccttatcaatgctaccaacagtgcgctgcagatgtgagtgcctggggaagggggctcctggctgggggaggccagtgggtgatgaaagagtggccgctgttcagaggctctctggagcccattgtatttgttcagcacccttgccaccctgtctggaggtggaagggcagcttagcatcaagctccttctttttccttttttccaaggccactccacattgctg

SEQ ID NO: 12244 - DNA, 2038 bp, Homo sapiens
gcacatttgcaaagacttacaagagtttaagaaccggccgggcacggcggctcacgcctgtaatcccagcactttgggaggcgaaggcgggtggatcatgagatcaggagatcgagatcatcctggctaacatggtgaaaccctgtctctactaaaaatacaaaaaattagccgggtgtggtggcggccgcctgtagtcccagctactcgggagactgaggcaggagaatggcgtgaacccgggaggcggagcttgcaatgagccgaaatcatgccactgaactccagcctgggtaacagagcgagactgtctcaaaaaaaaaaaaaaaaagagtttaagaaccaccagatcacctgaagagactctcttgtttcccttaaagttccaaatctctccagtatctcctccttagtgcctgcttctgctgttccctcgagtcctccaggttgttttgctcatggaaaaaggcattaggctgcctcagccttttcaggagatgaggcctctgctcttaggtaggttgagggcacgaatctagctctgaacaggtgtctttcatatcctgatgcagacggtgaacctgctcctcaacaagggagccagcctgaatgtctgtgacaaaaaggagcggcagcctctgcattgggcagcttttctaggtgagagagaatacacgggaaaatcagaaatttgacatttaggattcctagggcagggatgtggggttgcagcctttgaagagaggagtgtagggtcttagagtttaccttctacttcctttagagtgtcttctcttttctcagggcacttggaggtcctaaaactgctggtggcacggggagcagacctcggctgcaaggaccgcaagggctatgggctgctccatacagctgctgccagtggccagattgaagtggtgaagtacctgcttcggatgggagcggaggtcagggctttgagctctggggttgggaactatgggcagcaagtaggagattatagtctgttacggagatatgaggtattgggatgttggtatagttttgggaagttggaaggacgtggtagagagggtctgaataatgcttaccttagccatagtgcccttagtaccttagtaccttgggtcataaacccgagaggaaatgaggcagtcgttggatttctgggatctggaggctacatgtgctggcttctactttgtttaaactgataccaccttactctcacccctgaatatccagatcgatgaacccaatgcttttggaaacacagctttgcacatcgcctgctacctgggccaggatgctgtggctattgagctggtgaatgccggagccaatgtcaaccagccgaatgacaagggcttcacgccactgcatgtggctgcagtctccaccaatggcgctctctgcttggagctactggttaataatggggctgacgtcaactaccaggtgcctgaagggataaggcttagaccagtggggagcgaaacttggatctaggggtcctgactgtatctggatagctctcttggggaattatccacttgcttcctagggtaatcagaccttgccagggactcaggaaagagtgggctaagaaggtgccatatgacccttttgtccttagagatatgtccttggaagggaggtagggcattctctgtgctttgcactggaaaaaaaaacaaaaacaaaaacccaccatgtttccacagagcaaagaagggaaaagtcctctgcacatggctgcaatccatggccgtttcacacgctcccagatcctcatccagaatggtatggacctgggagactttgtgctctcatcccctcctcccccaaggaactcatttctagaatctagggaggttcctaacttccttctcctgccctcttccagtaggataggcccttggaactctgaccaagggacctgtggaaatggccctgctctgccctgcccagtctcctaaggcctagaaacaggataaaatatgtagaatcctgggcctggcacctgatgcatacatag

SEQ ID NO: 12245 - DNA, 1028 bp, Homo sapiens
tacagatgtgtgccaccatgcccagctaatttttgtatttttagcagagacggggtttcaccatgttggccaggatggtcttgatctcttgacctcatgatccacccgccttggcctcccaaagtgctaggattataggcgtgagccactgtgcctggccaagattaggatgtcttttacaagagtttaggtataactgactggctataggctggcatgagcccataactaggctagtaagtggcaaataagagaacagcaaagtttccataatctgccccttctttcttcccttggctctcccttcttacttccccacagtgaccatgagggtggcaatgtaagtgcccataccagccatttggtgggcagtgccctttccgacccttacctgtcctttgcagcagccatgaacgggctggcagggcctctccatggactggcaaatcaggtaagactattctttttattttcctgctacatgttttccttaccccatgctttgtttctgatcttggcattctcttctggcatatgtattaacattccctttttccccaaaccttacccataggaagtgcttgtctggctaacacagctgcagaaggaagttggcaaagatgtgtcagatgagaagttacgagactacatctggaacacactcaactcaggacgggtaagcagagatgcttaacgactaggaaagaaaccaagacacaagttctgcaatttggaagaattaagaaaagaatgaaagaggtccctaaattagagatttttttttcttcatttatctaccttgaagaatttagaaaagaatttctaggtgggcacaatggcatgcacctgtagtcccacctacttgggaggctgaggcaagaggattgcttgaggccaggagtttaaggctgcagtgtgctaagatcactcctgtgaatagccactacactccagccaggacaacacagcaagaccccattctctaaaaaacagttttaaataggttgagtgtggtggctcacgcttat

SEQ ID NO: 12246 - DNA, 1056 bp, Homo sapiens
acaggagaatgtaccattttcttttgttccttatttggagataggtagtataggaacagaaaattttctttttacaaagcaggtacattaaatgatttttggccaggaggtgccagccaccaggaaggccctaaagagttcactgtggtgcaagacacagaagagcatgacccactgctctgatgcaaccaccttgggtccttggcaaatctagattgatttagttggtcaatattaatttggcaccaactgtgtgtagagaattgtgtttgcagttgaggaagacagagagcatttaaaattgatattaacttggttggcattggggagttggtatcagaatgatgcaaaatatacacattcacaccacataaagcatttatttataaaggcttatttataaacactttaggtggtatgaatgtgtatatttgtacctgcacacattagcaggtacaaaaggtcatataatcttaatattttgtttttcattttatttatttatttatttttttgagatggagtctcgctgtgtcacccaggctggagtgaaatggcatgtgaaccaccgtgcccagccatttttatttttatttttttagaaataggtctctctctaatcacccaggccaggatgcagtggcatgatcatagctcactgtaaccttgaactcctggactcaagtgatcctcctgcctcagcctcccaagtaacaaggactacaggcacatgccaccatgtctagctggcattacaggcgcacaccaccactcctggctaatttttttgttttttttttttgttttttttgggagacggtgtcttgcactgtcacccaggttggagtgcaatggcacgatctcagctcactgcaacctccacctcctgggttcacacaattctcctgcctcagcctcccgagtagttaggattacaggcgcacaccaccacacccagctaactttttgtatttttagtagagacagggtttcactatgttggccaggctggtctcgaacctctgacctcgtgatctgcccacctcggcctcccaa

SEQ ID NO: 12247 - DNA, 1025 bp, Homo sapiens
cttttaatttttatattttttcatcttaccacatttgagggctacagcccacctctatcaataatagctgactcactagaggagttcttgtaaggggtggcaacaaatgagctcttagtgattgtgggggaaaaacctcttcgtgattgtgataacgccacctccaccctatagagaatactggctgtcagacattgtgagccaggcccttgtctttggaagtagccctctccatctctccccatgaaggagctgacctattgagtgagatgactgcctgattctcctgagagctgctgttccagtaaggtgactctacaggtggcatgcatccagaagccaaaagcccaactgtcacacctccaggattaggggagaatctgggaggtagaagttcagggatgattcagaggtttgtaatctacctgtctcatcaatgaacataacctgaatgtactgttcagagccattcagcagctttctttggcagccacggggtagaggaaatgaaatgtagcctttgatgttacagtcctcaagcacctcctgtctagagtcatttgctctgctggtggccatcagggttagttaaatttgtttcctctccctgagatgcctcccttcttggtcaagaagcccttaaaaagaaaactggtatcttttccttgatgcctgttaaaaaaaaaaaagaaagaaagaaagaaagaaaattgggactttattttgtattccacagctggaaggaattatccattcacctctgcctcaggcttgactgcctctttcctgggatccaactcccaggaagttctgacacttgatggtaggtgataggccaacacatttgtaagaaacaaatatttactgaattcagctatgcacaaagcactgttctagatgcttttatgaaaattattttatttagtttacttaactactctgaaattggcttttattattaccattttagaaatgtaaaaactgagacttagaaattaggttacatagccaagataacacagtgg

SEQ ID NO: 12248 - DNA, 1062 bp, Homo sapiens
gtgcagtggcgtaatctccgctcactgtaacctctgcctcccaggctcaagcgattctcgtgactcagcctcctgagtagctggggttagcaggtgtgcaccaccacgcccagctaattttttgtatttttggtagagacggggtttcaccatattggccagactggcgaatttttttaaccttactaggagacaacatgtgaattagtcattgttctattgttctactctcactgtcacataatttaaatgtcacataatttaaaacacctgagttagaagctaattcagagagctttgagattatttgacttcttgtttatccaaattcattaatgctaagcaatggccttagtattatctgtgggtgactcagttttgtgacatcaaaaatgtcttttcacagatgatctgggtttggatttgggctaggaattgaagtagggctgcagttcacttctggacttttgaagtcaacatgcttaaccaaccctagctaaagggaactgtctcttgagccactgaaaattgcttctccaagctagtatgtttgaaactgagtaaatcaattcaaagatgtttctagattacttctagactttttcaagacacttaaatgcaaaggaaccaatggtttctttacattggacttataccactgtacaacatcacctgtataagtcctactcagaaattgggttcaacaaaaccgagttggttttgtcctgcaaaatatttagttaggttttaaagcccaaattttttaaaggtaagggctcatatctctgtgccctcactttgactatcagcctacccaaagtaacggtgattccttgatactagaatggcaggggaagccttatggggtgttagtggtgagatgactgcatttggtcttcccagtggcctttaggttggtagcaggtgaatgaatgcatggggaggcagcaagaatagtatggtaggtagcagcgatagagttggcattcctgacttaaaatccaaggggcagcagaagggaaaccagacttggtggatttcaataaagccacacaatgattc

SEQ ID NO: 12249 - DNA, 1042 bp, Homo sapiens
gccctgtgtcacccatttctcccttgggttggcagtgtgagagcattgtggaggaatacgaggatgaactcattgaattcttttcccgagaggctgacaatgttaaagacaaactttgcagtaagcgaacaggtaagctgcccccactttatctcctgttctagtagctctgtggaacctgacattccctaactcacccatacacccccatcccagaaacctctggtattaggtcaagagctgtcttccatttcccttggcttagggacttggggtgttcctccacattttctgtcagctttcagaatttgtgtccccttgaccctgagatacaggtgagaggacagtggggatgttttatcatttataagcatatattctgcagaatggtggttggtgtgtgtttgtgtcagcttggtctgggaaattttcttgatactggcagatatcagtatgagaatggcatattcctttaaattgtttgccatttgcagatctttgtgaccatgccctgcacatatcgcatgatgagctatgaaccactggagcagcccacactggcttgatggatcacccccaggaggggaaaatggtggcaatgccttttatatattatgtttttactgaaattaactgaaaaaatatgaaaccaaaagtacaaactgtgttgtcttttcatgcctggaattgcccttacattaagcttgaagataaggagttatatagacaggaaagataatggaggagaaagaagagttttgggattgatacaggataaaggtaggagaggcctgaacctttaattcttctaccttctgagattccactccactcataaactagataagctttcagtcagtgcccactcaataccacgtctttagagtctaattgtggagaatagaggaacctccatgaggaagcaggggaacatagtgtatggtagtgtagaattctagaaatcccttgtgttcatggctgttgaaacataaagtaagacagggcttggtcttgaaggaaataacggatatgcattattctt

SEQ ID NO: 12250 - DNA, 1980 bp, Homo sapiens
aacacacatgtacacaaaggtgtatctaataagcaatatataaggcagtgttaagattacagtgctagcctgggcatcatggcaaaacaccaactctacaaaaaaatgcaaaagttagcagtgcatggtggcatgtgcctgtagtgacagctgcttggaaggctgaggtgggaggatcacttgagcccaggaggtcgaggctgcagtaagccgtgattgtgccactgcactccagcctgggaaacacagcaagaccctgtctcaaaaaaaaaccaaaacccagcactttgggaggccaaggcaggcggatcacctgaggttagaagttcgagaccagcctggccaacatggtgaaactccgtctctactaaaaatacaaaaaagtagccaggcgtggtggctcatgcctatagtcccagctactcaggaggctgaggcaggagaatcacttgaacccaggaggcagaggttgcagtgagccaagatcgcaccactgcactccagtctggttgacaagaacaaaactctgtcttgaaaaaaaaaaaaggccgggcgcggtggctcacgcccgtaatgccagcactttgggaggctgaggtgggcagatcacaaggtcaggagatcgaaaccatcctggctaacatggtgaaaccccgtctctactaaaaatacaaaaaattagccgggcgtggtggtgggtgcctgtagtcccagctactcaggaggctgagacgaaaagaatggcgtgaactcgggaggcagagcttgcagtgagctgagatggtgccactgcactctagcctgggcgacacagcgagactcctctcaaaaaaaaaaaaagaaaagaaaaaagattatggtactttaatagctgttgttcacagagcctacactacatctttaatactgtgcttactgaggatattagtctcaatttaaacaaaattattattatttttttgagatggagtttagggcttgttgcccaggctggagtgcaatgacacgatctcggctcaccgcaacctctgcctcccgggttcaagcgattctcctgcctcagcctcccgagtagctgggattacaggcatgcaccaccacacctggataattttgtatttttagtagagacagggtttctccatgttggtcaggatggtctcgaactcctgacctcaagtgagccaccctcctcggcctctcaaagtgctgggattacaggcgtgagccaccacgcccggccaaaaataaaatattaatgaacacatggacacagggaggggaacgtcacacatcaggtcctgttggggtgttgggggctaggggagggatagcattaggagaaatacctaatgtagatgacaggttgatgggtgtagcaaaccaccatggcacatgtatacctatgcaacaaacctgcacgttctgcacatgtatctcagaacttaaactataatttaaaaaaaaattatcttcatctatagaaattagaagtataagttgatcaggttaatcaaaaaattctgtttataacttggagctaatgttaactgtcttgtttcttagaattgtacaatgaggtgccgggcacggtggttcatgcctgtagtcccagcactttgggaggctgaggcgggtggattacctgaagttgggagtttgagaccagcctgaccaacatggagaaaccccgtctctactaaaaatacaaaattagctgggcgtggtggcacatgcctgtaatcccaactactcgggaagctgaggcaggagaatcacttgaacccgggaggtggagcttgcggtgagccgagatcgcgccattgcactccagcctgggcaacaagagtgaaactccatctcaaaaaaaaaaagaaaaaaaaaaagaattgtacaatgaggtaaaataaaatcatatagttgaaactactgccaagtacagtggctcatacctgtaatcccagcactcttggaggccaa

SEQ ID NO: 12251 - DNA, 1123 bp, Homo sapiens
attcaaaaccacctttgccagaaggagttctgtctggcatgtgagctgggcttcctgtttcacatgttggacctctctcgtggtgacccttgccaggtcagtacttggagacacttaaaatggaaggggaaggaaggtggacacaaaagacaaaataacccctttccaccaacacatttccagggcaataattttcttcgggcattccgtactattcctgaggcctcagccctcggtctaatcctggctgactcagatgaggcctcaggcaagggcaatctggccaggctcattcagaggtggaatcgcttcattctcactcaactgcatcaagatatgcaggagctggaaataccacaggcttatcgaggtgctggaggcaggtatgaaatcaggatagaaatagttaaagccatcatgacaggcccctctgtgatttaaaaggtctcctaacttcctcaatgtgcatatatcatcctctccactcttagcagcttttgctcatcgggggactctgttattgggcagctcttcagctgtgagatggagaactgcagcctctgccgctgtggcagtgagaccgtgcgagcctcatccactctgcttttcacactctcctaccctgatggtagcaaaagtggtatacccttcagctcagttgggaaggctccccaaaatgtcctgtaatatcagggagagggtgttggggactaactgtgggtagaggggagaaccaggagtatagcatctaattttccctcagataaaactgggaagaactatgactttgctcaggtgctgaagcgaagcatctgcctggaccagaatacacaggcctggtgtgacacctgtgaaaagtaccagcccacggtgagtggactgttggactggactagagtcctggtcctgccatggagattcagccactatcccatgtggggctggctctgtcagcactgccatccagggatctctggtggagtgaggaatcccagtttgaagacgcagacccaggtccctgtccagactccttttcctgtacattccctgccattccttgtttgtttcttcctctcagattcagacccgcaacatccgccatctgccagatattcttgtcatc

SEQ ID NO: 12252 - DNA, 1021 bp, Homo sapiens
gggtcccaaggttttacttgggtttggccagagattagagcttttattttcttgaatatgaggaacatggaaaaaggtaaagataaagtaggcaaaataactgtagaattgctctttgctgagtagcgaaccatctgtggtttatggaaggcacgaagtggcattctgtctctaggcatggatttggggcccatcttgtcctgaaatcaggggaagaggataggaagggcataagaatatggctccctttcactttctagggctcagtgggtttcttcctcctttgtagggcagtgccaattctgtgaacccacaggcctggccaacccagccgatatctttcatgtgaatcctgtggggcctctgctaatgacatttgatgtgtcagccagcaagcaggctctggcctttggggattctgagggctgtgtgcacctctggactgattccccggagccttccttcaacccctactcccgtgagactgagtttgctttgccgtgtctcgtggactcactgcctcctctggactggagccaggacctgctgcctctttccctcatccctgtcccactcaccactgacacacttctctctgattggcctgctgccaactctgctccagctcccaggttgtaccctacctctgggccaaaaggcgggagggacagggaaagggccaagataccagaattctctgctagccctgttgttattctactactttcctgatttttgtctaccttcagtattttctttttctctggacccttggggattggggagtggaccagtgtacaccacaactctttaagtcctagaactatgctggattgtaggcgagcaccacccgtggatgcagagattctgcgcaccatgaagaaggtgggcttcattggctatgcgcccaatccccgcaccaggctgcgcaatcaggtgtgttcagagtggagggtcagccccgaccccggcccactgaagtttctcctatctttttcctttactagtctttcttttgttt

SEQ ID NO: 12253 - DNA, 1060 bp, Homo sapiens
tctcactctgttgcccaggctagagtgcaatggtgcaatcacagctcactgcagcctcaacctcctgggttcaagcaatcctcctacctcagcctcctgggtagctagcaccatggcatgcgccaccatgccctattttttttttttaaagacagggtcttgctatattgcccaggctggtcttgaactgggctcaagtgatcctcacgccttggcctcccaaagtgctgggattataggcatgagccactgtgcttggccaggatttttttttttttttttttgagatggagtttctctcttgttgtccaggctggagtgcaatggtgtgatctcggctcactgcaacctccgccttccgggttcaagtgactctcctgcctcagcctccccagtagctgggattacagatctgcaccaccatgcccagctaattttgtatttttagtagagacggggtttctccatgttggtcaggctggtctcgaactcctgacctcaagtgatctgtccacctcggcctcccagagtgctgggattacaggcgtgagccactgttcccagcaggaatttcttttttatagtattggataaagtttggtgtttttacagaggagaagcaatgggtcttagctctttctctattatgttatcatcctcccttttttgtacaatatgttgtttacctgaaaggaaggtttctattcgttggttgtggacctggacaaagtccaagtctgtggaacttaaaaccttgaaggtctgtcataggactctggacaatctcacaccttagctattcccagggaaccccagggggcaactgacattgctccaagatgttctcctgatgtagcttgagatataaaggaaaggccctgcacaggtggctgtttcttgtctgttatgtcagaggaacagtcctgttcagaaaggggctcttctgagcagaaatggctaataaactttgtgctgatctggaaatgtctcatctctgatcctctttatttccctgctcacaaaggctaatgttcttagggacaccaacaagctgcacagg

SEQ ID NO: 12254 - DNA, 1049 bp, Homo sapiens
gtcctctttcccttagtatctcagcccctctcctttcacacttagtctctttttcccataatattctcagtccctagagtcagaatggtcagggttccattggcccaacctggaaaatctcttagtttgacttttaggttcttacgtggaaggaaagtgaggggaaggaggcacactgtaggcctctgctggctggcctctttcagttacctgccttgtccttcctgttcttttcagaactgatcagagaaggcctttggtctcctctttttgggccaagaacctatatgctccctttctcctttcaccattcaggtcttccagtcgcagagcacctacatggagccccgaagaagaggctcatcttcgggagctgtacctcgccaataaggacgtggaaggtgagaggccttgggatctggagagtttatgaggagggcagcttgagctgtgggaccttctttactgccttagtccttccccacgccagggcaggatgtggtggaagccatcttggcccacctgaatactgttcctcgaacacgcaagcagatcatccaccatctggtacagatgggactggctgacagtgtcaaggacttccaaaggtagagaggcacatgctctggaggctattgggatggggactcgtgatcacttcctgggcttcctcttccactgacaccttcctaatcaggaaaggaacccatattgtactgtggacgggggatcaggagttggagctgcagcggctttttgaggaattccgggactcagatggtgagtaagctggaaactcaggggacctttgagatgaaagccaagctatccatttattttggggctgccttttattcccaaggaaagattctcccatcccttctgttcacttactatatttgtaagtgtcatttttggatgaattgaggtaccctctttccagagacctctgatttattttactcatctctttccctgttacccttgggtattcacatgcttgctttttatagatgtcctgggtcatatcatgaagaatatcacagcca

SEQ ID NO: 12255 - DNA, 1086 bp, Homo sapiens
gttaagccacctgctcaagttcaccagtttagtaccagacagaattggaattcaagtgctagatgccattttgttcatactactgggtctcaaagaggatccttggagcagagttggtttggggcaggtagagtgttttgtttcgtcttcaaaaagtaagtttatttggtcgggcgcagtggctcatgcctggtatcccagcactttgggaggcccaggtgggcagatcatgaggtcaggagtttgagaccagcctggccaatatggtgaaaccccatctctactaaaaatacaaaaattagctgggcatggtggcgcgtgcctgtagtcccagctacttgggaagctgaggcagaagagttgcttgaatccaggaggtggcggttgcagtgagctgagatcgtgccactgcactccagcctgggcgacagagcaagactctgtctcaaaaaaaaaaaaaaaaaaaaaaaggttaatttgaattgcaaatacatttaatattttatctgttgttttcttttggttcttgcattttaatgcctccaagtattgatttcagatgcatattgcttcatctgaactgcttgatacttagttgagtaggaaaagtaactaacatcccttttaaatgtccagttccattggctctgtggtgtttgacaaagttctcacctggtctatgatgaaatgtgaaaataaagtcaatgtaatgaattttttcatgaagtcatatttattaaatttgaaggacagtattttatcctgagatttttgtctgtagtttttttggtgttaaaatggtagaaacagaatgcgtatagtaattgtgtggagtgttgtttataacggctgtttgagatataattcatatactgtaaaattcacccttttaaagtgtacaattcaggctaggtgtggtggttcacacctgtaatctcagcactttgggaggccaaggcaggaggattgcttgaggccagtcaggagtttgagaccagtgtgggcaacatagggaggtaccagctctacacaaatttaaaaattagccagatgtggtattgaatgcctgtggtcccagctgcttgg

SEQ ID NO: 12256 - DNA, 1013 bp, Homo sapiens
tagggaccaggcactcatatggcggggtggggtcctagcctcagtttgaagaagtgggggctggagcggggttgggggtggtagggatagggcatgatcaaaggggccatttcttgcttttctttcctcatcttcactgcccccttgagctaggtggattttctcttcatgacaagagtatttggtagggaaagcaggtttaaaataaaaagacaacccaccccctgcccttttgcttccctcccatcagtctggttgacaggaagaaaccacaccatcaacaccaacaagtttctgtgttccttttacagcaaaagggactttttatataaccaaatgtggtgttttagtgactttttgataatgtacagttttttgtgaatttaaatttatttctttctatatttttaggaccaatctcatttttaataaggttaaaaagaaaaaaaaagtctagcgaaaaaactcctgtttttgccatgtgatgttccacaagtgcagctgtagaaaagtgcttgtcagttgttgaataaaaaaaaccacatttgatagagattcaaaagactctgtgtattcatcttcccttctacacacctgagggggagacggcgttgggataggtatgactggcttaagagaccacaggcaagggaacaacaggggctcctgttccataccctctgtgtggatggaaagggtcattagtgctcctgcctaaatgtctggctgagttgctggagcaaagggggattcagtgcatccaggtcctgccttgtgagatgtggccccagcttcctaagctgccacctctgtgttcctgtcatagcaaatatgggaccatcaccagcttaccacttcccactcacggataagacaccaagacgtagacttttgtgttttatttaaaaaaaaaaaagtgtgaagtaagacaaaatggacctctaccaagttgtagggaaggacaaggaaaagaccaggggtagaaaaggagtgtaagttttagaatggtggca

SEQ ID NO: 12257 - DNA, 1032 bp, Homo sapiens
cctggacatgctgcttccatgttcagtcccttccctgcttctcgctgtctttcttttcccacctcccaccccccagttttcagattttctctcatccaataatgtaaaactatcgtgtacgggttcctccctccttttctcttctcccaaatcttttcccttcaaaggaaaaaaaaatgttcagaggtccctgtcttctgtccccatcttcctgccgatagctatcccctgtatgatgttggatgctcctcacatgctgagtttccagccttttctgaaactcagtagctggggagagggcagggaggcttcctgggccttccagcctccttccccacctccttcccaaaccctcttgggaactcctcagggacaactactgctgagtttgggtgcaccctaagatggaggccaggtagcaatggggccggcctcagagagagcgctgtgtgtgtgtgtgtgtgtgtgtgtgtgtgtgtgtgtcggcctcagagcgcgctgtgtgtgtgtgtgtgtgtgtcagcctcagagcgcgcgctgtgtgtgtgtgtgtgtgtgcgtgcttgtgaccctgtattgtttgataggatccattcagtttccccaagtacctgttttcattcccatttttcccattgtttaaaaccatcacttttttgtctttgggaaaccacaggaacaatttctctggagacaaggctgtgtctctctcctggtcatttttgttccagcctcttcagactgtgcaatctttcagcaggaactccctctcttctcggtagctttgaatcttaagcttctacgggagagtggtagaactggatcatttcctaatcccatttagttgtgcttttcttcatttacttcataccccaggaccccttccccagcagcagagaccctggagcacaggagagtagggaggaggggttctgggtccatcactgccctacatgtgactatgtccaagttaagcccccaacacgagaggaaagctgctgactcccagctatagccatgggcacttggccc

SEQ ID NO: 12258 - DNA, 1028 bp, Homo sapiens
ctttcttgaatctgataacctcctttttcataatgcccatgtgtttctccctaggttgatgccacagcatctagcatcccagagctagagcgccagatagaaaaactcagcaaggtattgtgcttctaacctcccaagagttggagatatgggctgggcaagaattgatcagcttcttttttaaactgaattttaatttttattcttttgagatggggtttctgttacccaggctggagtgcagtggcacgatcatggctcactgcagcctcagcctcctgggcttaggtgattctcccaagtagctgggactacaggcaggagccaccatgcctggctaatttttgtgtttttgtagagacagtttccatatgttaccaaggctggttctgaactcctgggctctagcaatccacctgccttggcctcccaaagtgctgggattacaggcgtgagccaccgctcccaaacttaatcaccttctgaattaggcccagatggcatcacttttatagagggactgagagccattgcctttctctgatatactggatgaattcaccactgtcactctggaaatgtgtttattcatcttcattttcattgtctacccagcgtcagcttttctttcgcaaaaagctgcttcactcatcccagatgcttcgggcggtctccctgggtcaggaccgctacagacgtcgctactgggtattgccgtatttggctggtatctttgtagaaggaacagaggggaacttaggtaggtgtgcctgtgggagtgtggattctgagtcctatcaaacaagaattaaataattccttttccttagtagtcttgggcttctttcattttctgataatatagcgtaatggttaagagcacagattttagagtaaagctgcctacccacctgctctgccatttccagctgtatgattctgtttcttcatttgtgaagttgagataataatagtgtatgtacttcataaggctactgagaggattaaaatgagttaagtctcttaga

SEQ ID NO: 12259 - DNA, 1041 bp, Homo sapiens
gctagactctgtctcaaaaaaaaaaaaaaaaaaaaaaaaagccaggcacggtggctcacgcctgtaatcccaccactttgggagactgaggagggcagatcacctgaggtcgggagttcaagaccagcctgaccaacatgaagaaaccctgtctctactataaatacaaaattagccaggcatggtggcgcatgcctgtaatcccagctactcgggaggctgaggcaggagaatggcttgaacccaggaggcagaggttgcagtgagctgagatcacaccattgcactccagcctgggcaacaagagtgaaactccatctcaaaataataataataatataataataataataggcactgttttagtggatggacaggtgagaaatacctacatttttcagtaaatagtgtgtttaccctggtgtagtgtgaagaatgtgaaaaaacttagtcttttgattttcactcagacatctagccgtgtcatgtttcaaccaaatgacctagaacaagtctcattttgtttttttttttttgagacagagtcttactctgtcacccaggatggagtgcagtggcacgatcttggctcactacaagctctgcctcctggattcaccccattctcctgcctcggcctcccgagtagctgggactacaggtgcacgccaccacacctggctaattttttgtatttttagtagagacggggtttcaccatgttagccaggatggtctcgatctcctgacctcgtgatccgcccacctcgacctctcaaagtgctgggattacaggtgtagcccccacgcctggccctttttttttttttttccagatggagttttgctcttgttgcccaggctggagtgcaatggcgcgatcttggctcaccgcaacctcccaggtttaagcgattctcctgcctcagcctccagagtagctgggattacaggcatatgccaccacgcccagctaattttgtatttttagtagagatggggtttctccatgttggtcaggctggtctcgaactcctgacc

SEQ ID NO: 12260 - DNA, 1695 bp, Homo sapiens
ctgtcagcttattcagcaggtattaggggtggtaagaagggtcttttgagtgctaagaatatggagtgagatgataaagataggtcagaaagggggatggcttaagtaaaattactttggttcgctgggcgtggtggctcacgcctataatcccaacactttgggaggccaaggcgggtggatcacgaggtcaggagttcaagaccagcctggccaagatagtgaaaccccgtctctactaaaaatacaaaaaaattagccgggtgtggtgatgggcacctgtagtcctagccactcgggaagctgagacagagaattgcttgaatccaggaggcagaggttgcagtgagccgagattgcaccactgcactccagcctgggcgacagagcgagaccctctcaaaaaaaaaaaaaaaaatttactttggttcctgttcttcatgggatctcactttaggctatctatgtgcctgctgatgacttgactgaccctgcccctgctactacgtttgcccatttggatgctaccactgtactgtcgcgtgccattgctgagctgggcatctatccagctgtggatcctctagactccacctctcgtatcatggatcccaacattgttggcagtgagcattacgatgttgcccgtggggtgcaaaagatcctgcaggtgagtatattactatgtgggatcagtgtccggaaagtcaaaaagagggcctgtggggactatatgaggactggatctttcttagtgatttgttttggagcaaggaaagttgaggctggcaattgctagtgagagctaatgaggtctcttgagtttccaggtacttaacgctttggaatgcaatatttttctttctttttttttttttttgagatgagtctcactgtgtctcccaagctggagtgcagtggtgccatctcggctcactgcaacctccgcctcccaggttcaagcgattctcctgcctcagcctcctgagtacctgggattacaggtgcgcgccaccatgcctggctactttttgtatttttagtagagaccaggtttcatcagttggtcaggctggtctcgatctcctgacctcatgatccacccaccgtggcctcccaaagtggtgggattacagacgtgagccactgcgcccggcggaatgcaatatttttctaacagcaccaaactaggactatggagaacaagacactgatctttcttggctgagggccctcataacaccaccaccttctctgccccctagcatgtaactttccctttgttagcttgtccaaattaaaggaatgagaatacttaactcagtcttcttttttctcataggactacaaatccctccaggatatcattgccatcctgggtatggatgaactttctgaggaagacaagttgaccgtgtcccgtgcacggaaaatacagcgtttcttgtctcagccattccaggttgctgaggtcttcacaggtcatatggggaagctggtacccctgaaggagaccatcaaaggattccagcagattttggcaggtgagattttgagtacaaatcttgaatgtttactgtgctgtggtcccattccaacaaccgtcaagcaatatatgtaatatactatgcttaattatattttttaatttaaaaaacaaacttacccattgattttgtttgaaaatactctaca

SEQ ID NO: 12261 - DNA, 2418 bp, Homo sapiens
cgttgaccttccggttgaataggggtactgaactctcgaaaaatggggtcttgtgcatgcggatgggaaggctgtgcaggcgctttatcgatcgctgcgcggccttccctcttggacacgcgttccgtacaagcggaaagaggcctgacttcggctgagttttcctctccttgtgtgttaagtcctggcttccgatgacctttaactggcctgaccccagctccttccaatatcttttgtctgttagtcagggactatgcggcgcaaacatctccttcgccaaaagcaggcgccgccaccgggcgcatcgtggcggtcattggcgcagtggtggacgtccagtttgatgagggactaccaccaattctaaatgccctggaagtgcaaggcagggagaccagactggttttggaggtggcccagcatttgggtaagtagagtttgttaggaatagtaaagaccttgtgtagcccaaatatccccaaaaccaagctgtctgccttctatgatgattttatcaaaatgactttcgttcttctgagtttgctgaagccacatttaggtactgagaaggagtcttggtcgatttaggtcttgataccaatttatccttatgtataaccctgcgatgcctgtatctaacaggtgagagcacagtaaggactattgctatggatggtacagaaggcttggttagaggccagaaagtactggattctggtgcaccaatcaaaattcctgttggtcctgagactttgggcagaatcatgaatgtcattggagaacctattgatgaaagaggtcccatcaaaaccaaacagtaagttgctcttattgcatctatgcacaaaggaacttctgttatttgcagttttacacattaaggtgacatgttctcctaaagcagaatttttcttctgatacgttcgattattaaaatcacacagtgcagtttcacctgaagaaattaggatgcagaatttctgattgacaaaagcctactacttgaggtttttttttttgagagggagtttcgctctcgactcactgcaacctccacctcctgggttcaagtgattctcctgtctcagcctcctgagtagctgggattacaggtgcatgccatcatgcccggctaatttttgtatttttagtacagatggggtttcaccatgttggccaggctggtctcgaactcctgattttgggtgattccccccccacctcggccccccaaagtgctgggataacaggcatgagccactgcgcctggctagttgagtatttttaagactcggtcttatggcttaggtttaggagtctccaaaacttgtaggtttttgtatttgctattgctatgtgagggaatgctgttaggttaaggctcagtaaaatgaaaaatttatgacagttaaagtcagggaatgggattattgtttcctaagataataattttctttattgcagaaagttgggttagatcctagatgatagtttatctgatttatgtaagaaaggggaggtaagactgtggttcctcaggtaaagggatggacttgagagttgatagggagggatatataagattatcatttgctttcaacaaggtgaatagatactatcctctcttctacctttacagatttgctcccattcatgctgaggctccagagttcatggaaatgagtgttgagcaggaaattctggtgactggtatcaaggttgtcgatctgctagctccctatgccaagggtggcaaaattggtatgttattaaggggtacatattttccaaacctaatatgggaggaaaaactcatacaatgttatgagtggatattgacatctattcctcactgatgagtacgttctgactttcgttcttctgagtttgctgaagccagatgcaatttctgagaaggaataggatggaaggaagcaattactttttttgaagtttgcttatttaggaaagcagaactcttaaatattctttcttttcaacctcttatagggctttttggtggtgctggagttggcaagactgtactgatcatggagttaatcaacaatgtcgccaaagcccatggtggttactctgtgtttgctggtgttggtgagaggacccgtgaaggcaatgatttataccatgaaatgattgaatctggtgttatcaacttaaaagatgccacctctaaggtaagcattgagctaattgatgtccacgtggtagttacgccaggaaactattgccaactgaagccatgttctatattttctatttaatttttttttctttttaagaaaatgttaatattttcattttcgtgtcccagggcctacaaaggaaacctgttagtgttttcccccccaacttccaatacacaaatggacattttctttcctctttgatactgac

SEQ ID NO: 12262 - DNA, 2370 bp, Homo sapiens
ggattagagttcactgtcttctatcagtccatttttcttcatattgatccatgttttctctttgaatgccgagataggttaatttaggaatggattcaacgggtgggctaaattgtcaccaaaaggcacacatcattttttataggtagataaatcctctgctgtacatccattcaccttaggtaaacctagtcaagtccaatgactaaatttctaggcttgatatgactacctacctgtgctactttagtcaaaaatatagcacttgaacttttttaggtaaactgttcagttagcaaacgaatatttgatcagctcggtaactttattttccctctttcaggattcacaagacagtgatgatgaaagtaagtgtatataaaaagtatgtttatacagtgatactttgcatcaaaaaacaaactcaaaatagagatgttaacttctttggaagtaaagtaattttttctttatgaccttgaataaataaccaaagcagaaatgtgaataacttgatagcaagacaacctattaattcattgggcaactatgtatttcgatttttggttgcttttcctttaagacagtaaaattggtagattattcacttgtactatatactaatatttttaaaaattctttcagaaatgccagatctggagtaaggaatattgtcatcacctggattttgagaaagaaaaataacttctctgcaagatttcataattgagagaattcctgagttgatagctctaaaggcagatatgctgtatttgcctactttaacccatttttcaacctgtttgttttttaaaaggcttcactaagggttgatatgtaccattgtatggggcaattttaagtcagctaaggcaataaccttatgcatgaacatttcccagactttcatgaagctgttgaggtcctaggcaattaatgcagcagttgcgataaataaaaacatctcacctaagtctccttttcttcataacatagatactgacatgataggaagctctcagcttagggaaagagaataaattttagattatagaacatggattcaaaagtgactggaacaaattggctgacaccttactggtaacctgctattcttctggtgttatccttcaggattgttccactaaaatttatttttcaaaaaatttacttcacattattctatgtaagtgatgacttgtcagtgttccaggtgtatcttagctaaaactagagaatgccctaacttagatggtttttgaagcctatacaattggtattgtttgacccttaagcttttacatctcttagcatggaggacgaagaaagctgtacattgttgcttgagagtctgtacatttagtccagatttgtatttgcactgtcagtatggcaaatgagtgaaaaatgtttaatacactattggattttttatttcctttttttgattcagcttatacccgggctgaaaacctcaatttatgttcatgacagtggggatttttttaaatgtctacattctttctaataaactgttggaagacttcttggctgtccttttaagtgtctggcttactgtaatttttatgtatttaccatttactggaatggagtttatttgaggaagaatttgggattattcctctgtttgaaaaaagaggcttgctgtaatgtcacaggaaaccttttaaaagtggatctgtaatagcatattgtagatgcactttgcagcagttggaaaagaaagtgttgtgtgatttgattgaaataaaactaaatgtgttgtcctcctaaatctttgaacttctgcattttggcagttttcattccctcacagcttctgtatttgtcataatgtagaaacactatgtattttagtgtttctttgtcagatattcaggacctgtgttgcaggcagttaaagtgctggtgatacaaagattaatatttcagatgattgctgagctcagagagctcacaggctaggggagacaaacatgagacaaaaacttgatggaaagtgcgataatagatacgcataatgtattacgatgtgtagttcttagcttcaggggggaaaacattttaaaaaaacttgtttttcttcaaaaaatttatacttcagttttgggaattaatgattcactggcttactgcccagccttgaaacgcattatacaggccggcacggtggctcccacctgcctttaatcacagcactctgggagactgaggcgggcagattgcttgagaccagcctgggcaatgtggtgaaactcccttttttttttttttttttttttttttggagacggagtgttgccctgttgcccagtgcaacttccaccctccaggttcaatcgattatcc

SEQ ID NO: 12263 - DNA, 1035 bp, Homo sapiens
ttagattatataataaaacaaactggaagtacagagacatggttagttactttgcaataaaaggaccgctggagaaattattgtccctttttgtgaagtgaaaaaaaataagccttctgtcagaaatgctgggttccaatcctattttggctttttttttttttttggggggggagacacagcctctctctgttgcccaggctgtagtgcagtggcgtgatctcggcttaccgcaacctccacctccacctccccctccccctccccctcccagcctcccaaatagctggtattacaggcatacgccacctcgcctggctaattttgtatttttagtagagacggggtttctccacgttggtcagactggtctcaaactcccagccccaggtgatccatcagccttggcctcacaaagtgctgggatcatgggcttgagtcactgcgcctggtctgcagtttttgtgttgtgttttgagacggagtttcacgctgttgtccaggctggagtgcaatggcgtggtctgggctcactgcaacctccacctccttatttcaagcgattctcctgctgcagcatcctgagtagctgggattacaggtgcccatcaccacacccagctaattttttgtatttttagtagagatggggtttcataatgtttgccaggctggtctctgaactcctgaccttaggtgatgcacccatctcagcctcccaaagtgctggagattacaggcgtgagccaccgcactcggccctgtttgtagttttaatgtgttagccaacttgtataaagggtcagccagtaaatattcagctttgcaggccacaaatatctcttatctcattcacattttttttttttttttttttggtctcattctgttgcctaggctagagtgcagtagtgtgatcttggctcactgcaacttccgcctcctgtgtttttttaaaaatatacatttaaaaaatgtaggaatcatttttggttcatggcctaaccacaggttttgataatttaaatttgtttt

SEQ ID NO: 12264 - DNA, 1048 bp, Homo sapiens
tgggttgaagtagttctctgcctcagcttcctgagtagctgggattccaggtgcctgccgccatgcctggctaattttttttttttttttttttttttttttgagacagagtttctctcttgttgcccaggctgaagtgcaatgtcacggtctcggctcaccgcaacctccgcctcctgtgttcaagcaattctcctgcctcagcctcccgggtagctgcgatcacaggcatgcgccaccatgcccggctaattagtagagatggggtttctccatgttggtcaggctggtctcaaactcccgacttcaggtgatcacccgcctcggcctcagaaagtgctgggattacaggtgtgagccactgcatctggcctaattttatatatttttagtagcgatggggtttcaccatcttggccaggctggtcttgaactcctgacctcatgatccacgcgcctcagactcctagagtgctgggattacaggcgtgagctactgccgcagccggcaatgatagattctagaatgaggctgcttccctgcttcctcggtatacctttgtaaatttttttttttttcttgaggcggagtctcattctgttgcccagactgcagtgcagtggcgcgatcttggctcactgcaacctctgcctcctaggttcaagcgattctcctctctcagactcccaagtagctgggactacaggcatgtgccgctatgcccagctaattttttgtattttagtagaaatggggtttcgccgttttgctcaggcaatcatcccaccttggccttccaaagtgctaggattacaggtgtgagccaccacgcccggcctttttttttttttttcttttaaatggagacgggatcttaccgtgttgtccaggttggtcttgaactcctgggctcaagtgatcttcctcccaaagtcctgggtttacaggtgtgagctgctgcacccgatccttggtatacctttgaacttgcggttttccgggaatatttcttcttttctgagacactgtctcactactttgcccagg

SEQ ID NO: 12265 - DNA, 1032 bp, Homo sapiens
gttggtggctcacacctgttatcccagcacactggaaggccaaggcagatggatcacttgaggtcaggagttcaagaccagcctggccaacatggcgaaaccccatctctactaaaaataccaaaaatatatagcagggcatggtggtaacgctcctgtaatcccagctactaaggtggctgaggcacggcaattgcttgaacctgggagacggacattacattgagccgagattgcaccactgcactccagcctgggcgacagagcaagacctgcctccaaaaaataaaaaataaagtaacagaagttactacggcagaaaacccattctctattcttgtatgaacttttctcagcctggggaaaggctttgctttggatgttgtattatgttccttgcttctttaggctgcttctaaagaggttgaaaacctgatactattttctcttctttaggctatgtccaaactgggtcttcggcaggttacaggagttactagagtcactatccggaaatctaagaatatcctctttgtcatcacaaaaccagatgtctacaagagccctgcttcagatacttacatagtttttggggaagccaaggtgagtaaacttttcttgggcattgttccagaccagggtttctcaacctcagcactgctgacattttgcgtcagatagttctctgttatggaagggctatccattacatccagttttgattacccaaaaactccattgccatatatctcctgggagacctaactaccccctagttgagaaccactgctctaaacctaaacaactactctttctactgtgagggcaagcagtttaaagctgtacaataagttacctgaatgggtttacagagagttgtgaaactatatgatttatttttcaaagactgctaatctactcacatggatctgtattttctaccctgtagatcgaagatttatcccagcaagcacaactagcagctgctgagaaattcaaagttcaaggtgaagctgtctcaaacattcaaga

SEQ ID NO: 12266 - DNA, 1089 bp, Homo sapiens
tgcctttatcacatgtctggatgagatgtgtgctggtggtaaatgtgtcctactgggccccagagtcgtcctaggtcggataacttgtttatgggttggtggtgctgagatacttctagtgtgctggaatagttcctgcatcattgtgtgaaacccaggattgaaataaatccttttatcctcagcgtcgaaattaacgactgtgaaggctaattttaaattctggttaaaacatatctctgtagaaaacttaggaggaggtaatgaaaagttcttaaaatgatagcctttctgagtcagttgtgcagcgttaaatgaaggaaatcttcaggctgtaattttcattctcacctttttggttttttttaaatttcatttgttatttaagggcaattcctgtccctttttggagttacagtagagttgcttatagttgaaagcataaagtttcttcccacctgtttgattttaacagctgaagggattaatacagctgctaggaaggacaatagggggctctaagctggagtataaacaatatgaaattcttgaagtacaaggggcttaaggaagggaaaaaataaagtactgttctctaaagattctgtaatttcagtacaaaacgagattttagagattgtgtcattgaacaacttaattttacaaatacgaagatttgaaattcagatgaatttagaataatctgattcaagcttcaaaactaatgcatttacttctgaaacagtccttaatgctattaaacgtattcctgaatagtctgagttgcatagtaggcttatattaaggaagtaccaatgataaatacacaaggttttatctgtaatgatagtctattagaatgaagaaggaagctcaaggaattgttgatggtgtcaaagcaagtatttgagtgcttattccatttgaggtccagtcagaagaaaacatattccatgtttttaattctgattcattatgtttggtagcgttttcctgtaatcgttagactttggcctacccactctccaggaaaaactagttgagccaccttgtcttttccatggtaggatgccataagaacttcagaat

SEQ ID NO: 12267 - DNA, 1028 bp, Homo sapiens
aacaggcgtgggtcacgctctcgctcggtctttctgccgccatcttggttccgcgttccctgcacagtaagtactttctgtgccgctactgtctatccgcagccatccgcctttctttcgggctaagccgccccggggactgagagttaaggagagttggaggctttactgggccacagggttcctactcgcccctgggcctccggacaaaatggggtctgcggttggtgtcctggcaaaagcagggtagaagggctgcggggcgggcccagaatccgagcctgcagagatgggagcagttgcagtgttgagggcggaagaggagtgcgtcttgttttgggaactgcttcacaggatccagaaaagggtaaggggtcacagccttagaacctgtaacaccgttctccctgtgacaagcaagtgttggacttaaaacaccgtctttcccctcctggtaccccaaagtcggcaaacgtagtccaggaggccccagcccagccagtgtgagtattaggagtggagggggttcacagtagcgtctgaagtctcccatgatcgagagccagcccgggatcctctccctcgggttgagaatgcagtgggaattgctggccttgatagaggcgtgagggtcacatcatatttacctcttattcccaggtgctttggggaaggttgtcaccaaacaccctcacgatttttttctaacagccctcctcggagtttttaagaatacttatctccgggttgggcaagtgaatgtatcccaatcaatttaggcctcctttttattcccttccttcagaaatgcccggcgaagccacagaaaccgtccctgctacagagcaggagttgccgcagccccaggctgagacaggtaggtttccctaccctccttgccattaattaaaattaaccctaaagccatttggtgggcaaaatgaccaaggggaaatacactttttaggaggatggggttgcagctttaccaaggaggatagaccgtaaaattactatcctggagatac

SEQ ID NO: 12268 - DNA, 1028 bp, Homo sapiens
gggcaataaaagtgagactgtcccaaaaacaaaacaaacaggctgggcatggtggctcacgcctgtaatcccagtagtttgggaggccgaggcaggcggattacctgaggtcaggagttcaagaccagcctggccaacatggtgaaacccgtctctactaaaaataaaaaattagccgggggtggtggcacacacctgtaatcccagctactcgggaggctgaggcgggacaactgcttgagccctggaggcggagattgcagtgagccgagatcgtgccactgcactctagcctggccgacagagcgactcaaaaaaaaaaaaaaaaaaatccaagaagtgcccaaaatagcaagcaaaggaattgtatatgtgcctatgttctttttttctgggaaggagaatctgcagctttataatttcaacatcggctaaattgtcgtgaacctaaaacaatcaaaagggccggaatctatttaaagagtttattcaagggcagtgtgaggatggaccaaccagaaaacctccaaagaatggagtcagccttcagaagtagagaagttacgatttcatttatttagggagacagaggagtttttagctggattacgttatccatacaaggttggaacataattacagaatttggttacaagaagtgttttttttggggggggggcgggggtacagctaacattgttttacgaagagtttaacacgcatgagttgctgtcatctggtgacatcgtttgagtctctctagtcattgaacagaacaagaaaaatcgaattaaatttataatctgaactgaagttatatgtgacccatcacatctctcaagttttaaaatgggtttttttgttgttgttgatggggggggagagggtccagcagcttttaaatgttttcacatcgtgtgttccaaaaataactggttagcctaagtcacttccaccctccaatgttgtgaatgcagtctctagcattcgctatttaatgtcttcttcctgcactatttgagaaatcg

SEQ ID NO: 12269 - DNA, 1015 bp, Homo sapiens
agatcatggtgtttagaatatcccaaatttagctggccgcataatttttttacagtaaattttatgggattcacatgctattatacactggataatgctgatcagaaaccaacattaaacttctcttgttcgtggtgaggcgcggtggctcatgcctgtaatcccaacactttgggagggcaaagcgcgtggatcacaaggtcaagagatcgagaccatcctggccaacatggtgaaaccctgtctctactaaaaatacaaaaattagctgcgcttggtggcatatgcctgtagtcccagctacttgggaggctgaggcagaagaatcacttgaacctgggaggcggaggttgcagtgagccaagatcgcaccaccacactccggcctggcaacagagcaagactccgtctcaaaaacaaaaacaaaaacaaaattctcttgttctgttacttgcagcttcatctgccgtgaattggatgccatttccactaatgaagaggaaaaagaggagaatgaagctgaatctgatgtcaaacatagaaccagaggtaaggtaatattttgaagcttcactttaaatacagggtttttatatagatatccatctgtcactccagtaattaattctctgattcaactagaatggatcagcatttgtcctggaactgcatacaatgtttgtgtcctttcttcaacagcagcccaagtggtgttattgaatccagtctgattcaacacatatttcctaagtaacttttaatgctaggatctatactgtaagattaaactatcaataagtatgaataatcagtctctgagattcaccacctatttatttaacaactattatatatgcagtactttttttctttgtttctgatgcatataggtgggttttatggtaaacatatgtctaaactgtttaccaagttgtatattcaagaatttgaagaagctggctgggcgcagtggctcacgcctgtaatcccggctctttgggaggccgaggcaggc

SEQ ID NO: 12270 - DNA, 1069 bp, Homo sapiens
attacaggcatgagccactgtgcccagcttctcatagcctctttataataaagtctcaattcaaactaattggggagatctttttgaattattgaaaaatttttaaatacttctatgtatggtaacaagtaaaggttcttaaaacaccttgcaataggccattatttgtatacgttcccttgtcagaaaactaaaaacagctttattattatccttattgaccaacaaacatttatgatggatatgtattcattaaaccctgctttaagttggtgaaagttaagactctcatcaatagtgtatgtgtaagatccaaaataatgaactttcactgtcataaagttggcattatatagtctctttatttctgtttggcaactttttccatatgtgtagaaaataagcagatttagcagtgtggcagctcttatagaaactgatcaatattttgtatctgtagcccaatcaacacaatacagtgaagctgggagctttccaggctcaggaaaaagaactggtatttgacattgacatgacagactatgacgatgtgaggagatgttgtaggtgagcactgtgtgtcttgctgttagggtgggtggtatcactgacaatgagtaatgatgactctgctttagttctgcagacatatgtcctaagtgctggaccctcatgacaatggccatacgcatcattgacagagcattgaagggcaagtatcagcagtttctgaatggggtcaagtgtaagaatcggttttcctctgactactattaactattagtctctgtattttgtgatcaaatctcattaatttgtgtgtgtgtgtgtgtgtgtgtgtgtgtgtgtgtgtgtgtgtgtgtgtgacgagtctcactctgtcagccaggctggagtgcagtggtacaatgtcggctcactgcaacctctgcctcctgggttcaagtgattctcctgcctcagcctcctgagtagctgggactacaggcgcacgccaccacgcccagttaatttttgtatttttagtagaggcagcgtttcaccatgttggtcaggctggtctcgaact

SEQ ID NO: 12271 - DNA, 1050 bp, Homo sapiens
aaaggcagtctatgtcataaggaccgcaactcctaggtgaggcctagtgcagaactaggcccagagacagtggattagggggacatgtgacatactgagacaccagctggggcagccaagggaatgtcggcatcacccctcccctaactccagtctgcacaacctgaggctccaaaggagaccccttttttctacttgagcagaggagagggaagagtgggaagggttttgtcttgcatcttggataccagctcagctacagcaagatagggcaatgatcagagtcatgaggcccctgtttcaagtcctagctcccatatgacattactagacagaccctgggccagaagggaaaggacccaatgctaacagcattcatcacctgctatctgaagagaacttgggccctgaataaccagtaattcctaggtgctaatcaaaggccttgggtgagcctctgaaccttgatggcttcaggtgagactcgggacattgccagctatgttggctatggagagagactcctgcttgagtaaagcagagagaaaagtaaagggactttgtcttacaccttaggtgccagcaagaccacagtggggtagagcaccaagtgggctattgtggttcctgattctgggacttgactcttggatgacattttctggacataccctgggccattgggaagcctgctgacctgcagggtgagttccaggccaggcagcattcaccacaagctgattgaagagatgttgggccttaagggaacatcgatagttgtctggcagtactccctgtggcctggggtggtggtggctgcaggttgaggctcctctgcctttggaaaaggaagggaagagtgggaaggactgtgtcttgtggtttgagtgcccactcagctacaatttagtagaatatcaggtacacttctaaggtttttgactctagtccttgactcctgcacagcacttctggacccatatggggtatggggtacctcaccatcctgaagggaagggcacaggcctaactgactttgctacttgctga

SEQ ID NO: 12272 - DNA, 1058 bp, Homo sapiens
accaccttatatgttcctcagtagctagtggagctttgatagttgtgttcaagcatgtgcatggtatttggcatcatgagggaaaagaatatgctcaatgaattaggaaagcttgtatttgggaggaaattaataggagaaaaatttgatccagtggctctggtaatgaagtataagattgtgtccaagggaatgcctctggttcgtctctaggcaccagcttaaaaccaagctatcagattgtcatcagtcgttttggtttttgtcataactctttgagtatatacagggggagatgtcattgccttgtcataatggaggaactctccatgccagtttactcctgatccctacctggggcttggaagcattcagagtgatggtattttctcctgcatagcccctcttttgcacggatgtgtttggccatccatctttttctcttgctatccacagattaactgtgctgataaggaggtaatttcataggagctgctaagatgggcatgaggatcaaactgcaaagcaccaaccaccccaacaacctgctgaaggaactcaacaagtgccggctctcagagaccatgtgcgacgtcaccattgtggtggggagccgctccttcccggcccacaaggctgtgctggcctgtgcagctggctacttccagaacctcttcctgaatactgggcttgatgctgccaggacctatgtggtggacttcatcacccctgccaactttgagaaggttctgagctttgtctacacttcagaactcttcacagacctgatcaatgttggggtcatctacgaggtagctgagcgtctgggtatggaggacctcctccaggcctgtcactctacctttcctgatctggagagcactgccagggccaagcccctgaccagcaccagtgagagccactctggtaccctgagttgtccttcggcagaacctgcccatccccttggagaactccgaggtggtggggactaccttggtgctgatagaaactatgtgttgcccagtgatgctggagggagctataaagaggaagag

SEQ ID NO: 12273 - DNA, 4162 bp, Homo sapiens
taagccttgaaactatgtagtttcttgatacacaatttgtagttatgcagcagccacaatttgcattgccaggaaataggctccaggttatcttcatgcctctgggtgctcattcagctgtcaagtttccatgaacttacacttatttatgattgcgtttctgacctgagatgtatgctgcctgttattgcagtagcattagtttcagattcttttgccattgcaaagtaccccttataaaccagcaatgtcatctgtgaggaagcaaattctcaagtgtctgtcatttacttggttctttttctttgtggtcttcacccttataccctggaaaagtctgtaattaccttagccaggaagatagatggtcatggcaagcgcacagcaccagacttactggctcaccaagatgatggaaaaaggcagatgattttttaaaaagccgtaatgactcctttagaccagccatttagcgtggtaattttgaaaggcctagctccattgcagacttccaaagggtcagctctgagactgccctccaggtgggcagttgattatttccaccagtgttttccagagccttaaactgtcctaagtgacaactacctcagttggcaggaaagagacatatagtagaaagtgaaaaatgagcagtatttgggcagatgctatgggttacagttgaagggtaaaaggaactttacattgggaaacctttatacccttgtgaattatgtacatggtaaaatgttctctctctacaaagaactattaaaacttctgaaatatactattttttaccttatttatagaaattgagacctagcatatttaagcataagtttattttaaaaaataattcaactcgtgcaagtggtctcaggattctctggagattttggtgcctcccctacttagggaggtgatagcttgcctataagggtgacttttcctgatcatgtctttatttcaatgagaaagcactgtgaaattgtgaaagattctcctctttctctgtttaataaacccccatgaaatatagtttccatctctagaccagttttttttccaccgtgtttagacttgaggtgaataaaatcaaactgttttttactccctatctggtagttggagacctgagctgtaggcagtggagatggcaattggttctgcagcctgagagttgctctcacacagtgaaggacggtgctgctctggtgtgctgtgtgtccttgccctgcctgcctgtggctctgcccagatgcttcagatcctctgtgttccggagattgcttgacttcaaccttctttaggagctgctcttgtctccctcttggccacttagtttgctggctcagtcactacttgaagaccccatttaatttttctctggcagttatagctcttgtgatttcagtacagtctcatctctcagaccaatctcatcaagaaggattgaagggataactatgaggtaagctggacattggagccgtgtttgctgccacgtcagcgtcttgctgggtgaatgtcaagccataaatgggctccagggctctggatctcatcagcattggaaatctattgcctctcatcagtctgaccaaattatgtagagcattaatgtagagactcccattaatgggaatacaagaggcagctggcataaaacatttctttcactttcctttcccactcagattgcttcaagagaccaacagaacacagggatcaaaaacaaggaaaatttagcaacttcattaccttctaataagtaattcctgttagccactgcatcccaccaaaactagtttatttttcccctcaaattcatgatttttacgtctgttacaaagggaattttgctgatagctctttgggtcccactgttccattttatgctaatagattccattctagggcccagccgtctcttgactgatggtgttccctttaacccttggcatgtataatagaattttggtgaatgaaagaacccaaataggccagatagtccccccaggccctgatatccataaaaggcttgggaatgcattatgtaattgtccttagtctttttgttgttttagaaaaaaaaaacaagatgggctcagatggatgcctacgtaaaaatggttcctagctgtgtactcataacttttctttgaattgagtagtgaaaggaaggaggaggaaaggaaattaaatgtccttctagtattctctggactcaagtctgacatatgagataataacctatattgaaatgccaagaattgtatctgaaacaagagaacagtttgacacatttatcatgccttcatattacatattaactgaaaccaattaataaacatatgaaatatccattgcacaaggcaaaggcacctaaaccttttgtttctttttctacatagcagaaattgattttttttttatttttttaggggaacctatataattatgacccagtgatgtcttttggtgacttaagcttatgaattcaggttacaattgagttgattctagatggttactaccttgaaaaggatgttggtgccttatgtgacacgagccagagcctgctgggaataaacaaagcagattcatgccaacaccaactcgtagctttagtggcagatgggagtggtcacagactcccaaaatgtggggctttggatttccacaccatcccacgtgtgtgtcatcttcctctttcacactcttgatgataatttgaaaatggtgaaatcacctctgaatttgcctatagcatgagcacattcttatgacaacataacaaatagttcataatgtgaatattagaaactgttacagcctgcagttaccataattttccatgtttgtggaattgatattgaaatagcagggctaaggaattactggcaagttttagcctgtgggtaataccttagggttatttaaatatttgtaattttatttaaatgttcatgaatgtttgaaaggaacaaaattatcagggatggctctttgccatgggtcttattttcaccctcttttctgtaagaaaaaagaacaatgtcttaatgtatttttaaagtttttggtatagtttctaattccaattttaataaaagttttatagatatattgtggtctttcttaatgaacataatattttcttgtttggatttcttgttttcaggtaatcagcaatttactcctcagtttcatctttctaatgagatggttttgcatgccactgatttccctttttttcttagccaccccttcctgtcccgagtctgtactggtctactttcatccttggactggatgatttcccaggatgcaaaatctctaaggggtattcttgcaggagcagcaggttgtactaccatgctgtctcatagaaaagcaaaatacaggttattcttggcccaaggaactactctgattatattttagttctttttttttttttatggcataaagtatctcttttgtttgtccattgggatggggagaagacctatggctccagctatgggatccctaccaagagctctgtatagggtggaagagagagtagggctgtagtgagccttatgtgtattgaataaaaacttaaattatgtctaggcccagcttctaccataggagtctggtacctttcattttatgtattggctaccttctttgctctgggaatcctttgtaatattcatattaactctgtacctatgttttttcatctcattaattaattattattattattatttgagacagtctcttcctgttgcccaggctggagtgcagtggcatgatctcggctcactgcaatctctgcttcccgggttcaagtgattctcctgcctcagcctcccgagtagctggattacaggcacctgccaccacaccctgataatttttgtagttttagtagagatggggtttcaccacgttggccaggctggtcttgaactcctgatctcaaatgatctgcccgccttggcctcccaaagtgctgggattacaggcatgagccactgcaccctgcctatttattatcattattatttgttttgttttgttttttgagatggagtttcactctgtcacccaggctggagtgcagaggcgggatcttggctcactgtaacctccgcctcctggg

SEQ ID NO: 12274 - DNA, 1047 bp, Homo sapiens
agaaaataagtaagtattttatcatttattggaaaataaagtgagtttgttcacattagtgaataatattgactataattttttactttctataggcatttttatatttttattctagtcattttatataaaataaaaaggtctagtaaaatgtcatgtgttcctgttaccacaaggtggtgcaaattatatcactttttttttgagatggagtctcgctctgtcgcctatgaattgtcactcatagtctaatgtatcaggagttcattataactaaagatgtccatggaatttttaggagtgatgactcttaatgttcaggctgtctgctgtattcttggcccactgaagggagctagaagtaaggatggatatagattactgattaatgattcataatgttattttggtgagcacagaaaggtgtgtaagggagcagaaaagcctgttccccctcgtctcctgacagaagaagaatatcggatacaaggagaggtagaaacccgaaaggctttagaggagctccgagaattttgtaacagtccagactgctctgcttggaagactgtttctcgaatccagtctccaaaaaggtaaactcggccagatataccaagcatctatcagggtaattgtgaccttgagttctaccagagatcatacttctagagaatcgtgcacttgtgacctttgttttcctgttaatcttcaagtagtcaagagaagggtggatatataatcacacattaagcagtaacctgtttcctcagggaactatctactctagctttgattgtagcattaagatgggaagactccagtaccatattaagtttcccttctgaaagttttgcattgctgtctgagttggtagggttcccccctacccactttttagttgggggcaaatgtaccaatgagtatgtgaagcttcaatttggaatcatgatggcataaagtttacagggccataaacgtgaataactgtaatgccccttaatcttctcttatcaggattacagatgactaaaggaaccttggcacttt

SEQ ID NO: 12275 - DNA, 1033 bp, Homo sapiens
attttaaatatacttggggaccttaagtaaaagactccgcagttaatttttttctccttcatttctgaatgaactgctgtagattttatttacaaagtaaaaatccttggtcatatagatagtaacctttgagttatcctttgaagggtgattaatctggatttctgtatattggttttttaaaatagtctatttcagggttgttcaacatgtacctttaatgttctgtttgaaccaaataaatttgggacagcagaaaggatagaaacttagagaaatatattctaagaaaaaagtgtgaaaaattaagtaaaaatctgatttcctagttcaattggtgctatatagtaaattaactactgcttcccacacaaattatttttaccaagtatagatgaaaaagaatgtcttctgataactcttctcataggttatgtcctcacagttggattcatgagttttgcagtatgttacaagtatgggcccttggagaatgaacgaagtatcaacctgctgacctggaccttgcagctgatgggcctgtgtttcatgtattctggcatccagataccacatattgcccttgccattatcatcattgctctttgtactaagaacctggaacaccctattcagtggctgtacatcacctgcaggtgactgaaaggcaatgtaacttaatattgacaggtacattgtgggatgcagttgcagcaagaggatacagaggtgttgacctgggagcttctttgttaatgaaaagtcattgtattgtacttccacttttgttccttcccgagtctatttttttttttttactttctataggaatttttatatttttattctagtcattttatataaaatgtctagtaaaatgtcatgtgttcctgttaccacaaggtggtgcaaattctatcactgtttttttgagatggagtctcgctctgtcgcccaggctggagtgcagtggcgtgatctcggctcactgcaacctccacctcccgggttcaaacgattcttctgcctcagc

SEQ ID NO: 12276 - DNA, 1031 bp, Homo sapiens
ggtgagactgacatgtacaaatatgaagaaaatatataggtaactaaataaacattgaatgaaggtaaaatcaacattaagtttgtatacaagtaaaaagtatttgtggagtagtgaatgcaagattaacaattggagtttgaagttgggctggagtggggttgctggaagttgttattttggtgatgctgagagaaacagggaggaataactggtagaaaaaatctggaatggggggctggttgtggtggctcacccctgtaatcctagcactttgggaggctgaagggggaggataacttgagcccaagagtttgagaccagcctaggtaacatagtgagaccctgcctctacaaaaaaatacaaaaattagccaggcatggttgtgcatgccagtagtcccagctacttgggagtctgaggtaggaggatcacttgagcccaggaggttgaggctgcagtgatccgtgattgcaccactgcactccagcctgggtgacaaaataataatattcaggtcgggagagatgatggggatgtgaataggacattacgtaaaggctgattattgggaaatacatgagggaagacctttaatcctaatcttcataatctggcagtaactacatagcatcagtctctacagttctctgacctcaagttttgggcaaatatagtcacacatcactttattgtacttcacttttttgtggttcacagatagtgcatttctttccaaattgaaggttcgtggcaaccctgggtcaagcaaatctatcacaccgttttcccaacagcatgtgctcacttggggtctgtgtgtcacattttagtaattataatatttcaaactttttcatatgattataactgttatggtgatccataatcagtgatctttgatgctgctgttgcaattattttggggcaccacatgtccatgtaagacagtatattagttcattttcttttttttttttttgagacagagtctcgctctgtcgcccaggctggagtgtagtgacgcgat

SEQ ID NO: 12277 - DNA, 1023 bp, Homo sapiens
aagagtattcatggaaccataaataaagatgaagaccactgcagtttaaaacttattcagtggaactgggagaagttttctcttttctgaagatgactgagaaagtttcaggggagatggatcctgttgaattctctctgactttgtttccccttggttactacacagggtcctgggatgttgtaagtagtagaaatgtttctaggtttagtatgaaataggttgtgcccttccatttgtcctagggttctttggttacgtagggttggcttgttttttgacgttccttctacagttactgattccttctgctcctgttctgtttgtgggcctcccgtagaactcttgaatgtgaaagctgtgggagtatctggtatgccactaaggggcctttgctagggccccctggtcctgagtgagaggtatttgcgtgtaggcttttccagcacagtgttctgtagcaaagggaagtaggtggtattgttgggcaagaaaagcagccagttagagaacaacacaaggccctgacccacagttctgggcaaatctgctgagttccatgactgtgagtgacttaaagcttgaaagccagagtgatagagaccccttgtgggtgattgcatgaattgctgatggtactgtgtctagctttgtccaaaacgaagcttgagtttcttttaaccttagcataggtagcctaagtaaaagtaagatcttcaggcaaatacaggttagacagagacctaattatacattggaagggtgcccaggctttaggtgaaatttaaatgctttttaggtgggctgtttgcatttatttttactgtagctgaccaatagtgccaacgttgtcttttattctataataccttaagcagttttgttcccttattaagcaaaaatctttatttatttcaggatttgatcccaaactctttcttgttttccttcttggacttatgctatttttttgtggagacttgctgagcaggtaggttccaaggctagtgtgcagaatgaaac

SEQ ID NO: 12278 - DNA, 1106 bp, Homo sapiens
cctgccaagcagcagatggggagggtgccctcctatccccacctactcctgggtcaggaggaaaagactaacaggagaatgcacagtgggtggagccaatccactccttcctttctatcattcccctgcccacctccttccagcactgactggaagggaagttcaggctctgagacacaccccaacatgcctgcacctgcagcgcgcacacgcacgcacacacacatacagagctctctgagggtgatggggctgagcaggaggggggctgggtaagagcacaggttagggcatggaaggcttctccgcccattctgacccagggcctaggacggataggcaggaacatacagacacatttacactagaggccagggatagaggatattgggtctcagccctaggggaatgggaagcagctcaagggaccctgggtgggagcataggaggggtctggacatgtggttactagtacaggttttgccctgattaaaaaatctcccaaagccccaaattcctgttagccaggtggaggcttctgatacgtgtatgagactatgcaaaagtacaagggctgagattcttcgtgtatagctgtgtgaacgtgtatgtacctaggatatgttaaatgtatagctggcaccttagttgcatgaccacatagaacatgtgtctatctgcttttgcctacgtgacaacacaaatttgggagggtgagacactgcacagaagacagcagcaagtgtgctggcctctctgacatatgctaacccccaaatactctgaatttggagtctgactgtgcccaagtgggtccaagtggctgtgacatctacgtatggctccacacctccaatgctgcctgggagccagggtgagagtctgggtccaggcctggccatgtggccctccagtgtatgagagggccctgcctgctgcatcttttctgttgccccatccaccgccagcttcccttcactcccctatcccattctccctctcaaggcaggggtcatagatcctaagccataaaataaattttattccaaaataacaaaataaataatctactgtacacaatctgaaaagaaagacgctctaactgc

SEQ ID NO: 12279 - DNA, 1050 bp, Homo sapiens
ttcgtgccgcagtaacagacacagtatttaattgcacatacagatgtttgctgggtatattcactgtaaattttatttaatctgtttttttgtttgtttgggggttatttggggggaggttggttttgtttttaaatataaaaaaaaaaatctgtcactggacatcagtcactgtttctctgttgccgccctggtatgggtaaagggttggaggccctgggtaggtatagccctacagctgttggaggtgtttgtcgtgggttgggatggctttctctagcatacgcacactattttaacaccattccctctgtctcatcctcttccctgtacacggttctgatagatggctagatctctaatgggaccatggctttgggctctcccggttctgccactgtggttcatcgagcatatcacttctcaactctggatctgtgtccagatcagtaaaataagagacttggacttagtaggtgacctctaggtttccttccagactattaattctgtggtactgtgtactcatttagggcccttgtagttgagttttgagatagggtcttgctctgtcacccaggctggagtgcagtggcagatctcagctgactgcagccgcctcccgtgttcaagcgattcttgtgcctcagtctcccgagtagctgggattacaggcgcgatctagcatgcctggctaatcttttttttttttttttttgctatttttggcagagacagggttttaccatgttgcccaggctggtcttgaactcctgggctcaagtgatctcccgccttggcctcctaaagtgctgggattacaggcatgagccaccactcccagcccagctcgtcttctgaaaaccctttagggatggagaacttgggcctttcttttttttttttttttgagatggagtctcgccctgttgcccaggctggagtgcagtggcgcgatatctcggctcactgcaacctccacctcccgagttcaagcagttctcctgcctcagcctcctgagtagctgtgccccatcgtgcccagctaat

SEQ ID NO: 12280 - DNA, 1055 bp, Homo sapiens
ccaattgcagagattgaaagagtaacaacaggcagaggaccagtgtagatgatccaattctgggagttaactcttcctttaacatccctgtataggccttggacacttgcccctctctagtgctgtccatgcttaactttctttagccttctttacatacttagtacttacaaccaagtaggtaaaaagagctggagaaaataagttcactgaactttctaatgaccaaagagtttaacctaatatcagtaccaagtctgagggctgggaatgtgggattttgtaagaaacggtatggtcttagaaaaggaaccactagatttggtttcagaagttccagtctcaccactaactagctttgtgatgttcaacaagttacttaaactcagaagtagacctcacttcctagtctgtaaaatggggttaatcacacataagatgggaattttatctgctttctgccttagctgtcacaagcagtataaaaatgagaatgtagtttaaaaactttaaagtgctctgaaatgtaatatttatcaataataggtaacacttaatggtacttaatatgtaccaggcattgctataaatgctttacatgtcttatatttgtttaacctttccagcaacattaatgagggaaaaaaatacccaacgttagatcatatttccagtaacagagccactattttaacccaggcagtctggctccacgactatgctcttgtctactgtgcttatactgcctctcacatgagtcagaaacttgaaccctgggtttaggggttgggagaatctatataagagataaaagacagccgggcgcagtggctaacgcttgtaatcccagcactttgggagcccggggcaggcggatcacctgaggtcaggagttcaagactgcctggccaacgtggtgaaaccccatctctactaaaaatacaaaaaaaaattagccaggcgtggtggcacatgcttgtaatcccagctactcgggaggctgaagcaggagaatcgcttcccaggaggcagaggttgcagtgagccgagatcat

SEQ ID NO: 12281 - DNA, 1027 bp, Homo sapiens
cttagcatgttccctgcttctcattgagctttgccagtgaggttaatataatcctgtaatgatgcttttctttgatgttaaccaacagactctccaaagaagccttttcttctagctctcacaagagaaggcagatttttaggtacctctgtgtgatctatatctctcctttttatttttaattttattttgttttgctgtaatcttttcagcagagtgggtttgctccatgcatggctgcttgtggaataattaaatttgtggtttttgcaacattggatatttttccccatttaaaaaaatggctcctggtcaatgactttatttttattgttgctgatttcatttcgagtcctaaacaggtggtgaaggggaccaaataggtgtgtctgggataggtacagcttcctcccagaaattagctggaattgggcatttttgaaagattcaaacatatttatgataaggtaaaagaatgggtgtcttctggctaaccttttctgaatctatggaaaagatgtgtagacattattcctgacccagcataggaatattttttcttaaagatatctttaagaaaaaataatacatatatatatatagagagagagagagagagacatatacggacacctttatgtatgtagttttctcttgaggcaatgtaatgtgtaagatgacctcagaaaggacctggccaggcgcggtgactcacgcctgtaatcccagcacattgggaggccgaggtgggtggatcacgaggtcaggagttcaagaccagcctggccaagatggtgaaaccttgtctctactaaaaatacaaaaattagccaggcgtggtggtgggtgcctctcgggaggctgaggcagagaattgcttgaacccaggaggcggaggttgcagtgagctgagatcacgccactgcactccatccggcctgagcaacagagcaagactctgtctcaaaaaaaaaaaaaaaaaagacctaagggacctctctgccttagaatggacttaaagtgtgtc

SEQ ID NO: 12282 - DNA, 1035 bp, Homo sapiens
gggctctttagattaagaagtaccagtgacatcgtaacctagctgactatctgtgatgtgttcctctgcttcacttacacctggaaaatgactgccccactatgatagccattagcaaagctacagatgttctgaaagcacagacaatttataatagggtattagagctaattatgtacaacagtggactgtatctacctacaaccataacaaaggcaaagttagctcttctctttttttttctcctgatttctagtcttcaagcctctactaatgtatgtattctttgttagatccttgtagatttatcactttgatttcagcacttctaactcttgttgtggtagaggcatcaggaatctcagaaagtctagacaaggaactatggccaaagcccatcatactccaaagattccatgtggagaggagcctggctaaagggagctgattaggggtggagttgtggggttgggtgtgggagcaggaggcaggccaaaaagaaaggaagtggcaagaagggtgtttggatggaaatgctgctgctgcagccttctctggagcctgagctgtatattggaaaagctgcccagcataggctctgctctgcatggagctcactctgctcagcagctggacactcttggtaccttttcctaaagcttgggaatccaccacaatgctcacttcactcagctcagtggctttgtcaggaaatgatccccaaagggaatgtttcaggcttttaattttctcattttttctaggccctgaaaagtaactgcttccccaatatcccaccctccttgggtctcaggtcagaatgtctttcattttggccaatgtaggagacagaaatggaaaagccattgaggatgatttccaaaaacaaagtttctttctcttgtctcccttttcccttcctttgaacacactctttaggaccaaggacatcagttattattcccaagttaccaataaattcagagctaaaaaggaaataataattaggttaatactttcctcttcctccttttc

SEQ ID NO: 12283 - DNA, 1049 bp, Homo sapiens
caccaattacaggccaggagaggaaagatcatgatgaggatttagatggtaggctactcagaggtggtgatctccccagccatcccgtctggttacctcactacattttctagagaatgtaaggttcttctctatcctctattttcttattttccttgtctatctctctgtctctccccttcctccactgtaccttacttctcttcctttctctgcccctctttctatctgttctccttttctttctctttgtattgctctgttctctttcttctttatttctgtaatttgtctctccccttccccacctccagttaatatagttaagttcaggaaaaaaatgcttaggctttgagtttagcttcgcccttgggatttcatttccaaggccctctttgctgagctgtgtgtgatttgggtcttcaggccatggcattagtgactaaataaggaataatgccaggtgctagttctataaacctcctcctctactgttcagctctgctaaacacctgtttcttctcccgttccagcttccctctgtcctttgctttccctctaaagcagtgttgttccttttcccagggctattttctcgatccttactgactggaggctacctgattactagagggaagcaacccagtccttataaatagttgttattcttgatactgcgggggtgggaggggtggggatttggagagtccccagccatccagaaaacctgatctcccaaactgcatggtcagatgtacccagtgaaacttctccaggactggaaattttattcttttttttttccatttttttgatggcaactataaactttcccggtttctcttccttgctggtgtgcagtgagcttgcagtacgaggagaacttaactagcttaattctgctcatcgatctagatcagagttccattgcaggatggaaggaggagcaagtcaatagaagagagagaggaggaatatcaaagggtccgagagagaatatttgcccgagaggtaagtgtagcatctgagagttgtcagcccatagcttt

SEQ ID NO: 12284 - DNA, 1030 bp, Homo sapiens
ccttctgcattggctgaaaggactggaaatgaccttaattaaaggttattttggaaagcaaaagagagcctcagcctaagaaatacagttttatgcttagtttatcttccagtggatcttaactctgtattagtaacagtctgacccctcattactcgcctctgcctactttcagggcagtttcttttatcctagaagaaaatggtaaggagacttaaagccatgtgatttgaaagcttgacttaaagaagctgggaatgtttagagaaggaaataaggtaaagttttcttttacaaagagctgatagggaagcaagattaagcttgttctttatgactcgcacagaaggctaaacaggggccggtgggaggaactaccaaagaggtaaattttgcctctttaaaaggaaagtgttccaaaaagaaatggtttctttctggaggtgaagactttcccttcactaagaggtatacaagcagggacatttttcacagttactaatgagttaagaacctaattatggaagactacggttgtagaaaaatggagctaaggctgggcgtagtggctcacgcctgtaatcctagcactttgggaggctgaggcgggcagattacttgaggtcaggagttcgagaccagcctggccaacatggtgaaaccccttctctactaaaagtacaaaaattagccggaaattgcttgaacccgagaggcggaggttgccgagatcatgccgcttgcactccagcctgggcaatagagcgaaactccatctcaaaaaaaagaaaaagaaaaatggagaatgagaaagcttctaaatacccttacagttatgagattccatgattcccttgtgtctttggtagactttcctttctggtttttgactatttctccccttagttagaggcagtattgtataaagtttaagaaagcaagtaacaaagccagattttctggatttgagtcctggctctgccatatgccagttgtgtgcccttttaagcaaagtgtttaacttctctgt

SEQ ID NO: 12285 - DNA, 1032 bp, Homo sapiens
atctcaacagtgggcttaaaatactgagtaaattatgctgtaaacagatgcgctgtcatccaggtttctttgttctatttttagagcacaggcagagttgatttggcataattcttaaggccataggattttcagaatggtaaattaatattggcttcaacttaaagtcaccagctgcattagaccctaacaagagaatcagcctgtcctttgaagcactggagccaggttttgacttctcctctctagctatgaaagatgacatctccttccaataaaaggctcttttgtctacactgaaattattgtttaatgtagccacctttatcaattttcttaactagatcttctatataatttgctacagcttctacaacagcacttgctgcttcaccttgcacctttaggttatgaagacaatttctttccttaaactcatgaaccaacctctgctagcagcaaacttttcttctgcagcttcctcacctttctcagccttcatagaattgaagagaattagggacttggctgtttcactttcttaccatttgtgtgttccctgtagtagcacgtttaatttcaagaacttttcctttgcattcaccagatgggtaactgcttggcacaagaggcctagcttttgacctgtcttggctttcaacatgccttcctcacgaagcataatttccagcttttgatttaaagtgagagatgtgtgactcttcctttcacttgaatgcttacttagaggccactgtagagttattaattggcctaatttcaatattgttacatctcagtgaatagggagaccaaggagagggagagagatcggggaacagttgggtggtagaagagtcagaacatttacatttattgattaagttcactgtcttacatgggcacagttcctggtgcccccaaacagttacaacagcgacatcaaagatcactgatgccagatcacaataacacatataataataaggaaaaagtttgaaatactacaagaattaccaaaatgtgacacag

SEQ ID NO: 12286 - DNA, 1041 bp, Homo sapiens
gaagctgagccaggtggatcacctgaggtcaggagttcaagaccagcctgaccaacatggagaaaccctgtctctactaaaaatacaaaactagccaggcatgtcagtgcatgcctgtaatcccagctactcgggaggctgaaacaggagaatcacttaaacccgggaggcggaggttgcggtgagccgagatcgcacctccagcctgggcaataagagcaaaactccatctcataaaaacaacaacaacaacaaaaatctgagaaggaaattatgaaaacaattccatttacaatagcatcaaaaacaataaaatacttaggaattaaccaaggacgtgagagacttatacaataaaaactataaaacattgctgagagaaaagaaattaaagaaaatataaatggaaacacatcccatgttcatggattggaagacttaatattgttgttctttttttttctttttctttttttttgagacggagtctttttctgtcggcccactacaacttctgcctcctggttcaagcgattctcctgcttcagcctccctagtagaggctatttatatgatgtcaatttgacgtgggaatatgttactcataagagaaaaacagtaccagtaagcagcaaggaaaagagacgtctcaattatttttctctcccttcttactataaaatgattagggggaactagtattcacttagcaactactgtgcaggcaccttgcaattgttatcttgtgatttttagtggctctgtgagatatgtatcatgcctatcctacagataaggaggctgaggctcagtgacataattagtaagttgtagaaacagtagtcacacagccaaattcttgtggatctacgaagtccacaatcttatctactgttcttatgtactataacatgattgttgtctcctacattgtagagattaatattctttattttgataggttttacccctcattcaccataatgacgctcgtctttctccttgcagcagagatagtgttaggtacaagggtggtatacc

SEQ ID NO: 12287 - DNA, 1091 bp, Homo sapiens
accctatatgtcctgctgttaattttacctaattacgttttctaaataaggaaagataaagaactcatgagcaggtttctggaaccaggatccatgaataattttggttgagttttggatttggaatttttctgccttatttgcacagacagtttgtacactgtttctcagacctaaaaaataggtagttatgtaaaattccttgacattgtagtttagaacaaaattctaattttgatgtatgtagctaaagcgaagctttaggaagaaattgttatatatactcttaggtgtgagcataacagcccaacccattttttttttttttggattgagtatctgggcttccagtcgcttttcatgcaattccattttaataccgctgatttctagagggctgcagaggtcagtttgaaaaactcagtaaactagagcctaggaaaattaagggtttacctatctgtcaatgtgtgtttaggtaacatatgtggaaaagtacctttaaaaatatgctggtttattttctgtctttattttctcttctgttctgtgctttcatttactctgaattctttgtgtgaagtgaaaagagtaataatgtctgcttctcagcttacattaggtattcttatttttctatgatagttcaattatattaatatttattacagccataaatgtttcagaccaacacaatctatttttggggggtggggtgtggtaggaggagaaaaaggaagataatcctagggcaaatggagagaattctagaagaataacctatttagatgtttgccagagacaggagctataagggttaagggaaattccaccacatccttgcatcttgatattgcagcaaatttgtggataatttcttgctagcttttcaggaaacccctgtggtggacaaccctcattaatcgttgctgggagactgctctgacgtcactgggagcagttccctgtctgcaactaggacaggaatagcctttgagggggaagaaaactgctgtgaaattaaaagatgacggttttgtttacttggttttcctttcatttgagggtagataagatagacctaaagtctt

SEQ ID NO: 12288 - DNA, 1237 bp, Homo sapiens
tcctgaatattagacattttggtattgttcctcaggtccttgatgatctggtttttttttcccccaataaggaaatttttttaggccagttgcagtggctcatgcctgtaatcccagcattttgggagcccgaggcaggcagatcacccgaggtcgggagtttgataccagcctgaccaacatggagaaacccagtatctactaaaaatacaaaattagccggacatggtggtgcatgcctgtaatcccagctactctggaggctgaggcaggagaatcgcttgaaccaggaaggtggaaaggtggaggttgcggtgagctgagattgcaccattgcactccaacctgggcaacaagagcaaaactccatctcaaaaaaaaaacaaaaaacaaaaaaacaggagaagtttttttcctttagtgttgaaattcagtgttcacatttgatacctctgttgatctgacttcaaattcattgactctttcccctgtcatttctgttctgctgttgaactcatcaagtgagtttttatgttctggttgttatattttccagttctaaaattttcatttgattcttctttatatcctctgtttctttgctgagacattctgtcttttcattagtttcaagaatgtttgtcctaccttgttggaatatttttgtcatgtgaggttgttaatttcaacatttgcatcatcttcttgttttgactgttcatctcttttcttatacaaattcaaattatcttgattcttcatatgctgggaaattttagattgtatcctggaaaatttgaatattatgtcatgaatgtcagggtcttctttaaatcctgtggtgaatattgactttaattttagcagacattcaacctggttgtgttcaacttcaagttccgtgcagcttttcgtgagtgatgattccaaagtctgttcagtttttgaaggctttgcattgctatttagatctgccttgcatgtatatcacctacccactcatctgagatttggctgatggctattcttatagttcagaatgaccttaacgttaggagatacgtactgaattgttttaggtgtgaagagtcatcatgaaagcatgtcaaatagacctgaaaaaaatttatatgcacatatatgcatgcacatatgtgtatacgtaagtttgtatatgtatctaggtgattgttgtgctggttttgcaaattctttttatgttagaaatttctcaagt

SEQ ID NO: 12289 - DNA, 1569 bp, Homo sapiens
ttctttactggtattcatagaatgtttactaaaatagaccatatcttgggccataaaataagtttcaataaatttagaatttttttttttttttttgagatggagtctcattctgtcacccaggctggagtgcaatggtgccatcttggctcactgcactctccaccttctgggttcaactgattctcctgcctaagcctctgaagtagttggtacaggtgcacagtaccatgcccagctaatttttttatttttttgtatttttggtggacacagggttttgccatattggccagcctggtgtcaaactcctggcctcaagtgatccacccaacttgacctcccgaagtactaggattacaggcgtacacttctccacttggcctctattactaatttctaactaaatccctttatgacaaaacatactttgtgtatttaaatcctaaatttggctgggcgcggtggctcacgcctgtaaccccagcactttgggaggcctaggcgggcggatcacttgagattgggagttaaagaccagcgtggccagcatggcaaaaccccatatctactaaaaatagaaaaaaaaaaaaattagctgggcgtagcgtcacgcgcctgtagtcccagctacttgggaagctgaggcaggagaattgcttgaatctgggaggcaggggttgaaatgatccgagatcgtgccactacactccagcctgggtgacagagagaaactctgtctaaaaaaaaaaaaagaaaaaaagaaatgagtaacataacaatatctggaaaatccccaaatatttggaaacctaaccactctgaaactctgtcaacaaagaattaataagggaaattagaaaatgttaacagaatgaaaatgggaacatgatatggaaaaatttgtgggatgcaattaatgaagtgcttaatggaagtttatagcattaaatagttaggaagcagaaaaatctaaaatcattgaccttaagaaattagaaaagaagagcaaactaaaagtaagcaaaggagaggaaattgtaaagaccagagcaaaaattaatgaactaaaaagccaaaaaaaaaaaaaaaaaatcagcaaaactacaagctagttctttaagattgacaaaattgaacttttagccagacttactaagaaaggaaaagagaagacacacacaccttaccagtattaggtatgtatgagagagacaacatcactgatgattttccaggcattgaatatcatgaaccattcctttttttttttttcttgagatggaatcttgctctgtcgcccaggctggagtgcaatggcgcgatcttggctcacttcaaccactgcctcctaggttcaagcgattctcctgcctcagccttccaagtagctgggactacaggcatgtgccaccacgcccagctaagttttgtatttttagtaaagatggggttttgctatgttggccaggctggtctcaaattcctgacctcaggtgattcacccacctgcctcggcctcccaaagtgctgggattacaggggagagccaccgtgcctggcctatca

SEQ ID NO: 12290 - DNA, 1028 bp, Homo sapiens
tatttatcattgttgggagctgaatggagcactatgttttttcaccactgctcattaggacccacgtgtctgtcttcaacttggatgacatacctggttcatgttaaatcccactggtccatcctgggaaggctttgagataatataagaacaggccacagttggctgggtgcagtggctcacacctgtaatcccagcactttgagagtccaaggtgggtggatcacctgaggtcaggagttcaagaccagcctgaccaatgtggagaaacctcatctctactaaaaataaaaaattagcccggtgtgttggtgcatgcctgcaatcccacctacttgggaggctgaggcaggagaatcgcttgaacccgggaggcggaggttatagtgagccgagaccgcaccattgcactccagcctgggcaacaagagcgaaactccgtctcaaaattaaacaacaacaacaaaaaaggacaatctatgatatgttgtaaaatcattcggacttttggattactgttattttgtttcagcagcagtgggacagagagaagctatgccatatccttcccttagactatgctcaaagatattatgttatactggcttttctgatgatatttactttttgtttttatagttgttgcattgatgttactcatttaggaaaggtgaaagagaaatccctatgagaagcacaatgttaaatcaagattcattttagttataaatatgacctggatatttggagatatcttgaaattctctgttttgggggtttgggttgtgggggattggcttgttttgtttgggagtatttcttctcattgcctgtcttcttatcttactacagactataggcttggaagaagaatgacaaaacctaagcacaaggcagttatcttgaatgatatttcttaccttttctgttttgcaggacatcagaactgatgtttcttttttgttttcgttctatttttttctgcatcctgtctttcatgaaaatatttttctctcccttgatatcac

SEQ ID NO: 12291 - DNA, 1023 bp, Homo sapiens
gggacccaagtgggttgccccttttttaaaatttttttttattttttattttttttactgagtctcattcttttgcccaggctagagtgcagtggtgtcatctcggctcattgcaaccgccgcctcctgagttcaagtgattcttctgtctcagcctcccaagtagctgggattacaggcacttgccaccacacctggctaatttttgtattttttagtagagatgggacttcgtcatgttggccaggctggtgtcaaactcctgacctcaggtgatccgcctgcctcagcctcccaaagtgttgggagtataggtgtgagccactgcccccgtccccatatttctaaatatttagtagttataaatcaagatttttaaaaaaggaacttaataattttatttcactacagccttgaacttctggcttcaagtgaacctcctgcctcatcttcctgagtagctgggaccacaggcatgtgccacctcacccagtaaatcaaaattaaaaaactgttagaactttgaggggaaattattttttgagacagaataggatggttcagggatatcctacaagcctagtctccatctgtacccttcccgttgtttgtcccttgcccaccattcaggcaatggaacgtgtataacagaaggttattgtccatggaaggacaaagtttgagatgagaagaaatccactgaaggccctgattggggtttggggctgcttaggcaggaaaacctgggatctggagcatagctgagagtagtcgagtaaggctcttcaggtaggtatgtcctctggtcccatggacatcttgccctgagggcatgggcaagtcagaggagggtcatagtggttctatcttcaatgaaggacccagaataggtccaagaccaagagtgccagaactcaaaactgggcccctttgaccatgctgtctgttgttaatagtaagaaagcctgggtttacagaatgagatgatggcttactctggttgatggagaggggttagaaagc

SEQ ID NO: 12292 - DNA, 1011 bp, Homo sapiens
cacaaaaaattagccagtcgtggtggcatatgcctgtagtctcagctactagggaggctgaggtgggaggatcacttgagcctggggttaaggctgcagtgaatcttgagtgcaccactgcacaccagcctggacaacagagcaagaccctgtttcaaaaaaaagaaaaataataccaccagacagaccaagatggaatccatgaaagcaaatccttaaaatgagacccacaaacagctctcttgattatagtttatctgaaattggctctacttttttgccctttcatgtcccctttttgcccatgataggaaacagagtgatgacatagcatgtaataatagtttcattttgttacagatttgctgtgggccagacaccctgcaaaattactttgaaaattatataatcacagtatcctatgaaaggtgttttttgtttgtttgttttttgttgagacagtgtcttgctctgttacccaggctggagtgcagtggcatgatctcagctcactttaacctccgcctcctgggttcaagagattctcttgcttcagcctcccttcagcctcccgcgtagctgggattacaggcatgcaccaccacacctggctaatttttgtatttttagtagagatggggttttaccacgttggtcaggctggtctcaaactcctgacctcaagcaatccgcccacctcggcctcccaaacttctgagattacaggtgtgagccactgcccctggccgaaaggtttcaacttgcttattttacattgagataaagagaggcttagagaggtgattacttatctaggatcacaaagcctggtatgtgatagggctaggtaggcatggtcctaatgttatcaagcaaaaggggcttgctgcccaatgcactacaagccaatactatgacactgagtttttgagaaaagaaaagcttatattgccagttgactcacaggagtcaagctcaaatctgtctcctggtgcagtaattttattagaa

SEQ ID NO: 12293 - DNA, 1072 bp, Homo sapiens
tgtcctgaagttagaggaagcactaagtgaagtagccatatatatataatttattttctggtcaggccaagctggcttacatattatattgtatatattacatatataggcttatattttgatgttggaatattagataaccacttcatatttgctttttgtggccaatagcttatttaacaaatacttaatcattgtgtcagagctatctgagagtaagggatatagcagtgaagaaacagaaaaaaatcccttcccttattgagcttatcgtttttttcattttctattttttttttgagacggattttcgctcttgttgcccaggctggagtgcaatggtgcaatctcagctcaccacaacctcctcctcccaggttcaagctgttctcctgcctcagcctcccgagtagctgggattacaggcatgcgtcaccacgccaggcttattttgtatttttagtagagacagggtttctccatgttggtcagactggtctcaaacttctgaactcaggtgatctgcctgcctcggcctcccaaagtgctgggattacaggcatgagctaccgcatctggcctcattttccaattttttattgtgttaaaatccacataacagaatttgccatcttaaccataacataaaatttaccattttaacagaattaaccctcttaacagttcagtggtattaaatacatttatgatgtcatgcagccatcaccaccaatccttctccataattattttcattttgtaaaactgagaaattttgtactcataaaacaataattccccattctcctctccccctttcccccagccctggcaagtaccattctactttccgtcttctatgattttgaatattctaactacctcatataagtggaattatacagaatttgtcgttttgtgactggctttagcgtgtcgtcaaggttatccatgttgcagcatatgtcagaatttcctttttaaggctgaatattattctgttgcatgtatataccacatttggaacaaatccattcatttgttgataaacacttgcttctaccatgtagct

SEQ ID NO: 12294 - DNA, 1020 bp, Homo sapiens
aaaaaaaaaaattagccaggcatggtggtgcatgtgtatagtttcagctactcaggaggctgataggaggattgcttgagtctgagaggttgaggctgcagtgagtcatgattataccactacactccagcctgggcctcagagcgagaccctgtgtgtttatgtctctgtctctctctctctctatctctatcccctctctctatatgtatgtatatataaaattgcaattctcagcctgcccacctaattctcactttcctgtgaataacatcaataaacatgtcacattttagttgtgatttatgaagtcgataccattttccttctctcagtaagttatattgtttaattctagaatcctattttcttttctttattagagatacatctgaattttatctttttgatgggattcatttgcccattctttttttttttttttttttgagatggagtcttgttctgtcgcccaggctggagtgcagtggtacgatctcggctcactgcaacttccgcctcctggattcaagagattctcctgcctcaacctcccgagtagctgggattacactacagatgcccagctaatttctgtattttttgtagaaacagggtttcgccatgttggccaggctggtcttaaactcctgaccttgtgatccacccactttggcctcccaaagtgctggcattacaggcgtgagccaccgtgcccggcctcatttgcccattcattcttatttttatgttaatttttttgagacggagtttcgcttttgttgcccaagttggagtgcaatggcgtgatatcagctcactgcaacctctgcctcccgggttcaagtgattctcctgtctccgcctcccaagtagcagggattacaggtgtgcaccaccacgctcgactattgttttgcatttttagtagaaacggggtttcaccatgttagccaggctggtctcgaatgcctgacctcaggtgatccttccgtctctgcctccgaaagtgctgggatt

SEQ ID NO: 12295 - DNA, 1027 bp, Homo sapiens
ttcttgttactctgttagccagaagtggaatcccctcccccaacctgtaaagttttcattagcattattacacctattgttactgactactatccaataattcctttgtttctcgaattcttgaaaagggaacggcagccaaatagagctcagacaaaaaagatacttctgatgttgttcagtgtctcttgaagcccacataattccagaaaattgcaaatcaatcagatacaggcttagagctagaagtaggtcagctaccatagcacaagatgatggtgtgaaaatattttagtgacagcttgtgcatgataatatatcctttcttgttcagggttctttttggatataatgctgaattctgggtgttatcatatgctttttttctattctaatctttttattctttgttaaaaaatatggtcatgtttataaaatcacaacttctacatttaaagggtaggttgaccaattaaagcagcctttccaacctaagtgcatctggctaggtaattctctctgagctttattatttgttttagagcttagatcagagtttgacaatgtagtgtatatactaagatttcttaaagatttatctgtgtattccaaggtgtgcttatctgtgtaaaaaactcagcaagacatggcattgccacaggctatcaaacatttgaaatattcctttggagttattttctggaattaggccacttttcaataattagatgactttgagctcttggagtcatctcctagaaccacctttggaatagagctgcctctgtgctcgtcttaccagtagagttttatttgtatttccagcctgttgcttctgctgatgaacctgggtatagctttgtatattagtcagctattttcaacattgcctatcatggtgctttgcaagtggttactcagtagttatttgctgcatgaacgaatgtctcttcattgagtcactgcatcagtcacttccctcctaacgtttcaggggatctttccttttcctcccatctctatcctt

SEQ ID NO: 12296 - DNA, 1070 bp, Homo sapiens
cctgaggaatcgccacactggagtagacagtgtttttatatgtgaaataaacaagattctttggcaagtcagtgacttgtcagtccatcaggatgaatcagcggaagtcctaggtgaggtgagaatgtcagcacagtgagccccttgccctgagtttatcgggcatcccattaaggtagctgtcatagctcctattttagagaagagtaggagtcattgttcaagatttagcttactttaaaaactttcaggggggaaggtcacttttagtataatgacaccattagaagtggcatgtggctgtttttcagattacagccattttggtgtgcccaagtgttaccagttgttaggatctttaaaacttgtcttcaggtgactagaggctatgctgcttctccaagtaagttttattaattgtcttgggtcctagacaagttaactgtagtttctgacttatctattgcctaaacctgtgataatttgatagaaataggaactaagaggtggcattttattgcaaaagatggatgttggctgctaaatacagctgattagaaggctaggacaaagtgtctgtttttctggtgacggggtcattattaaagctttattttattttattttattttttgagacagagtctcactctgttgcccaggctgaagtgcagtggcatgatctcagctcactgcaacctccacctctcgggttcaagcaattctgctgcctcagtctcccgagaagctgagattacaggtgcacgccaccatgccccgctaatttttgtatttttagtagagacggtgtttcaccacgccagccaggctggtctcaaactcctgacctcctgatccacccacctcggcctcccaaagtgctgggattacaagtgtgagccaccgtgcctggcctaaaggtttatagaacgcttcagtagtcagatggctgagttcagctcctttccactcctgtgaagttatctttaagacatttggaatccttcatagaagtcttatcagcagtgattctcttataggtgtttgctacttgggtcaatttagcctaaa

SEQ ID NO: 12297 - DNA, 1071 bp, Homo sapiens
tgattgtatcatgatttttttagtagcttatatgtttaaaataggatccaaataaagtctgttatagttggtcagtgcatgtttaacatcttttaatttttttttttttctcttgagaaggagtcttgctctgttgcccaggctggagtgcagtggtgagatcttggctcactgcaacctccacctccccggttcaagagattttcctgcctcagcttcccaggtagctgggattacacgtgcccatcaccatgcccagctaattttttgtgtttttagtagagatggggtttcaccatgttggccaggctggtctcgaaattctgaccgcaagcaatccgcccgccttggcctctcaaagtgctgggattacaggccaccatgcccaccctaaaatctctttttctaaaagactttccctcacttattttccttcgtagtttatatattaaagaaattgggtcatctgtccagtagaatttcccacagttaactggattaattgattgacattattgtggtgtcatttaacatgttctctgtctcccatattttcttcaaattggtagttatatctagatgatcaggttcagattcaatatttttggttagcatgctttatgcagtgttgtatacttccatcaagggcatgtgatgtctattaatctcccttttatgatgtcagcagctgttgataatcattgcctagatcccttacttcattgaacttcattagagattataaatggtgatactcaaattctatcatttcttaatttttttttagctgcagtactttttataaaagatactcccctcatcgcttatttggttactctgaggtacaatttgtataggacagaaaagacaaatgcttaagtcttttaattaacagttatgaccattttcaaaataattagtttgtttattaacattttctaaagttgactgatgagtttttaaaaaatagtcattatggactcttcaatttaaatatatttaatgtgtttaagccaatttcagtttttttttttttttttttgagacggagtttcgctcttgttgcccagg

SEQ ID NO: 12298 - DNA, 2016 bp, Homo sapiens
tcagcctcccaagtagctgggattacaggcgtgtgccaccatgcttggctaatttttttgtatttttagtagggacaaggtttcacaatgttggtcaggctagtcttgaactcctgatctcaagtgattcgccccccttggcctcccaaagtgctgggattacaggcatgagccaccgcgcccggccaatactttgtgttttgaacctgcttcttgcattcatctgcatatatattttacatattgatctgtgaatacaatctagaactcatatgaagttaggatgtgtatttgtctgttctcacactgttataaagaaatgctggagactgggtaatttataaagaaaagaggtttaattgactcacagtttcgaatggccaggtaggcctcaggaaacttaaaattatggtggaagaaaaagcaggcatgtcttacatggcagcaggtgagagagcatgtgaaggaagcaaagggggaagagccccttacaaaaccatcagctcttgtgagaactcgctgactatcacaataacagcatgggggaaaccacccctatgatccagtcacctcccaccaggtctctccgtcaacacccaggtattacaattcagggtgatatttgggtggggatacaaagcctaaccatatcggggtgttcaatgtattgaatgtttctgttggagcatagttttatggttcttgatgaggtctcatgttttagaaagtccaaaatagtattagtcttggaattgggatctggtatatcaaaatcacttcttattcaacagcttgagaatgtactgctctgggactctacatgaaaccagacatgtcagtcttgtccacaaaaatattttgcactgaaggtgaaacccattaaatgtatctgcatattcctttgatgtggaaacatataaataagctgcacagaaggtgatgatgtgttagtaacatgttcctttgaaatagttacaattctgcatattaggccatggctcatgcctgtaatcccaacactttaggaggctgaggcaggtggatcacttgaggtcaggagtttgagaccagcctggtgaacatggtctctactgagaatacagaaattagctgagtgtgatggtggacacttgtaatcccagctactcaggaggctgaggttgcagacagccaagatcacaccactgcactccatctagcctgggcaacagagtgagatgctgtctcaaaaaaacaaacaaaaatcctgcatattattgctattgaggaagtataaaatattgttttgatgggggaagttggtcattttcagacattttagctggtattttaattaacttactaacttattagttgtgtgccttatatattcttttgttttatgtggatgactgctctaagattacttaataaatgagctgcctggtaacataaattgcagatattaagatgaattgtatgctttcccattatttctgttacttggccaaattagaaccatgtagagctctcctgtagaattgaaatccactattttttccctactgtctctccaaattatactttataaatagaatttctttttatttatttagagacagagtcttgctctgtcactcaggctgtaatacagtggtgccatcatggctcaccatagcttcaacctctgtggctcaagcgatccttctgcctcatcctcccacatagctgagactacaggcacacacaccatgactggctaattttttaatttttctgcagagacagggtcttgccatgtagcccaggctggtctcaaactcctggcctcaggcgatcttcctgcctcagcctctcaaagtgtcggaattataggcgtgaaccattgtgcctggccactaaacatacttcttaataaatatacttcttaacacttcacctggatggatgaggcaatacatttgagcttgagatcaggtgagccttacacttgggtgcttgtgggagaattttatgatgctggaattgttttgcatg

SEQ ID NO: 12299 - DNA, 1021 bp, Homo sapiens
tgtactccagcctggacgacagagactccatttacaaaaaaaaaaaaaaagaagatatcaaagtcagggtagcctagagtatgctgggtaaaaaacagtctccatatctcagtagcttgaaacaattagtttcctttccactgtcactacatgtccatcaaagataggctaaagacttttagttgtacaaggacaaagaccaacggcagcctgcgcaaccaccgttgggaatattgccagttgctctgctgaaggcaaaagaaagctctggaggccttgccccgttaactaaatgttctgcgcagaagtaatgagaatagaggagaggaatcagagctgaaaagagcagatgaatgtgagatggttccagaatttggagattgtttaaatgtgggaagaggggaggaattgtggatggatgacgctcaggtttgtgtcttgggcaaactgggtggtgttgcttactgagataagaaaagggtaggtttgggattagaggaaatgttggtagagagttcacttttggaaatgtctagcagctagttgtctaaatggatctggagtgctagagagaggcaggggtatttagatttggaagtagtctccacaagaaggtttaatctgtgatagggaacagggttactcagggcaaacttaagaaagtgataggagagttgacatcgagccccaggaaataccagaattttaggaacactcctggcctgatagcattggattttaatgttaagattgacatttttgggaccaaggtagcctatgcccattcctgacagataacccagtaatattttgaggaaggagcaaacataagctggtaagctacatttcccatcacgtgctatattctttagagaatgttagttctcacttacttgtgccagtggaggactgttattggtccttggatggaatgcattataattctttgattttggatatatttggcaaaaattttgacagtgacctgtaagttgccaagacatacaaaaaaagaacaaat

SEQ ID NO: 12300 - DNA, 1055 bp, Homo sapiens
gttccaccaatattccccccccacccccgcccccctttttgttgctggggtatcaagacaaaaggttgtattttgttttttgagacagggtctcagtctgtcacccagaatggagtgtagtggttccttttcggctcaatgcaacctctgcctcctggcctcaagccgtcctcctacctcagtcccccaagtagctgggagtacaggcatgagccaccactcctggctgatttttgtagagacgggtttcaccttgctgcccaggctggtctggaactcctgggctcaagtgatccacctgccttggcctcccaaagtggtaggcttgagccaccgcgccgggaaagacaaaaagtttaaatagtggtgaaaagtggccggttagattaattcagttcagtttttagttgtatttttcttaccctgttgctgttctccagagagttgagagaaaagataacttttttcttgaaggcctgatgaactcctaacaagttaaatttcagagttgaagttccatttgtctttgtgtccattatatgattagtagagcttcacaatttttttttcgtagggatgggatcttgctatgttgcccaggctggttttgaactcctggcctcaagtgatcctctggcctcagactcccaaaagcactgggattacaggcgtgagccattgctcttggcagagcttcacaatgtaaagttttaaaaaaatttgacaaataaaaatagcatgcctgactggccgggcacggtggctcatgctgtaatcgcagcactttgggaggcgaaggcaggtggatcacctgaggtcaggagtttgagaccagcctggccaacatggtggaaccccgtctctactaaaaatacaaaaagtagccaggcgtggtggcaggcacctgtaatctcagcttcttggcaggctgaggtgggagaatcatttgaacccaggaggcggattttgcagtaagccaagatcgtgccactgtactccagcctaggcaacagagcgagagactgtctcaaaaaaaaaaaaaaaataatagcatg

SEQ ID NO: 12301 - DNA, 1044 bp, Homo sapiens
aggagaatcgcttgaacctgggaggtggaggttgcagtgagccgagattgtgccactgcactccagcctgggcgacagagcgagactccgtctcaaaaaaaaaaaaatcattgagcttttgttcatatgatttacatctatcaattcaccacattagaaattaaaactgaaaaagactgtaacacaagaccatacaagcacacattccattaacaatgatgtcagaaagatgatgtaatcacatgtcacacggcctctggaaaactccacaatacaattttaagataatgagaattcaaaaggcaaataacatgttagtattattatgaaaatagctttgactttgtggacacccctgaaaagggacctcccagaagcctacagagtacacttgaagaactgttgctctggaccatcaccctaacccttctttatgactcacatttgttgattttctttctcctttttattaagaaagtataagccaggcgcggtggctcacgcctataatctcatcacttcgggaggccaagtcgggtggatcaagaggtcaagagattgagaccatcctggccaacatgttgaaacctcgtttctactaagaatacaaaaattagtgggcgcctgtaatcccagctgctcgggaggctgaggcagaagaatcacttgaacccaggagacggaggttgcagtgagccaagatcgtgtcactgcactccagcctggtgacagagcgagactcgatctcaaaaaaataaaaaagaagaaagaaagtataaatgcttgtctcccagtgggtcctgtcccctgggaaaaaccagggaacttcttaggcttagtgcctcattttcctgactcctgtttctgggggtcccctaagcatcctccctcagcgccttgcccatctccctcttgaccttcccttaaggtacctcaacagcccttaccctgggccagcctgcttaccctgcttcaagcctgctggaccatctatctgcttcctcctcccctcacttgaggactttctcatcttgggagaggcta

SEQ ID NO: 12302 - DNA, 1033 bp, Homo sapiens
aagaatcacttgaaccgaggaggcagaggttgcagtgagccgagatcgcaccactgcacttcagcctggcaacagagcaagacttggtctcaaaaaaaaaaaaagaaagaaaaaaagaaaaagaaaagtaagttgcctctcccccttccaaaaatggctgacatttctctttgttgcccacagtgttcaagaaggaagtgtatcttcatacatcaccacacctgaaagcaggtaaacttaacctacccttttccaaaaattttaaacggcaggacagtaaatattttagatgttaaaagtcctatagtctctagcgtgactcttcatctctgccactgtagcaccaaagcagccataaacaatatgtaaataaacagatgtggctgtattccagtacaactttacctacaaaaacaggcatcagaccagcttgccaacttgtggcatagactgtttgctacatggagcttgttccagccactccccattatcctgcagatgtgcttttccagactgatccaactgcagagatggcagctgagtcattgcctttctccttcgggacactgtccagctgggagctggaagcctggtatgaggacctgcaagaggtcctgtcttcagatgaaaatgggggtacctatgtttcacctcctggaaatgaagaggtaagaatgttagccctaaagctaaagggggatgttacctttcccttctcaactaatatctatgttccctttcctcatttccttgaaggaagaatcaaaaatcttcaccactcttgaccctgcttctctggcttggctgactgaggaggagccagaaccagcagaggtcacaagcacctcccagagccctcactctccagattccagtcagagctccctggctcaggaggaagaggaggaagaccaagggagaaccaggaaacggaaacagagtggtcattccccagcccgggctggaaagcagcgcatgaaggagaaagaacaggagaatgaaaggaaagtggcacagctagctgaagagaatg

SEQ ID NO: 12303 - DNA, 1050 bp, Homo sapiens
gaatgaaaatgctctctgtccctgtgactgtccagaacctctgagactcaccgtctatgtgttgaccctcttctactccccgctttccctacttaggaacgtaaataagaaagtaggttccatctgcatagtgcccgcccataataagggcttaacaaatggtagctatgattaatttttttcctgggtctgtaggttatgcctcccattcctcttttttaagaggattaaacaaaagaggatgggtgggattggcctggattggggctttcacagggagaagtggcatattcctgagtatgaacttcagagaagatggttgtctatccttagcctgagcccttcccagttgataagaggccagagatcacacagctattagatgggtgggtgttctggccgtaacatttcagaacaggttaaagagataatcatttgggactcaaatgtctctccccccgggcacttgcatatgggacattgagtccttttgttttcccttgatctatagctcttacccctctgcccagtaattccctgaggaagaggtaaagatcaaagttgatactttgtcctttccttccttcttcccttatttttaaagctgtcacccacactgattcctgctctaatagcagagcagagatgaaggaaggagcttccttctatctgcttttctttctcaatgatgtcccaccatgtccccctcacaccctctccccacatacctacacacaggcagagattctcagtcctggctgtaggttagaatcacctggatatctggccctaccccagaataattcattagaatctctagaagtgggcccaggcctttttttttttttttttttcttttctctctctctctttttctttttttgagacagggtctcactctgttgcccaggctggagtgcagtggcatgatctctgctcactgcatcctccacctgccaggctcaagtgacccttccacctcagcctcctgagtagctgggaccacaggcacgtgccacaatacccagctattttatattttttgtagag

SEQ ID NO: 12304 - DNA, 1055 bp, Homo sapiens
gaaagaggaatcttggctgggaccctagcatcgtctagggaacagagaggttgtgattaagaggtatctggatgaaatcttggtgaaaggaagcacttgtttttaatcccaccatggtttttcatatgcatacaaccatcctcaaccatctgcccatcagcagagctcctagaaaggcaggacataccactggatatccccttctggcagttctaaaccagccttgcccggaagtgggagccttatctatgtggcccagactcaaataaggcctcttggaaatactctcacccttcccctttgtttaccctccaacccctgtgaatcttgtgaacagagggttgaagaaacatgttctgcacatgtgctagtacctgtgaatcttgatgtcccctggaccctctgtgtaagtacatcatggcagaattgctctagatccttcggagctgcagggtgagttaccagccactcaaggtggaggcaaacatgccaggctgcacaagggaccaggagcagctctgcctcttcccttgcaggaggaaatgagaacggggctatacttaggtacttcatcattcctttaactcaccatctgtacctgacatattttgttttgtctcacctaaagtcatatcagacttcctacctgatcactctcattgtgactgattctgccatccaaatgtctaatttttcacagctagagaaactaagagataggaagacaagggccatgaactaagaaggggaactcctctcctgagaattattgaccctctatcagctacaagtctaagaatttctaacttctgcttcatcttctaccatttctaatagcttccccaccacctcagccttctctccccagtttcttattccatgccactggctggtaacatctaactcctagttttcagatgatcctaaactgctgctgttaatggcaaagcttcatgacatcctcaccaccagagggaaaagggtctcatgctcttctttctcttggggtatatggtgaccccagctgaaatttcttggcccctaaatttcgctag

SEQ ID NO: 12305 - DNA, 1030 bp, Homo sapiens
ctactatccctttaaaacaattttagcaggaagtaaaatcttctaaaacaggaatggaccaggaaagtgcacgggctgtagccctttcctcctcaatctgggaagatctctttgcacttcagacactcccaggttaattggggcaataggcttgcttggagatttttcttaaaatgtttggaaaactaattcccaaatagaattccacccacacacacaccccgaccctaacccctgggcccacagcctgccttgggtcagtgaggctttctgctcatggcttttgaactgctggaataagggaagtaaattaagaaaaacctcattagaaacaatttagcttctctctttatggcataactacccgcagtaaaaggggaaaaaatgacctagccatagtttgatggggccctggcagaggcttcatttctccaaaaggtagatattactggacactcctgagatgagaaacagtacttccttacagtttagaagatcctggagtatgcttgattgtgttcattgactgttggcgcacttgaacttacctgagtttttcctaatgcttcccccatcctccctcctcaccaccttgcctggacactagtttgcacaagtaagaccattcaatgcttcttctctgcatgtttttttcatctgccatctcgcatgcaatgctctgccactgtgctattgttgtagctaatcgttttaaattccagtgagtccctggctgggtcactgaggggcctgctggccttatgtttaaagatcattaatcaagggttagaaacagctatgatccatgaatcattgtctcttccccttgtgaggtctgcagagtaaaactgtccagtggaggatgggatagaagcatggaggctttaaatgtttttgaacatgaggcatttaggggctggagttagaaggcagtttcctttctcctcctcagactaagatcaaatgaagatttttttatggaatgacttttagctattctagacaaggatagaaaacaaaagggatgaca

SEQ ID NO: 12306 - DNA, 1917 bp, Homo sapiens
actctggtaccgagctcccgaagttcttctgcagtccacatatgcaacacctgtggacatgtggagtgttggctgtatctttgcagagatgtttcgtcgaaagtatgggacccacataccctggactaccttgaattccccaaatcgcttgttcataaaccacatccataccttgcccattctttttttttgagaccagggcttgctgtgttgcccaggctggattgcaatggcatgatcacagctcactgcagcttcaacctcctgggctcaagtgatcctcccatctcagcttcccaactagctgacactacaggcacgcacctccatgcttggctagtttgttaatatttttatagagatggggtctcagtatattgcccaggctggtcttgaactcttgcactcaagcaatcctcccacccctacctcccaaagtagcataagctactgcatctggccccattcttttacttgcgtactactaacttgcccatagcagaaagctctgaaatgttctggaattaggaacttcatatccctttattctctttattttttatttatttatttatttatttatttatttatttatttatttattgagataaggtttcactctgtcacccaggctggagtgcagtggcccaattacagctcactgtagcctctacctcctgggctaaagcaatcctcccatctcagcctcttgagtagctgagactacaggtgcacgccaccatgactggctttttttttttttagatggagtcttgctctgtcgccaggctggagtgcagtagtgcgatctctgctcactgcaacctccacctcccagattcaagcaattctcttgactcagcctcccaagtagctgggaccacaggtgcacgccaccatgctcagctaatttttgtacttttagtaatgacagggtttcaccatgttggccaggatggtctcgatctcttgacctcatgatccacccacatcagactcccaaagtgctaggattacaggcgtgagccgctgcacctggcatttctttttttttaaaaaaagagacaaggtcttgcttgcccaggctgatctagaactcctgggctcaagcagtcctctcacctcagcatcccaaagtgctggaattgttggcctttattccctatacttcctattttgagccactaagcagtaaccattcaactaagatatctttgaaaatgactgctaccttatatcccttctcaccttaggcctctcttctgtggaaactctgaagccgaccagttgggcaaaatctttgagtaagtgaccaacatgggagaaaaagattttctattctgagtcctctttctgctgaacccaggatggcaactggctctgcccatggggatgggaactggaggaccctcctgaccagagttctcctgtcccccacagcctgattgggctgcctccagaggatgactggcctcgagatgtatccctgccccgtggagcctttccccccagagggccccgcccagtgcagtcggtggtacctgagatggaggagtcgggagcacagctgctgctggtactggagatggctgtgggcacagggaaagaaatagagactggggaaagaaatagagcagtatgcagggccctggccactgtggttaatgaaacttggttggtagatgggctgtagtttttattacagctgcaaatagccacccacagagaaggatatagaagagaacccatcctggctgggcacggtggctcacgcctgtaatcccagcactttgggaggccaaggtgggcgtatcacctgaggtcaggagttcgagaccagcctggccaacatggtgaaacctcgtctctactaaaagtacaaaaataagccgggggtggtggcacacgcctgtaatc

SEQ ID NO: 12307 - DNA, 1126 bp, Homo sapiens
aagcgttttctattgcagggcctcacgtggctggaggggttggtattgagtcattgtgttatctctggggccggccccaaggaagactgggagcgggggatgggatgctggtggtgttctttgcgctttttttttgggagtccctttgttgctgcaggctcataccatcctaactctgtaagcgacttttggtgataggagtctgtgattgtagggtctcccttgatctgagaatggctacctctcgatatgagccagtggctgaaattggtgtcggtgcctatgggacagtgtacaaggcccgtgatccccacagtggccactttgtggccctcaagagtgtgagagtccccaatggaggaggaggtggaggaggccttcccatcagcacagttcgtgaggtggctttactgaggcgactggaggcttttgagcatcccaatgttgtccggtgagaaggtggtggagggttgggcgtggggagtaaagggaaaagacagcctataggtggggtgtgatgatctgtagagaagtggggaccctgaggaaataatgagaggccatgttgggttaaaggggattgaaaagtgagcatttactctggtcaggctgatggacgtctgtgccacatcccgaactgaccgggagatcaaggtaaccctggtgtttgagcatgtagaccaggacctaaggacatatctggacaaggcacccccaccaggcttgccagccgaaacgatcaaggtgagtggggttggtaggcattgagaggtggattgggacctttgtagtagaaccttctgggatttcaggtatggtgcctagtttccagtgcatctgtacctcccctttgaaactaggatctgatgcgccagtttctaagaggcctagatttccttcatgccaattgcatcgttcaccgagatctgaagccagagaacattctggtgacaagtggtggaacagtcaagctggctgactttggcctggccagaatctacagctaccagatggcacttacacccgtggtcagtagaaagatggtaccaaaatgggttctggttgggagtaggagagtgattgcccgtagcaattgagaagtcatgtgcttcatgtgttcagtcaa

SEQ ID NO: 12308 - DNA, 1076 bp, Homo sapiens
cggtagggattgggagaggaagcagactggaactgtgggctccaccagagaagtacacccctccaggaagacccagccaccctctagggctctggggcgagggagggggaagcagcagtcgggagattgacaccacatcttccccccaccaggtgcctgtgcagtcctggtttgatgacatggcagacactgagttgctgaacctgatcccaatctttgaggagctgagcggagcagaggacgtctacaccagccttgggcagctgcgggccccttagcctgccctgcttccaagcgacggccatcccagtaggggactttcccacactgtgcctttacgatcagcgtgacagagtagaagctggagtgcctcaccacacggcccggaaacagcgggaagtaactggaaagagctttaggacagcttagatgccgagtgggcgaatgccagaccaatgatacccagagctacctgccgccaacttgttgagatgtgtgtttgactgtgagagagtgtgtgtttgtgtgtgtgttttgccatgaactgtggccccagtgtatagtgtttcagtgggggagaagctgaaagaccaagactcttcccaagttagcttgtctcctctcctgtcaccctaagagccactgagttgtgtagggatgaagactattgaagactccattgccaaaccatggcctttcctcagtgttgtaaggcctatgccaaggataaaggaagggtatgcctttgggtactccaggcacacacctttctgaaatccttctccagccagctgctgcagacaaaagatcacatttctgggaagatgagaacttgtttccagaccagcatccagtggccatcaggtcttgtggcccaaaggctatgcttgcctccggctgagtgcctgggataggccttttctatgtctccccaaggctggggtgctgagcctgccttcctcaccacctagccatagtctcaaacctgtggggaaggaggttttctccctgcccgggaagaggacagataactgatttccgttcttttgactgtgttttaaaattctctttctaaa

SEQ ID NO: 12309 - DNA, 1029 bp, Homo sapiens
tggcattaaggactcaggtctgaaagaagagacagccatatagggagctctcctgcccagggaaagggaactaatggagacactggcttaggtagagctgccccagttgctggtgcagagagggcaccagcatacaacatgctggtatgggccaaacagcatggctaaaactgctttttaattttttaaattttatttatttatttatttattttgagacagagttttgctctgtcccccaggctggagtgcaatggtgtgatctcggctcactgcaacctccacctcttggattcaagtgattctcgtgcctcagcctccggagtagctgggattacaggagctcactaccataccctgctaatttttgcatttttagtaaagatggggtttcaccatattggtcatgctggtctcgaacttctgaccttaagtgatccccactgcctttgccccccaaagtgttaaaactgcttttttcaaaaaatgcccatgcagttagatacacagctactttttggaacttcgggagccggtgctaagctgggtccggccctgccttgcttgttagctgtagagaacagtgtcagtggccaggcatgaaagcagtacaccctccccattgtttgcagtcttttgtgtgtgggggctgtctaggcatctcaccctcttttgttccctgccgactcacctgctggtcccaggagctcttccgtccacctggcactttagggcatgtccatagccaaggaacagatgccccttgcagaggacctgggaggacttctctccatgggggagtcccagtcaaatgtgtcttggctgcagggttcaggcagccgtccaagaagggccggaaatgctccaaatactctccttcctccaatagctgagaggaaggaggcccctcagaggggccattttatagtgatagccaggctaaggctaagtcctttgctgtgggggatgggaggtggtggggaaggaagtacttctggggatgaaccaaaaaagaaagcaactttctac

SEQ ID NO: 12310 - DNA, 1068 bp, Homo sapiens
gaccaacatactttaccattccttcaatcactttaatttcattatgtttggttaatttttcttcttgataaaccagttgtccctcagtatactccagggattcattccaggagcacctgtgtataccataatccacacatactcgagtcccgtggttggccctgtgaaacccacatatttgaggtcaactttccttatatgaaggtttggcatcccttgaatattgtacttttggtccatgtgtgtgtggttttttctttttaatctccatataaatggacccatgtagttcaaattcagactgttgaagagccagctgtgtattccttaggaattattttaacctgttaaaaaatatgttctcatggcttttgtgggtctaaagatatcctcatcttgccctaacttgaataatggtttagtgaataaaaagtattaaattggtggtcgttttacttgactgtctttcagaatcgtttgttgaaatctgttctcactctattgttagtgctctgctactgatccatctttccgtctggtagcttttaagtctttttgctttatctctcatccttttcagtttcattgtaatggttctaaatgtgcgtttatttaacatacctgacctgatgcacatttaatctgaaaatttgttataattctggaaaaaccttgcccttttagaaaactgcttacctgtctttccatttactcttaaattctcaaatccctttaagatgtgttttggagcctcaaataatcttttatatttctcatttactctcacatgttctttctaggtgaataattatcttaattattaagattaattatcttactgctctaatttttagctgcaatctaaaaagtccttttttatgtcaaggactgtatctttacatatgtcagaatgctagatgtttctgtttttagccatttcttattaaattgtatccacctgcttgtgtttcacaaaattatatggtgctttcttgtgtctctgataatcttaaaattatttcaaaatcaccaagattgttgtatttttattttttcaaaactgacaga

SEQ ID NO: 12311 - DNA, 1085 bp, Homo sapiens
tgtgtgtgagagagcaatgacagccttgaatgtcaaactggtaaaaaatggtttcttgaatgaggctgccatgacatccgactagttagtgtaaatgcctccaaaagcaaagtcagaggtgggattttacttgatgatgtgtttaatctataactaagcctcaggagctttctgggtagcactgtgtgtggcatctactccaagacaagggtttggggaggacttaggagctcagcttgtcagccatgtggaaaaagtggttttgggctcccacggcctttggggtggagttgtgtgctctgcatgattgtggtttggtatgtctggtggcttccaactgaacccgcagtcgaagggtggaaaacaacatcctacctagcaacaactgctagtctgacaagctggactacctttggccaagaaaaccagccttaaggtccaagtcggtggtgttagatgctggctggcactgagattaggtagtgaattttttcgtctgatgcatggggataataggatggaagagctgaggtcatcttttcactgaacagagagatggaaaaatcagccacaacttgccatgttgacaataaaatttaaaaaaggagaattttcaaatattttacccaacttctacgaaatgttatgttttatcacagtgtaattatttatattccttttttggaaaaaattaaaataatatgctttgtataactgaggcaagaatttgattcaattgagtaatatttggctacaattaatgaagaaagggcaggacacaggtttattttgaaagaaaatttctttatttagcctcagttaacttggatgttaccatccaacacacccgtcaccaaaattgggctctcagctaggatgtggggaaacttatattggggaactttattgcatgaccattaacattactacaggtcatgagaaatgataaagaatagatgcatttgttcagtggatgtaaatatgagggaaggcaaatgtcttttgctccattctagaagtgatctggctgtaagacagatgtacatgtatgtgagtgccataatgtggacttgtagaaaacactt

SEQ ID NO: 12312 - DNA, 1083 bp, Homo sapiens
ccccagccctcagtttatttcctgttagccttcccagatggtagcatccaagctctactcaccagactggagattggagaatttgggagaagattcacagaaactgacatgtggccattttgtcctaaaataggtccctccttcacctgtgctggcactcaccattcaacaagcccataccacacacagccctcagaaggcttttagtgctgctttttattaagtatgaatgagtagccagtgatcatcagacttttgaagacgtttctaacaatgaagtcagagtttgaaacaaatgagaaatgagaatcagagataaatggaaggagaaaggaacatcaaaacaaatttaatatctttggagagaaaagaaagggtactatgtccacaaaatcagaaaaacatgatgaaaaaaacagtaaaaggaatattcagaaaagttaaaaatacagtaccagacactttaaaaacataataaaaatgttgggagaaagttgaaaaactcagaaaaaagaaccaaaaaacaaaggtatggaagtcatgggaggaaaaaataagaaaatcggaagatgaactaaaaaggctaacacttatctaattggaatttcacaaagagacgtcagtggaaatggaaaggagaaaactatgaaagatacaaaattttgaatttcctggaagtgaggaatatacatttctagattgaaaggacctactgagttacgtctcaatgaaaacaaggcaaagatggtcctatgaggactgtgctcctagcacatcaccatcacctgggaacttggtagaaatgcaacttccttggtccccacccacacccagagaaaaagaagccctgaaggtgtgggcttaacaatctggtcttccagaagcccctgcccaccaatcctgatgtgtgctaaagtttacaaaacactggtgcagagagtcagaatggcctctggctccccaagctggcattatccatgagcagtgtcttcaaaatcctaagagaggctgggcgtggtggctcccacctgtaatcccagcactttgggaggctgaggcaggcggatcatgaggtcaggagat

SEQ ID NO: 12313 - DNA, 1048 bp, Homo sapiens
atttttagtagagatggggtttcaccgtgttagccaggacggtctcgatctcctgacctcatgatccgcccgcctcagcctcccagaatgctgggattaaaggcgtgagccaccgcgccctgccagggtgctggttagattatcagacactatccctagagattctaaattagtagatttgggtggggcccaggagtatccattttaacatatgcaatattcttatcagatattgcataaatatttctagaattactgataaaggtcatatcataatcaactaagccttttctctttatttcttatctcaaaagtaaagcatttcttagtccatcattgtctttatagcctgtcatcttcccagaggtgacattgtcatcattccagagaggttattatatatattgattacctttgctggtaggacaccgaaacatgtactctaccaatggaaagccattgaagagacgtaaagcagaatgacatgatcagagctgctatttgaaaatgtcatactgtctttagtgtggcaaatgacttggaggtggcaggaggatggtttagaggggcagataattaaaccacatgatggctgagaagccatggtggcctgttcttcagtgaagtcacgtcagtagaacagtgattaaaagtaaagctcaagtcaggtggcctggaattaacttttggctccaccctttgccaggtttgtaaccttgggcaagttactgactgactgtgtcagtcatctctaaaatgagaataatgctgatgtctatctcatagagttattgtgaagatacagggaatacaggtaaagctgtcttgcatgtactgagtgctcagtgaatgtgagctgtgataaggatgacgattcattcaactacaatgttttgagtatctactatgtaccaagccctcttttaagtgctaggacacccagtgaaaaagcatacaaactccctcttatcctgacgcctgaggcttccattctagtgaggagagaaaaataaatgaagaaaagaaaagataacatcagttcatgatc

SEQ ID NO: 12314 - DNA, 1707 bp, Homo sapiens
aagcactccgtctcatttctctcacaggattgccctgtgaaataatccttaaaatgaagttaatcctcagttttagtgtttttttatttttaattaaaaagagaatcacctgtgttaaatattaatgccagattgcttcccctttctttttaagacctgaaacaataggggatgcagttttacgctggctcaatgctctttagttaagtgggtccaaatgagactttctgttgactcaggctacctcccaggtgaaagactcttttccttggttgttttttaaaccatgtgggaaatctgtgactgtctggggtgctaaaagcacacaggttttgtttgaatcctaacgtgagttgttgggctcacggtttccttgatgaactccagatggacttgagctgggctgcaagggaaagtgtctggctccagccagcgtggtgagcatgcacagcagtggttgtaattgcaggatttttatagtttaaagactgtgccagatttttttcatgttataactctaccagaacaaatctactcatgtctgtcactgtctggtaggtctttgggcaaacatacttcaaataaaaccttgcagatttttttttttaggtgaaaaagagaatccaggtttattctcaaaacagaaactcaaagactgaaaggaactctgatttctaattgttaactaaacactgagtaacactgtgcttctctggaggtgatttctctttatttattttttaggaggggtgtacttatgcatataacaaataattcatgcttttctccaatcaactttggttatttaaaaaactccgttttaaacaccaaaaaaattagtatgggttggataaccctttcagtgggaagcttcaagccatactatttgttatcccggtttttcatcactctggaaccatttcatttttattacactattttgaaggcacatagtcaatgtgttaacacatatggggaatataaccaagaatatttgctggaatttgttccatattttgaatcttaaatgagatgactttctagcctagagtattgtatatgtatgagtttgttattgtttttaatagtaatgatgttctatggaaattgttactaagttaaattgagttattgagtaagaagcacatttattttaatgattgaaatctgttcacaagtttttgtgcaatctgctgaactttgttagatggcgatgtggtttaaattttatattatcagatattgatatttggggaatttaagaaagcagagggttcagattgttttctaccctctcaacactcacacacaaaataatgctttaaatgatttggtgctttaacgcagagaaacaaatatgtatgcaaagcaatttctgttttccttgactgcaataaggacattgatgcttaaatgtatgacaataaaaagatttctatagaggctttagtttcagcaacctgcctaattagctccttttcttaaaccatgatgtcatcatatcaggttaggagtggggagatgggagggtgaagcagacctgccagttcacaaaagatctgttcaccacgtgccaaaaaaacatctcttaaaacatttgtgggcttaaagtatttgaatctgccagtctccctaaactaattttgtccttggagcttgtatttttgagtttggcattttggttgccatctagtttgtggacagaat

SEQ ID NO: 12315 - DNA, 1067 bp, Homo sapiens
ttcccactcctcaaccagattgtaaagactggtcggtagctatggaaagggcggaactcgattatccagaatcaagggcgtgatttctgtagctcctcagaacgcccagacggtttaggggagagcgcagggagctcttatgcaagtttttggatttttagctgcgaagtctgaaaacctgaaatcactgccaactgcgtgaagaacaaggaagaaaatgtaatttagttggaaatgctgatcttttccaaatgtcatctcttttcttcctcagtcccagttttaaaattggagtgctgtaaaaagtaaacaatcaaaatttgtattttttaaagtagttgttctgtttaaaataaaagtgcacttcatacgtaatcttatattttgacttagcagaattgcaatgaaaattttaagtttttaaaacaattctagtgaactattccaatgccctaatgtggtaggaggtttggtcaggtgtttaagaatttatattttaaaattattgtgctaatctaaataacttttgtgaatgtagaattgttggccatcagaaagtatattccttgtgtttttaataagccttagtttaataaagtagaattagtattggattgatatttaatttcttgggacgttttatttagtagtttttattgcaattggaagaggagataaggtctttaaccgaaagcagggagactttcaattagttgtggctaattctgttaaattgcctcttgtggaggtcatgctgccttattcatgagtgaatggctctattgacaacatatggaactgaacatgtaaatgactggaggtgaacacttaggaataatagagggatgagaaagagaaaatgaatacagtgcttcctggagtgtatttagatatgcttagattattcacggcatctaacttgtattcgatagtttttcaatgtcaagttgtctattgtgatcatgctagtgtgcagtactttttttcttttttcctggatttagatgtttagaaaaaaaatctgtgttgcccttgatcagaagttgagttgaaccaaaaggggttcg

SEQ ID NO: 12316 - DNA, 1048 bp, Homo sapiens
tatgttgtgacttatatttatccctgtccaattaataattattgtatgaccattactaattattgctctggtctataaagtagttattcttaagttttggtgtgcattggaatttggtatgtaagttttcttggagatttcattaaaagtacagatggtctgcccctatctccgatgagttttattccataagtctgtagtgggtcgtgggcatatgtatttgtaaagggtaatgcagataattttgatgcctaccaaagttcagggacctctgctgcatgtgattagaagcaggcattctatttacttgtggcatgagtggattaagaattgtatgattttttaaaaatcaggaatttgcctggaattttgagccagaactcaagagagagcaatttaatcacagtgttagctgttgaagacttaatcctgttcatggatcagaaggattcttttggtattattctttccttctagtgtgcttaaggacattggatcttgcttcttggttattggtttgaatgaaactcaccctgcacagatgggcaatagttttcgagcacagatggagaaggaacagtaagttcatgggcagagcccacacttaggaacaagtaagagaaaaagatgaaggctggaggtagaggcactaagcaaaataaacatttacctggtcattatggaaaatgttctattttttcttactttaaataagcaggtacatagcaaatgttttaggagctcatccaggtttactttatttattgctattaaattacataataaataccttccaagcactcattaaaataaaaataacaatgcagcagaattggaatagcaagagacctcagtgagaaattacatgtttttcctaaaaagcagaaggaactgagttaacaaggatggaagcagttgactgattttttgttttagccagtaaagatctcaagttagtacagccaggagacttctactaaaaacagaattactgcttctggtggtgcaacttctctttcagtatttggtatctgctttagttgtgcta

SEQ ID NO: 12317 - DNA, 1072 bp, Homo sapiens
aggtgagagatgaagatccagtttcattctcctacatgtggctagccagttatcccagcaccatttgttgaaaagggtgtcctttccccactttaggtttttgtttgctttgttgaagatcagttggctgtaagtatttgggtttattttgggttctctattctgttccattggtctatgtgcctatttttataccagtaccatgctgttttggtgatatggccttatagtatagtttgaagtcaggtagtgtgatgcctccaggtttgttcattttgcttagtcttgatttggctatgtgggctctcttttggttctatatgaattttagaatttttttttccaattctgtgaagaatgatggtgttttgatggggattgcattgaatttgtagattgcttttgttagtatggccattttcacagtgttgatactacccatccatgagcatgggatgtgtctctatttgtttgtgtcatctatgatttctttcagtattattttgtagttttacttgtagaggtctttcgactccttggttaggtatattcctaagcattatgtatatatttttgcagctattgtaaaagaggttgagttcttgatttgattctccacttggttgctgttggtgtatagaagagctactgatttgtgtacattaatcttgtatctggaaactttgctgaattcttttatcagttctaggagctttctggaggagtctttaggggtttcaaggtaaatgaccacattgtctgcaaacagggacagtttgatgtcctctttaccgattggatgccctttatttctttctcttgtctgattgctctggctaggacttccagtactatgttgaagaggagtgctgagagtgggcaccttgtcctatttcacctgtcatggggaatgctgtgaatcacatatgtttttaatttatattgtctaaaatatacaggaaaaagaaagtcactcctcctgtttgagtcagcaatgtgtgtgtttgtgtgtgtgtatgtgtgtgagctaacatatattaggtaatgtttatacattagaaaaattatcgta

SEQ ID NO: 12318 - DNA, 1103 bp, Homo sapiens
atccttgaatatttatgttgatttcatggtaaaatgtgtgggccaccattttcacttacacttcagcagtattttttgaagaaagttttaaaaaagtctatcattaagctctccctattaattttctctggtggtttctttgattagatcctgcactggttctttcttgattactcattttgagggaggtaagtttttcctggacaaggtacatgtaggtggcttatactgagaatgagccagggctgtgttgaagtgaggtgaaatttccctatgactccagatgtgtgtgtgtgtgtgtttattatacctttgcttctctgtaggcatataggcacaggtaggcatctgtgagggttcttacaatgcaatgtctctcttcacccctctatcacagaaacagaccgacttcctaaaataaacattgcttgttttaatcttactttttttcaggtccactcccatcttcttagactctttgctttacatggtttagaaatctctactgtggcaatttcttttctccaacttactgatttctaagagtttgaatactagcactttgtagttgcgtgttaaaaatatattctcccctctttaagctttctcttatcacccttttatgttgttatttggtgaacataaattctttaccttaatgtactagattttttcaatcttaacttgatggtcagagctttttgcatcttatttaaaaatgatttccttctctagggtcataaaaatatcctccaattctattttctaaaatctttatcatttttgtctttatatttacttctctgatcctcctggaattgattctcatgaatcaatgagaggttagggtccaattttatttttcccaattatcccacacccatttgctaaaaaccaccaatcttttgtgccactgctgtcatatattaagtattcatatatgaatagatctttctgagttatctatcctgagtcattgatctatttgtttttccctgaactaatagcacttagactattagtttccctgaactaatagtcttagttatcatagcccagtaataagtcttagtatctgttaccaacctagatgcctactaaat

SEQ ID NO: 12319 - DNA, 1025 bp, Homo sapiens
tggcaagtttgctacagttatttttctcctcactgtatccctgatatctagtacagtgtccagtacatgtaaatacacacaatttactgaaaaagagctcctcattcttttatatccgtactgtatcttatttaaatctccaaagaaatataaaaacccacatccagtcagtgagaaaagagtaaattttgaatttcaaataaagataataagaagtatttagttttggagaaaaatcctggtggtaaaaaatagtaatgaaaatgataagtataattgctaatactctgagtgcttagtatgtcacatactttctaactgttttacacccattaattcattatacccttactacaatgccctatttagtacaccacattataggttgggagaagacacttaagcttgatctaagctgattcttcaatttaagcatctcaatattttgtagtaaagaattttattactataaatatttaagaaaaattaactttccataatattctcaagcatcttggtcgtctacaacttccgaactagtcatcaaaacaaaagtgtgatactgcagaattacagaaaaatctatccaatgtctgtctgcttaatctctccactgcaatctcctaccccaaaagttaaacaagtccatatgtcccctccaaatttgctcttccttgtcttttccctatttagttaatgatactaccatcccccactaaactgcctaagtcagaaatctagaagtcactcctgattgctattttcccctatgcctcgctacagtcaatccgttaagtagctcaaatccatctcttatttctagtgagcacttgtagccattctcatttcctaccttcccttccatgctgctgtcacagtgatatctataaaattcatatgtgattaagtcattcctctgcttaaaatcccaaaatgtctcccacatgaattttggataaattcaaatcatttatataaccatataagatctccttcataattttgcctctgtcctcctcctgctg

SEQ ID NO: 12320 - DNA, 1032 bp, Homo sapiens
gttgcagcctgcacaccatagcccacctctctgagcagactttggttttgtgtggtgacgtggcacatgtttgtacactgggatttttcaaaggacgctacgcgagcagactgacttgcctcttctgtgagcactgtggcttttgtcagatggagtgccggtctgcagaggactgctctttcgaatccacagtgttatctgtgtaaatagctttaatttttcttctgtgtcttaggtgaagttttgttcatgtagcaaccaggtagacagtgaccaaataaggctgtaaatgtgctgtagttttctactgtgatgtacttgaaggagaacctgtgtcctctacttttctgatctcccacaagtattttgtgtttgtttcctgagtcctgaggttattattttactcctgttttgcccccagttttctttgttttttttctggagacccagggaggcccatggtggagatcatttgtaaggaatggatcatggtctgggtttccaaaactaccctagtacagtgaatgagagaaatctgcctggaaattgtttcagaaccatgtacctttatgctttgtgattgtgaaacattgacttttttgtaaccccaaaatgaaaactgtttagtaaaggggatctattttgtgtgttttgaaacttaggtgcaatgtcccctggaaaaagctaaagaaatgtatatgttcaatgacattttaaaataaaatattatatatatgtatatacgacatattcagcaaaacttttttctgtcttttctatgaattcactgtgaagtttctttgtatcaggtaatggtctgtctggtttctttatatcaggtaatgataatgatacaaagagtatcatggctcaatgtgagattatcaactgtgaacacagactcgaaatccagagggaatggatgccaacactataagccttcacaggaataacagtaaaggctaatacatttcaactatgcctttggataccattattaccatggataccattagtaaacacatgaataat

SEQ ID NO: 12321 - DNA, 1050 bp, Homo sapiens
ggtggatgggaacccgggaaggagccattagaaggtctgaccatgtcccccagtcccacttcaaagccgtttctgtagcacacctgtcccctccagggctgcaaagactcttccagatgtctgagtcctggggagcttcagagcccattagtttgatgtgaggcttccaggaacattaagaagctatttaaggaattgaacaggggaactttgaggatgtgggtatggttcgattgagtaaggccaacaacagcttcagggagggaaggtcaggactccggagcccagtggaatcctttgaagcctttgctgctggggaggataagcacacagtgggatgacttgcgcggcagtccaattcttctgaaaacatttttgcaaaatgttctgcatcacaggttaatgtataggacacgagttgtaagtggaaagttagcaaagatttttggaaattggctaaagggcaggaaacagagggtggttgtaaaaacctcaaaagatgttaattggggagtgcttcacagaccagggttgtgaccagctttttattattttcatacaaattacatgaagaacggtcttgagaaggattttcatgttggctaattaaactacattagggagccgagcatagaaatgggaacggtagaattagggaaagattacatttattgatggaattgaagagtagcattttataacgtgtgtatgtatcaacccacacccattctgttggccagatttccatttgagtgtggacaagacaacttcagcttgaataacacaacctgtcacatttcttgggtcagcaggaagcactttaaagagggtttggcaccctactcatagggcagactctgaaattaaatggatgttatctgcagacctgaaccctctcttttagaagaagctgcaaggcaaatggaatctcctgtttaactgcaagcataagattgagacatccacatctcaccacctcttatgactcaatattgtctatcataaagagttcaaattatcccaaaaatttattgtaggtataacccaata

SEQ ID NO: 12322 - DNA, 1050 bp, Homo sapiens
aagcaaggtaaagctgcccaaacacaccagccctttctcacatccccaggctttagcccctgcagcttcctcttcgtgtaaggcatacgatgtccagctcgtccatccaaggaatcagtatcccatttacctttggtgttcccagcagatggtctgtaagctttgaaactgaatgaataaagtgattttgcctaatgcagaggtgggtttcaaacccaagtcttctgcctccaaattcagtgtttgtttcatgacatcaagtaaagtagatagactactacagagaatttgggtatagtcttggtggcctgctggaatgccaatcttgaaatgatctacttggtttatagggctgcaggaagtgtgttggtgttttattttcttcttgtcataagtgtcatattcaaagatccataggttgagctgttgggttggacacatgaaatagaggggacaagatttcatctctttatttcccaccaactactggcagcctttaccttgggaaccaccttggctatttctgccaggaaacactattgagagctccagtcactgctgttttaaatgagactttgggaattgaatcccagtttccctgagcccactcttaatcctttccttctaccaactagacgatattcagatgtggttgccctgagatcagtgccataaaagaattaaaattggcagttcccttccacattatttgatcttaattacagctttgtgagagaagtagagcagttgttatatttcctttttcttgtgtttttcagtttttgaaaaatgatttcagagataggaaaattgagcgctaggccaggtgcagtggtgtgtacgtgtaattccagcactttggacggccaaggtgggcagatctcttgagctcaggagtttgagatcagcctgagaaacatgatgaaactcgtctctacaaaaagtaaaaaagtataggtggtgtgcacctgtagtcccagctacttgaaaggctgagatgggagggttgcttgagtgtggcaggttgaggctgcagtgagccagaattgt

SEQ ID NO: 12323 - DNA, 1030 bp, Homo sapiens
gattggtgggtgtgtggatgggtgggtggatggatggatggatggatggatggatcgatcaatcctattgggtttgatatgaactgatttctgcagctgtagacgtcacgcatgcattggagttagtttattggacatccttccttccagtctccaaaaaaagaaagctgaaaagaaacagcagcaacctgtcaagcttaagataatggatagaaaaagcactcctcaaatacagaagtgattttggtgagccctttcttggtaagagctatccacgtatgttagcagcaaggggcctggaaacatatctgggcaggaggaactggaaaattgtttggttgttcctagcccaggcagctgcactggaatgggatgctttcactgtgtgcgtgtttctgatgaccctctgcttatactcctaggcccgggtaatggcaactattggagtgaccaggggacttggggaccatgacctgaaggtgcatgactccaacatctacattaaaccattcctgtcttcagctccagaggtaccgcatgaggtttttgtttatattttgtgcaataaaacattttcggcgttattcctcctgtgactcacaccccatatccagacagtagccaacttgtattatatgtacttccactgtatctctcacgtctgtgtctttttcccactccattctcactttgactcttctggttcacaccttcatcacctcttacccagatggctgcacagcctcctcctgacattttctaagtctgccaatccatgctacttattgcagtcaggtaaattttccttaaaaactgactcctaattgctcagaaaccttcaatggcagcccaggcatggagagtaaagctcagactcccattcacttggtgttcaaggcttattataatttggtctggacttctctgatctttgttctcctgcaccagccagaatgaacttgctgtttcccttacatgaccttaggtttcccatatttgcttaaactattccttttgccaagaatgccct

SEQ ID NO: 12324 - DNA, 1046 bp, Homo sapiens
agcaaggtgcctttaaaagggtgctgaataagaaatcactgagattttcagatctgaatctagtttgaactctagagtcctttaagagaaagttctaaaacctaccaattgggaatataaaattgtacagtcactttggaaagctaactggtagttcttcagaaagttaaggttaccatatggctcaataatttcactcctgggtatatgcccaagagaactgaaaacatatatttacacaaaaacttgtacacaaatgttcatagcagcattattcactgtttcaaaaaaaatggaaacacaaatgtctgccaactaatgaatggataaacaaaatgtgttcatgtgatggaatattatttagccacaagaaggaatgaagtattgatgcatgctgtaacatggatgaaccttgaaaacatctgtttagcaaatgaaaccagtcataaagaccatgtattgtatgatgccattcatattaaatgtccagaatagattaatccatagagacaaagtagattagtatttgcaagggcttagaacgaaggagagatggggagtggctactaaaaagtacagggtatagggagtcctttttcagattttgaaaatgtcctggaattggataatggtgatggttgcacaaccctgagaatgtaccaaaaaacactgaattgtatcactttaagagggtatattttatggtatgcagactataattcaaaaacagaaaacaaacacatagacctcttttttttttttttttgagaaatgatatgcaccttgaaaacctttcattaatgactgaggcatttagctgatctggaaaattttgcgctggcgcactgggtttcatgagtgttgctggtatagcaaaatggtagactaagatgtttctacagaaagtggctgaatatgacactgagaaattattctgggtggtatgagtacagactgggctggttgtgaagaaagcaaggaacatgggactcagctatggctctatgagtggtcacttatttttgctgctacttaaagatctgaaa

SEQ ID NO: 12325 - DNA, 1050 bp, Homo sapiens
ggtttagctgttagtacaggaagggagggagaaacatgtcagcccttggaagtgagccagggttgtgggaggtagagtgttgaaatgggatgatcacaggtgctagggtctggaaatgctggccctcacccctccagaaaataccttgctttcccatttgtggaaggggctggttcctgctcttctagattgccatgcagattacagatgatgtgcttaaagcacaagtatggttcagcccttcattctttcaccaaatatgcctcatgccagacactgtcaaagtcactaggaacgtagctatgatcaaaaaaaccctgccttcatggagcttgcaaaccagtatggaaagacagataatgagcaaggcacataagtaaaatgttgagtatgctattggtaataatttctaaagagaaacatagggcaagggaagggacttagtagtcaggggtgggttgcagtttcaaatgcgacagcaagggaaagagtcatgggggatagagtcttagagtaaggtctgaaggaggtgaggcaaaatgttctggcagatgaaacagccaaggcctttgatatgatttggctgtgtccccacccaaatctcatcttgaattgtagttcctataacatactcccacgtatcatgggaggggaccaggtgggaggtaactgagtcgtgggggagtatttttcccatgctgttctcatgatagagagtaagtctcgtgtggtctgatagtttcataaagggcagtttccttcacatgctctcttgcctgccatcaagtaagacgtgcctttgtacctccttcaccctctgccatgattgtgaggcctccccagccatgtggaactgtgagtcgattaaacctctttttctttataaattacccagtcttgggtatgtctttttagcagcatgagaacagactaatacagccttgaaccaggaatgtaccttttatagttgaggaccagatagaaatggaccaaagaaagagggggtagtaggtgaggcagaggaggtgcaaacagggcccaggcatgctc

SEQ ID NO: 12326 - DNA, 1070 bp, Homo sapiens
gcgggcggatcatgaggtcaggagatcgagaccatcctggacaatatggtgaaaccccatctccactaaaaatacaaaaaaaatgagcgggtgtggcggcacacgccggtagtcccggctacctgggaggctgaggcaggagaatcacttgaacatgggaggcagaggttgcagtgagccaagattgtgccactgcactccagcctgggcaacacagcaaggctccgtctccaaaaaaaaaaagtgttttgttttacatgttatatctaatcatttgaaaagcctaacagatacttttatccttaataaagctgtaaaacatttaaaaaaaaatcaaaaaagcagtatctctaaaacctaataagcttaatgataaaatactacctctaaaacctcataagcttaattatgcttacagtattctagtcccagtatccagatataaatttggggttttgtagttgattatttgggttttctgttcacatatgggtcatacttcaggaaacctgagaacaatgtgagttggtatttttatgtgctatccaaaggatcgtttatgcgacacttactagagtgctatttgcagctcttttacaaacaatagatactgatatcatcttctaggattgttgtctagtttgccatactaataatataggtatttgagcttacagaaatattcagttattcccaagaaaccacagctaagtgagctttgatcatatctgtggaaatgtaggtccattatcactgattgacgagcagtcaggaatcccagggctcagtttaaaacaaatgcttagagccgcagaaggttctggcaacagagccctgattaatgaagggctaagttttctttattgctagatattagctgtcatgtgctttttttttacatcttgacagtttcgagagtaaaaaatatttgttatatgttcactgcccccataattattcacgctcaggaaaagagaagctttgccctggtttgatttggaagctgccaatggtcaggaactaagctgtgtatcatctgatttaccatcagacatctgcacacttagggg

SEQ ID NO: 12327 - DNA, 1033 bp, Homo sapiens
gcattctgtgctcatacaggacattttgtaaaatcaacgatgagatgtcactcaaagtgggatttctacatttgtgataggcctttcctgctgttgatatggcccctccaccggttgtataaatacctgaatagttagggtggcaaagggaagaataatattaaataagctaaggacttgtgaatgctaccaggaggataccactttttcccttcagacaactatttctaaattaacagtctccaaatcgtaagttaaaaacaatttttttggcagggtgtggtggctcatgcctgtaatttcacagcattgggagaccaaggcaggagggtcacttgaggccaggagtttgagacccagcctgggcaacatagcaagaccctctctacaaaaaatttaaaaattagccaggtgtggtggcacatgcctgtagtcctagcttcttggggcggccaacgtgggaggatagcttgaggccaggagttccagactagcttgggcaaaataaggagaactcatctctacaaaaataaaaataaaaaataaagcctggtgtggtggtgcactcatggtcccatctactcaggaggctgaggtgggaggatggcttgaacccaggagactgaggctgcagtgaactatgatcatgccactgcactccagcttgggtgacagagcaagaccttgtctcttagaaaaaaaatgcacccccaatgtgtttgttcatttattgatcatttattgatatataacctactactgtgtatccataaagtatataattattttaaaactataaagatacatttaaaatttttaaatgttttaataatttaagggcaataaagatgaaaaggcaacgttttaaaataacaacagctaacagtgatacagtgttaattgtatgccaggcattgatttaagtgtttttcacacagtaactcatttactgtcttgctaagagcaaagacttcctgctatcattagctaatatctcaaggcaaaattcatcattaacaatagcgagtataat

SEQ ID NO: 12328 - DNA, 1037 bp, Homo sapiens
agcacggtttgttgaaaagattatctgtgctccattgtattgctcttgctcctttgtcaaagatcagttgactgtatttatgtgggtctatttctgggctctgtcttctgttccgttggtctactggtatttgttcatttgccaacactagacgttcttgataaatgtaactttacattatatttttatatatatattttttaaatttttttagagacaggatcttgctatgttaccccagatggacttgaactcctgggctcaagtaatctctcgcctcagccttgtgagtagttaggactatagcaagtacacaccacagtgcccagctataagtcttgaagtcaggtagtgtcagccctctttgttcttcttcttccttcagtattgtattgattattctgggtcttttgccttcccatttaaactttaggatcagtttgtcagtatccacaaaataatgtgctgaaattttgattggaattgcattgagtatgtagatcaagttgggaatatctgatatcatgacaatattgggtcttccaagaacctcttgattttgattttgaaattctgactgtggaatggaagtgggttaagactgcaggtggacaggcagctaactcttgggcctggtttctaatcagtttgggccacagtttctaaagagtcattgctagggattctaggtagtttagtttgacaaccatgggcatagtttaccacaaaccctcctttatgtcatacgcaactttttgaagttccacattagtgttaaagaatgcgagctctggaatctctctggaggttcctaattctggcttcgtcaccttgcatcactcacaagactttagccaagtatcctctcaattgtaaaatggacttaattgtggggatcaaatgggaaaatctgggtaaatgcctgtaaagttgcttgtatatccttgttttaccttatattccattctctcctctccccgacccttatccagacttcctccctaacttgcccttgaaactgttttttataatgtcac

SEQ ID NO: 12329 - DNA, 1019 bp, Homo sapiens
attaagaagtgtgttgtgatttgtgtatgtttgcactgttttgaaaaccaccctaaaggtaagtatttttaaagctgtttataacatttggtaaatttaacctaaaaagtatcaaaaccaggagtggtgtctgttctcttttcagtgcgttttttcctttgtcgccccacactgaatatttttggccacttggaggacatacgtgggcattcataattaagaattaattaaaagtgtctgcttggaggactttctgctccgtacttaattaacttaaaaacttattgccttgataaacagatggatcattttaaaagaaaaaacagagttcaccctcactttagacatctacaataattcatttagttaaccttggaagtattttgcatctattatgcatccattgacaatgaaatgcagaagtgtttattgccaccatttaaggatgattatgtgctatagtttaactcatttatgaggtgtgggtggcagcagaaggagaggacctatagtgactgttccccaagctgggctgggctggactatacagttggtaccctggcttctttaggctaagggtcagtttctttgtccagtccttcctgctggtgataggctgtttctttctgcatctctgcactattccccacttgtgatggactggcttttccccactccattacaccttctgttccccacatcacttcagtttggcagtagcccatcatggcttctcatggtgctccccgagaattcactgctctcttggtttagttcccatagttagttggcaagaccctcctgtatttcttggtttagagtcttgaaagagatcttctgcttgacccagctgaaatctttcagccaagccacaaagtcataggtagattgccatgccaaggctgggtgtccttcattgggatcccacaccattccagctattggggctgtcacacacaaggtgtacccatacatgcttcatcagaggctgaagtgtggacaaggttcttacagggtat

SEQ ID NO: 12330 - DNA, 1049 bp, Homo sapiens
tcaccattgtatttcattgttctagacacatttatattcttcatcatttcagattcattttatttcaaagctataacagaaggaacgtgttgttacgctatacatgtctgattggatttatacaacaaactgaagccaggttctattgtagttcatttcccattatccccctgtcctacttttaatacggaagaactcttatcaactgtgtagcatttttatctcatatcttcttctattgttgcctctaccttttgtttcccttggggtcatggtgatggaagaagtggataactgtgcttctgaatagtcttttatgtggagaaatacagtttactcctctggacatcatgttggtgacccactttatgtattctttaatattctaggggtttttgttcatagagagaagcacctgctactatttgtaatttagcgctcaaactattaaatttgtatctaaaatcaaactttgaaaattaatttctgaaatctgtttgaacatggattaccgacttaactcttttaacaacttaaactgcaatgttgattcttttgagccccctgacactggaaacagcacacaaagatccagtgattatgaaacataaaacatacttaaagctgttgtaaaataccaatgccatggtggttcatttgttgttcttaaacttgtctgtttactttcctaagtttgtagcaacatatattttgatagtgtccagtgttagagcaatgtgcattttgagacttttctacagtaatatagtactagtacatttccacaattacagaaactttattggagccagaaagatagtctgaccagctgataactgatctagttatttttggccatctctagcttcatcaaatccaagccactggtcatctggctaggctccattttatatttgtccacaatttgttacagcagtaagattttggagttatactttccacacaagttctagtttttttgaagcatggtgcttctcccagaatgttttcttttccaagttttgcttggctggcatctcatagtccat

SEQ ID NO: 12331 - DNA, 1045 bp, Homo sapiens
agaatgagacagacaaaaaagagggccatgctccttcacagagagtgtcagagaagagccctctagggaggttagttgttgacctgagtgaaatcagagagtgacatacatcaacagatgggggcttaagagtgtgctggccagcagaaatcagatgtgcaaggacaccaagattgggatatgcttgttgtgtttgaggaccagcagggaggtgagggtggctggggagaagggaacaaaggagagggagataggaaatgagggtccagaggagattagatggctgaggccagtggctgctgagatggaaggtcagtgggagattttgcgcagaggaacatgggaaattgttttagaacgatggctttggccaccatgtgggaggtaaattgtagctagcaggggcaaaagcaggaaaagcagttgaaagcttttgcattactccgggtataagatgatgtcagtttgggccaggatgatagtagtggaaggaataaaatgcagtaggattctggatatagtttgaaaggaaagatgacaggattgattggtgaactgagtgagaaaaagaggagtcaaagataattccggattttcagcctgagaaactgggtgaatagtggttccattttctaatacttaagaagcccaggggatagggtggggtgggggactggtgggaactggtgtagtgttgtccttaaaggaatggtctccagagtccattggcccaagttccaatcccaaatccacccctttaagcagatagttaatgccagttttctcatctgtaagccagggattagtcataactgataagatgcatgtgaggattaaatagataagggaaaatgtttttcttagagttgagaaaacgtggtccatagtaatttgtaattatttgtttaatatctacccactctactggaggctccttcggggtgtggtctgcatctcttttgttacccatttattccttgccatagcataaacttggcacttaagaggagtccattccttcgggtggttgcagcccctactatga

SEQ ID NO: 12332 - DNA, 1047 bp, Homo sapiens
catgttggtcaggctggtcttgaactcctgacctcaaatgatccccccacctcagccttccaaagtgctaggattggtgtgagccactgcgcccggcctaaagttagcaagttcttgctgtcattcctgagaaataggctatgcatataaatatatgcttacttttttaaacatttaaaaattttatatttttggaagtattcttttatttcttcctccaatctgattaatatgttttcttttaataacatagttttttgaaaccccaaaactgaagtacagttaaggatatgattcctaaggggaagagatctcatgtagtaattcccaaacactaatgtaaaagtggtttgctgaactcttcgggaagcttaagaaaaatacccatccctgagcccttcctcctcttccctaagagggtaaaatttagtgtgcccagaaacctctgttttcaaaattccctgtgataatgatacgtggtctgcactcaaaaaaattgggtaactaagagaaagatgtcagctccaggatagaataggtactgaaccttactgatgtgtgtgtgcatacacgtgtgtgtgtgtgtgtctcctgggactgattagtattaattgttttcattttattagatttgtgccctatcatctttatttatttcgagatgaggtcttgttctgtcacccaggctagagttcagtggcgctctctcggctcactgcagcttcaactgcctgggctgaagtgatccttccacctcagtctgccaagtggctaggactacgggagcatgccaccatccctggataattattttatttttttgcagagacagggtctcactatattgcccaggcttgtcttgaactcctgcgtccaagccatcctcctgccttggccttccaaagtgctgggattacaggtgcccaaagtgctgggattacaggtgtaagccacacacccaggccctatcatctttaaaccttctttgaaacaccccacttcccagagccttaggagtttctccctttccctgcggatttaattttc

SEQ ID NO: 12333 - DNA, 1032 bp, Homo sapiens
ttttggagtcttgtatgattatcagtattcccctgtcaaaatcaaatctattcaggtttcttcactgttgagaacacctaaatgtttttatttttgagaagtggggacagagtctcactatgtcacccaggctggagtgcaatggcatgatctcagctcactgcaaccttcgcctcctgggttcaagcgattctcctgcctccgcctcctgagtagctgggattataggcacgcaccaccacgcccagctaattttttgtatttttagtagagacagagtttcaccatgttggccaggctggtcttgaactcctgaccttgtgatccacccacctcggcctcccagagtgctgggattacaggcatgagccaccacgcttggctaagaacacctaaatttttatgtttcttggctcaaaaaccagttccatttctaatgttgtcctcacaagaaggctaattggtggtgagacagcaggggaggaggaagagctgtggtttgtaacttgttcaactcaggcaataagcgattttagctttatttaaagtcttctgtccagctttaagcactttgtaagacatggctgaaagtagcttttctatcagaattgcagatagtcatgttgggctaacagtcaattggatatattcctttacctcacatgaccccagcaactgtggtggtatctagaggtgaaacaggcaagtgaaatggacacctctgctgtgaatgttttagagaaggaaattcaaaaaatgttgtaactgaaagcactgttgaatatgggtatcggctttctttttcactttgactcttaacattatcagtcaacttccacattaatgaaagttgaccatagttatttccaaataaaaagaaaccaactcttaccaggtcttggactgtgatgtcatattattcagttttatgcttgttcctgagcagaactcataagagtgacatagtcagctgctgacggcacctcagccacgccactcttactcagttcagtgggtgtgcttgcgtggtag

SEQ ID NO: 12334 - DNA, 1035 bp, Homo sapiens
cttgctgccttctgacacctttcaagactaacctacttgtttttctcctcttgacttgcactgtgtgactttgtgtgtgctgactggtgatagaaatgttcggaactgtcgagggctcatgttttgtaccatagactttctcactagagtcccttctggtgatttgtttcttttacaccccttcctgctatcctttccactgaataatattctgagtgagaagctagtgagagctaatgttacatttggtttttcctccccagatacaggtttgacccccgtctcatgttcagcaatcgcggcagtgtcaggactcgaagattttccaaacatcttctgtagcgacctcacacagcctctgcagatggatccctgcacgcctctttctgatgaagtgattgtagtaggtgtctgtagctagtcttcaagaccacacctggaagagtttctgggctggctttaagtcctgtttgaaaaagcaacccagtcagctgacttcctcgtgcaatgtgttaaactgtgaactctgcccatgtgtcaggagtggctgtctctggtctcttcctttagctgacaaggacactcctgaggtctttgttctcactgtattctttttatcctggggccacagttcttgattattcctcttgtggttaaagactgaatttgtaaacccattcagataaatggcagtactttaggacacacacaaacacacagacacaccttttgatatgtaagcttgacctaaagtcaaaggacctgtgtagcatttcagattgagcacttcactatcaaaaatactaacatcacatggcttgaagagtaaccatcagagctgaatcatccaagtaagaacaagtaccattgttgattgataagtagagatacattttttatgatgttcatcacagtgtggtaaggttgcaaattcaaaacatgtcacccaagctctgttcatgtttttgtgaattctaggctggtgctgcactgaaatagagcagtaagcttgtgataaaggccaattccaggtag

SEQ ID NO: 12335 - DNA, 1047 bp, Homo sapiens
tttgtaatcctgtcctttcttttgtatttattagctgaaattcctcagagaagaacttccccttatcagttatttggttattttgagatgcagtttattcaggaaacacaggataggtgtttttgttcatttgacagtttttggagtaaacttcattcagttgtgatgaggctgagtagcatgcataattttttatgtatttgtgtttcaatactttcctgtcattatttttgcttattttgttctatcataagccagggagtcccttctagtcatttgtttagagaagatgaatttgttgttttcctgccttgtagtaacaagagacccaggcaaatttcagctttctattaaaacaccagaatcagtagaacaaagttgttttagttttggctgtggattaaatgagtgaaacataacatgagcaaggctcctgtcttggctccatctttacattgtgtgttttgttttcaggacagttttccttgccaatagacaagagacagctgtatgagtttgatatcaaagttccactgttggttcgaggacctgggatcaaaccaaatcagacaagcaaggtaggtgcctgacaagctggtgctgtggacaggtaggcacttgcctgagaaaataaggtgtttcctcctgagataagattggttaggttcctcttcccactagggctgagcagcagaagagtttttaagtggaaacaatgattgcttttttttttccttaacttcccactgctctctgtatctgtattttcaccccacatatacatgtctcattagaatgcatagcttttctttgtcttttgagactagatctttactttgttctggagcagtgactctcaacagaggatgtgcatcaaaattgccctccgaaactgaagaagaaaaatggtacgtgcttgggcaatatccagaaagagtatgattgactcacttggtctggaatagggacccaacatctgccttttttccttttgaagtttgcaggtgattctgagaggcagcctggtttggggcccactgccttgta

SEQ ID NO: 12336 - DNA, 1073 bp, Homo sapiens
gggaaaaaaagtctgtgtccagtgtataaaatgatataggaaatgtgtaaagctgcagatcagcctgcaaatgaaccactgtgtctcaattagatccaagtagtattctttgtctttggttaagacccgtctctcaccatgctgtgccccctgtgtataaatattatttctggctgggtgcagtggctcacacctgtaatcccagcactttgggaggccaaggtggaaggatcacttgaatccaggaatttgaggcaagtctggacaacacaggaagaacgttatctctacaaataaaaaaatgaaaaaaaaaaaagccaggatggtggcacacacctgtactccaagctgttagggaggctgaggtgggaggatcacttgcgccaggaggtcgaggctgcagtgagctgtgcttgtgccagtgcactccagtctgggtgacagagtgagagctcgcctcaaaagaaaaaaaaaaacaactatctctgcggcagatgagactagaattactgttatcctgcagaaagaagccacttgagaaagaaatccgttctcagtttgttctgtctgctttaatgtctccactatgatttaaagcagccctgaagcatgtcatgtgtagaaaaaaatatatatattccatgagaaactacatatttgaagttagagtattaaggagcttttctttactctctttaacaatgatgagaagtccatctttcttgtgtgactttgtcgtttttgcttcctttcctttgtagtatgtgccaagtgctctctgctgccccagcagagccagtatcctgacaggaaagtacccacataatcatcacgttgtgaacaacactctggaggggaactgcagtagtaagtcctggcagaagatccaagaaccaaatactttcccagcaattctcagatcaatgtgtggttatcagaccttttttgcagggaaatatttaaatgaggtatgttgaatgatctgtttctttttttataatggcttttaaaatgtgaatataattcatgttaattttattatttcaattaatgttaaaggatttcttggtata

SEQ ID NO: 12337 - DNA, 1050 bp, Homo sapiens
ccgagctgctcgagtctcgccccgcgccgcgccgcacttttagacgagtgcggaggggaagtcagcgcggagctgcagcccccgccggccgccgccgcgcggcgagagggagttcccaaagctgcctcggcccggggcccggccggccccctccttgcgtcctccccctcgcggcgaggctgccccgcgcccaggctgccccgcgcccgcgcccgccgccgcggcccgcagcgatgatcttccccagcagcagcggcaaccccgggggcagcagcaactgccggacgccctatcgcaagcagcagtctctggtcccagcccaccccatggcccctcccagtcccagcaccaccagcagtaataacaacagtagcagcagcagcaactcaggatgggatcagctcagcaaaacgaacctctatatccgaggactgcctccccacaccaccgaccaggacctggtgaagctctgtcaaccatatgggaaaatagtctccacaaacgcaattttgcataagacaacgaacaaatgcaaaggttatggttttgtcgactttgacagccctgcagcagctcaaaaagctgtgtctgccctgaaggccagtggggttcaagctcaaatggcaaagcaacaggaacaagatcctaccaacctctacatttctaatttgccactctccatggataagcaagaactagaaaatatgctcaaaccatttggacaagttatttctacaaggatactacgtgatgccagtggtacaagtcgtggtgttggctttgctaggacggaatcaacagaaaaatgtgaagctgttactggtcattttaatggaaaatttattaagacaccaccaggagtttctgcccccacagaacctttattgtgtaagttttctgatggaggacagaaaaagagacagaacccaaacaaatacatccctaatggaagaccatggcatagagaaggagaggtgagacttactggaatgacacttacttacgacccaactacagctgctatacaaaacggattttatccttcaccat

SEQ ID NO: 12338 - DNA, 1033 bp, Homo sapiens
aggccaaggtgtgcagatcacttgagatcaggagttcaagaccagcctggccaatgtggcaaaaccctatctctactaaaaatataaacattagccgggcgtaggggcaggtgcctgtaatctcagcaactcaggaggccgaggcacgagaattgcttgaacccaggaggtggaggtttcaatgagccgagattgtgccactgcactccagcctggcccacagagtgagactcaatctcaaaacacaaacaaaaaatgcattgaatatatcaaaatttataggttcatattgatcccatcccccaccttccccacacacaaattctcattgggccaccattcgaagtatttagtgaacaaattccctgttttgaaattgaaaggaaagaattagcattcattcattctgcccttcttgtaaaagctgtatttcagagtaacaaagcagcactaattgataaaagagaattctcctttacaaaatcatttaggctaataaatacagaagatgttaataggattagaaaaagattatcgctttgcaacccctaatgaaattttgattcagacagtgatcaataaataaaacctttagattaaagattgatgagaacccttacaatagaggaatgaggctgtcatcacctgaacccacccaaagtaggacagctagacatgatgtgataggaagcactgtgccacctatgaactgttcctgcccccagtccccacctcaaagctaacctcgactgaaatcaagcatctagatttaacttccatttagagaaatgtgggagacagaggaatatactacagagcaaatgacacagtttcagcaatagatcagcagcacagggggaaggacgagaacccaccacaggtaagaggagatttaacagacttaacacagaggtagtgtgtggactttgttgggattctgacttaagcaagccaacttaaaaaaatgtttttgaggccgggcacagtggctcacacctgtaatcccagcactttgggaggccaaggctggcgg

SEQ ID NO: 12339 - DNA, 1049 bp, Homo sapiens
aaagacattgccatagtatgaattgatctgaaaagtaggggcggaagtcagattgcagtgagctgaggaatgagtggagagtgacaaatacagagatgctctgcttgctgtctgctttaggaactggattttggaagagagtttggccggaaaaatgcactgaatggatgaaagagactggacaccattgtgggctcctcttttgagaacttctgcatttacttatgtgcttgttgctctattttatattgtattatatcctttattcagtagttctcaactggggtcaattttgccccaggggacatttggtgaggtcaagaaatttagctgtagagaaagaagaagagacaacagatagtgagagactcaaagttcagaggggtgttattttgttttgcggctttgttttgttaagattggagagattgagcatgtttggggcctgacatgaatgagggagagaagagataataatggaatcagatccacaaaggaatgagaaagagaagtccaggacagaaggtagaagacctcttatgaatttgtagaaaaggttgtgagacacagaaagacaaacatcacatgttctcacttaactgtgggagctaaaaattaaaacaattgaactcctggagacagagagtagaaagatggttaccagaggcttggaagagtagtgatgatagtggggagtggggatggttaatgggtccaaaaaaaatttggaaagaatgaataagacctggtgtttgctagcacaacagggtgactgaagtaaaaaataatttaatcatacatttaaaaatagccagaagagtataattggattgtttgaaacccaaagtgtgggtactggagaggatggacaccccatttgccctgatgtggttattgtgcattgcatacttgtatcaaagtatcccatgtaacccataaatatacatgcctactgtgtacccacaaaaattaaaataattttaaaaaagaaaagaaaaggatgtgagaatataaatacatttttagctggcttttagatggttcatgta

SEQ ID NO: 12340 - DNA, 1064 bp, Homo sapiens
caacttttaagttcaggggtacatgtgcaggatgtgcaggtttgttacataggtaaacttgtgccatcatggtttgctgcacggatcaacccatcacctaagtattaagcccagcatccagtagctattcttcctgatgctctcccttcccctgcccccgtgacaggccccagtgtgtgttgttcccctccatgtgtccatgtgttctcatcattcatctctcacttataagtgagaacatgcagtgtttgattttctgttcctgcattagtttgctgaggataatggcttccagctccatccatgttcctgcaaaggacatgaactcattcctttttatggctgcataatattctatagtgtatatgtatcacattttctttatccagtctgtgattaatgggcatttgggtccatgtctttggaaagcatgaacatctaaggaaaaaagttctgaaagcaatgactgtagtaaaatacagtgccttttaaagtcagacaaatttggttttggattttggctctctgttgaccttggacaatatttaacctctccaagcttcaacttttccatctctaaaatagggatgatggtagtacttcttcataggactgatgaaaagatgaagtgagtgaatacatgtaaagtgctcgccttaaccaaactgttagtgaataccaagaaatttaattggctcttaatgctccacttctctaaaatgaacctcaagtctcctattatgctgaattaagatgtagctgatggttcactctgtgacaacattgaattgttgctaggaagcatatttggaaatgacatgttctggatcattttattttctataagttcatcggaatacttattttgcttagacctttgctaaaatatttataaaatatgtccctgagaatatatattaagttaggtacttgagtctttggtggaggagcacacaattatctcaagaacatcattctgaacaccaatccttgggcaggtgttacagagacaagagatgtagaagattgtgccaaatctgtactgacttgtaacttgctctgga

SEQ ID NO: 12341 - DNA, 1027 bp, Homo sapiens
ctcatgaagctctgactcactgcagcaggcccatggcttctccatggaaagtccatagggctccccagatgctttgcttcttggtgatctgcagtgactacactattagttttccatctgttcctctatttgaaatgaatcaagtctcatcaaacaagggacaatcaaataaatgcccctgatgcacaggcatctgtgacaaaatgaggactgatttactagtgcccttgtggcttggagtctgcttgaggctagctttacttttcttcccttttctcaaaagtatttcatctatacattcttttggtccattgtttgacaattactgtatgatgagtctgaaactttgtagcatttagttacatgaggcggaaatttcatgtacgtaaaatagacatgaagttcggcctaatgaaaggaccctaattttcaagtctcagtgtccctaatctataaaatggtagtatgcccttctttacagagtttttctgaaggctaagttagtgaatggatgtaagaatacttggaaaagtataaactgctttaaaagaatggatagtctttaaaagtatcacaaatttcttcattttaatctctctattcagtcaggttcctagctcatgttagattcgtgggtacttagatattcatggaagaaaaaggccaagtgagtgtagctctaagttctactttgccctgattatttaagaagtctgatttcttgttgaagtttatcctttctccatttccctttcaggcacaatggaacctcaagccttgtcctcttagttgtctttgaagatgcaacatttggccccttatgttaaacactaagcgacctaactcagcaatgactagctctcactagctgtagtgcagccttacctgatatctttctcaggatcttctttcacttccagagtgttctttctttttatccacccagctgctcccatcccttgttgttcagctggactcccagatcagaacatctgatcattctaatccccgcacagtagttctggat

SEQ ID NO: 12342 - DNA, 1062 bp, Homo sapiens
tgtcaggcaacaaagaactcagtgaaatatgtatagatacatatgtacaggtagactcggctttgctttctgtccttacatctcggttgtgttcgtgctgaaattatgaaagcagcttgtgtgattttttttttaatgacttcattctttgctgaaaagagaatgtgtttgggtccggtgctgaagttattgtgggaaaccgtcattttgcatgctgattaactggccaaaaggagtcaagtgtgtgttactgtcctttctatgatacatatactaaatgcagctggcagattcaggactcgcacagctggtggatccacagaataattgtttgttctatgactttccaacatcttaagagctttttccctggacagctttaatttctttatgtgttagaattgcatgttcagaaaagtatgtaattccaaatgctttggtcctatgtaatactagaagtttatttgaaagtaaaaatcattgctcggaatcttatcatcaagaattaccagcttcagattgtcactcttagaactctaaaatagtaattaaatttctctgtaatatttaaggtattattttatttgaaaccattctggatgtgccatctcgtttactttgtgagcattctattgcaaagttagtaaatggatgccttaaaaatcctgccttgtgtccatatagatatgtgagctctcttgccttatttcctttagatagaaccttccttagagaaaatttattatttaaaaaaaaacttcattctgagtaaaagtatttagttgcaaatgcctttctttttcagcctgtaatatagagtactgttgagtaattaatggatataattatgttctagaagctctgaacctataaatatgttaatggatgctatttctgtcagtttagcttgacatatcagaattctttgatcaccagcagtgcagctaaaaatgcaattaatattttatctggcagaagaatgagcacaaagcaaatcatgagaaatagatcttgagtcaataacaggaaagagaataaatactgtagaccaacttaccgaat

SEQ ID NO: 12343 - DNA, 1049 bp, Homo sapiens
tcaggtggggacacagccaagccatatcactctctgttgtttctgacctttgataagaaagaagaaatgttagttattgaaccacagaagccccaccaggtactaacttactgcatttttgcttttaattatctatatatgtctgtctgggacactagacttaccctccttaagagtaaaggctgttccttgtgtttgtgtatccagtatccagtactccaagggaaagatggtgtttagtcatgagtatctgcttgtgggacacatgtggtaacctagtgtgaagtgggtgtggatgagggctggatgatgtgagaagagaatagacaggagatgatagtaatggtagcaacagctggcatttactgagcctgctgcatgactgagaacttcacttaagcctcccaacaacgctgcaagggtagaggctgctgttttccccacttatgaaaatatgagtttgcccacaatcatacagtaggaacagtttttcttactccagaaactgtgctttaaaaagtcaaagaaagaaataaccaagtttgttatggtaacattggtagaggacttgagtggtgcttccacctactgggcttccagagcagctagatacgataggtagattcatattaacctctggaggggatggggtgggaggaccaccctagagccaacaaaggaggtggggggccagactattattatcttcaccgaacaaacaagaaacagggaaggaggaaggcaagaaaagagaaaataactctgccgagatttctagcctaggagacttgcgggttggtggccaaactgacaaataggaaatagttgaaaaagagctgtcctgggaagcatttgtgaagttctgccttgcgtgtgtagaatgtgggttcatggtggaactttcaagtgtttacatcctgtgtgcaaatgaaaataaggcacaggtacagcttttactcttcaacaaatattttttaaaaacacaaggcgtcctgatactaaaaagtgatgtttccccatagttgacaggtaaaaaacactttctttct

SEQ ID NO: 12344 - DNA, 1074 bp, Homo sapiens
ccctgcaaaaggcatgatctccttcctttttatggctgcatagtattgcgtggtgtatatatactacattttctttatccagtctatcattgatcagcatgtgggttggttccatgtctttggtattgtaaatagtgctgcaataagcatacgtgtgcatgtgtctttatggtagaatgatttatattcctttgggtatatacccagtaatggtattgctgggtcaaatggtatttctgattctagatccttgaggaatcgccatactgtcttccacaatggttgaactaatttacattcccaccaacagtgtaaaagcctttctatttctccacagcctcaccagcatctattgtttcctgacttggtatcttattgcagttttgatttgcctttctctgatgatcagtgatgttgagcatttttatgtttcttggccatgtaaatgtcttcttttgacaagtgtctgttcatatcctttgcccactttttgatggggttgtctttttcttgtaaatacgtttaagttccttgtaaattctagatattagacctttgtcagatgggtagattgcaagaattttctcccattctgtaggttgcttgttcactctgatgctagtttcttttgctgtgcagaagctctttggtttaattagatcccacttgccaattttggcttttgttgcagttgcttttggtgtttttgtcatgaagtctttgcctatgcctgtgtcgtgattggtattgcctaggttttcttctagggttttcatggttttggttttacatttaagtcttttatccaccttgagttaatttttatataaggtgtgaggaaggggtccagtttcagttttccgcatatggctagccagttttcctaacaccatttactgaataggagatcctttcccttttgcttgtttttatcagatttgtagaagatcagatgattgtagatgtgtggtgttatttctgaagtatctgttctgttccattggtctatatgtctgttttggtaccagtaccatgctgttttggttactgtagccttgtagtatagtttgaaat

SEQ ID NO: 12345 - DNA, 1049 bp, Homo sapiens
aaatggattggattggattggattggattggattggatggatggatggatggatggatggatggatggatgggtggattgaatggatagatgggtgagttggtaggggggtggattggatggatggattggatagataggatgaatcaaggctgactccccattttctggcttgactacctggaatatttgaacagaattcaccaaatgtacagaatgaataatgcttttgaagaggtcatcataataagtactcatcaaataagacaatgacacataattttcttgtagcatactgaagaaggtaatgttcattgtaaattgtgcatgaaaatgccatgattatttaatagttatgttttgatatccaaaaactataaagggagtaaacattttgtgctggtctccttaaagaggctatttagtataattacaaacaaattgagattatgcaatgtatttattttaaatagattctggcacaaacttttatagtagcagaatagaaagtgaaagacttaaaagacatatctggcaacgacattgatcattatgccagtttatatttttcactgatcttttctgcatttccattaactcttatagtcttttgtgcttagagtgtttcaaaagttaaatcatcattttcaatgaaataaaaaatgtaaatagaaaatttttacttcaaatatatcctaaatataccaactccttaagtcgtgaattgtagtttcattttctaaaaaaagtcctcagtaggtttaaatcagaccaaactgaaatcatgggtggatttaaaaagtaaaacagagataacgtttcacatcggtttagaataccaagttgtggacttagaaattacaaagtaagacatctggtaagaaattttaaaataataatgaattgatatgtcttgttaaaacaatccttcagtgtggggaatttgactgtgttaggtcacagagtgagcaatagggtgaatttaaatgaatttttttacccttgcctatctctaaagaaattcccaactttgtctatcaaggagctttt

SEQ ID NO: 12346 - DNA, 1084 bp, Homo sapiens
ctctctctttttctgcctgtaaaatgagggagttagaggaggtttttaggctcaacaagtggagcaaaccttggcaatcactgcagcagaagctccctcaacttatgtatccagtggtgacttagagtcagcaggacattagtggtggcaggaattcctgagcattaatgaatgacatcattgcagccggggaggagtgaccagccattgtgtggatgtagtgggaagagtctacagttggagactagttaggggatttgaaggaaattgaagggcaatctccaaagtataatgccggagatagatctccatggaaactgtgttgtgatgaccctgcacagcactgatttgatcattgttcctatgtccaggaacacatctttcctggcacacccaggaaacaagatgtgccatctccccattgtttcctacagaggagaactactgattttgttatcttgtagtccaagaatagctgcattaaccaaaacacagaaatgagagacttcctctagaacaccagtaagatttaaatcaatttttttaaacatcactaatttaattttgtttatcaattgggtacattgaattgaagtgcaatctcatttatagttaaagaaaagaccaacacaatgactgttcaatatgcatcaccattttaaggcctaagcagacagagagagtcaatcttacaatgatatgctgaagattacatttttaattctcttttcaacggcactaatagaaatcactttggcaatacatttcttggatttacataatgacagagcatgacaagattagttatcatttttaaccactgagttttctggcacgatgcttgtcattgcatctgtgtatacaccctttgcaaagctatggtgacatcagatgcgtacattttctaagccaaagaaataaacaccttcctgggccatgtggtgactttttttttttttacagtgagcaaaaattcaagcccattataaatgactaaacaatattttgagatttaaaagggccattacacaaagatgtcataaagcaagcattttctttaaaattggcatataggcttttactt

SEQ ID NO: 12347 - DNA, 1040 bp, Homo sapiens
tacatgtaaaaatattatcaaaagacctgtccacacttcatgctcaataaatttgagttattatattacgtagacttaatattattaccataattgaggcttgacataatatgcagcctttaatataaaatcacttttataagagattccactcttctttaagcctcaattagtctagcgatgtttctttttaagaatgaatttcctaatgctgccttttttgctgcatttttataacactcttcctaccattcacaaaacaaatgtttattcctgtccatctatggagggaagttatctgtttctgaagttatcttcccacactgatctaattctttccctttttaaaatatcttgtttattttaaaatatcttaaaatatcttgttcctcacaaatcattccatcatagatctgtatactaagaaaatgaatacctctgtattttgactcttgtttccttctttaaagtacagttcagaggggtgattttaatttttaagccctaatcaatctgagctgttgttactgtagaaaccacatttctcatcctgaaacatgacagcagtgatcgcccctgacagttcatagacctgaatttcagacaatcaaaggcaaagcaatttggaggtctgatcatttagaattttcacagtttcaaggaagcacagtacaggttctcttccaatttgtcagaagcaaggaaaagcgcatagttggagagctgagtgccagctttcagccctaggtatcagtgccaaacacatttttattattctctggaaaataaggttgtaaaaaagtaattgctgacacaaccttaatgatagcactttaaggatgctgctgtaattaaaataggaattttattaaactagacctctgagagcctaacatacgtagcattccgatctcaggatttacaaagcaagcaactttgattcctgctgcttttgctgtgtgggccccacatttcctttttgcctctcctagttgcagcgtacgtagaaaaccacctctctcctgaaaaaagcaataagc

SEQ ID NO: 12348 - DNA, 1062 bp, Homo sapiens
acggctgcttgtttgtcttaagaagtagacatctcttccaatcaggaaaggctgctgtttctgtggtacattgaaaagtttcattttctaaatgctacctgttcttatgacagagaggtatgtactgttctttttttcaataagaatttaattcttacattgactatttttcctcctacttttgctagtcattaactgcctacaattaactactggttttaattgtcaaaaatagataataaatttgactgacattctctattttttattacctcatcatgtctcatttgcccttttcttctctcagcttgccattttatatgatcatctagggaaggagcagccacttcctcaaatgttgttttctatttcctgttctatctctcacttgaaacaactttgcaatgcacttttttttttaacatttttctgagtaaatgagtgtattatgatacaccagaaatagccatagatccttcttatccaaatagtgtaaatctgtttatcacttcctttccaattaacctttcttcaagatgatcctggaagtgctgttgttgtttttacttgactttataatcaccttcctgtagtaatccattctacttcttgaggtgctggtagtcttgtcaggatgcccttgtgggtggcatagctgcgtgtagcaatttatactggttccttgaagattacaagcaaatatttctgtttggtatcagtttctctccgttttcctaaggaaactattttattactagttcatttgtaacaaaatatcccaacttctttgaaagaaagatgagttgaggtggcttccagtaaaaatgcaaatataacagcacagttaatgtcagaaagaaacaccagacctctcagagaggaaactttatggagttttcagtactaaacctcagagaaactggcagccctcataaatcaaaggcaagaggtatgaaaataaagtaatactagagcagggaaataacctagttactgtataaagcagagaagaaaaaggtacagtggtgtataattctacactttagtattgtgagctgttga

SEQ ID NO: 12349 - DNA, 1042 bp, Homo sapiens
tgtatataattattatccggttttaggtggtacttaagttctttgtccaggatgagaagattcatttgtgtacatcatcattatccctcctgacatgtgctttggtgacattaatctatgttttatttcctgcagctgtaatgatggggttgtcttccgtggctttattatgttgtcatgtttttttcagtgatcgtcctcacagtacaaaagaaatatctcatgtggggataaactccaaaatagctgacatttaacagtcatactggcaagcatctagttttctttcccttcattctttgtccctgtcaagctgagtcctggggaattatcattgactgtggtcagaacagtagttgtttgtaattttacatggaaaacatgtctgaggtggagcttgtttcttaagactagataacttgtacaggagtaggctagatggaacatcaattcaaaccggcaaatgactagctgattttgagggaagcttggaagaaagaatggattgcaagggtgtctgatttctagctgtagttgcagccagtggcctttgtagtttagagggtcagaatctaaatctgatagtggaagttcaaaggaaaacaaatgcaccaggtccttgctttaaggacagcaaggattagcttagcagtagagatctaataatccaattttaaattataaattttttataaaaattataattctttataaaagtgttgcaatttataattgtatcacttttatttgcattttcagtaacagaacaaactatgtgggcatggcttctgtaaacagaatatcaagactatgatgatcagtgactgctctgtacttcagctcaatagcccctgcaaacagcctcatatacaaaacacattaagcacagggaatgatgaaatgaaatcaaccagtattgtttattaatttgttagatgttttaataaagccaatccccagggcagaatcaatctgcgtaaccactgcacattgtatatgctccgattaaggcatttaatacattaccttgcagttgtgtgtg

SEQ ID NO: 12350 - DNA, 1117 bp, Homo sapiens
catatgttcagctttgatagatattgccaaatagttttcaaaaatggctataccaatttatacacccttcccctacctaagaaggtttctgattatctgttttaaaaccttcatgcagcctcctattttgaattaagttatacagctttctctccaatacctgtatcttctacctcagtgatgcttcacttcagtttgccttggacagactctggatataccaaattcatacctattgttcttgcataattattattagtgctcctttcattttcaatttgtcctaggttagagggagatgaaaaaaattctaaaattagattgtggagatgtttgcagaactctatgagtgtaataagaaaacattgtgtatactttgcttgggtaatttttttggtatatgaactgtatctcaataaagctgttttgatgattttttctagtttggatgataaattatgtggtcattctacttaatcaatttctaccatttgcaaataagttactttaaaaaggacagaaagaaagatacctaaataagcctcactgcttcatttggaaaaacaaaaacagacttcccctggcacagtttttgaagcattttctagcaagagatgccattgaaagcaagggaaaattgattgtgctaccccaatcaattaagctactcttttgaaaggggaacccttccactgggattgagtttgttttataatttaccaaaaattaagacaacttttaaagtaagtgtaccttataaatgttaccacgagacagaatatttaattaaaactgtggtatcgccgttacctgctgggtaacaaactcccctagaactcagtggtgaacaataatcattttatcatgctcttggcctttatgggtcagggattcagatggagcacagcagacagtttgcctgctccacgctgtcttgggcctcagcttagtgttagctgaaacctcagctcaactgtaggtattctagcacatgcaggtattctagttgagccagaatacctacatgtggcttctctgcatgggctagtttgagctttctcacagtatgacagctgggttccaagatagagtattccaagagggcaaagcggcagtg

SEQ ID NO: 12351 - DNA, 1075 bp, Homo sapiens
ggaaaccacgattatgcatgtcagggtgttttggacttgagtactcatggtaacataaagatataacagttatgaagatctttagtcatccatagctttccacatttttgctgtgatacaaaatatttagctccattttcatagcactcattaatggtaaatctaaaaaacaatgttaaataaaattttctaaatttgctaacttgtctctaccaagtttataattttactatatatactagaaaagggctaggttgattttttttctttaaatagaatttatattttggagtagctttggttcataacaaaattgatcagaaagcacagagttcccatgtatccctaacctccctatagatatacaacattctccattatcaacatcctccaccaaagtggtacagttgttacaattgaggaacctatactgacatatcattatctcccaaagtccatagtttatgttaaggttcactcttggtgttgtatgttctatagattttgagaaatgtataatgacgtatgcaccattatggtatcacacagaataatcccagtgtcctaaaaatcctttgtgcttcacctatttatccacccctccttctgattactagcaacccctgttttttttttttaattgtctccctagtttttccttttcccaaatgtcatacagttagaatcatactatgtagtctttttggattggcttctttcacttagtaatagcattgaattttccttcatttcttttcatggcttggtagctcattttttttggtgctaaataatattccagtatctgaatgtaccatagtttagttatctagtcacctactgaaagacatattggttgcttccaaattttggcaattatgaacaaagctgacataaacatccatgtgcaggtttgtacatggacataatttttaatacctttaggtaaataccaatgagcatgattgctggactgaatactaagagagaatatttagttgtctaagaaactgccaaattgtcttcccaagtagctgtaccattttgcattcccatcagcaatgaatgagagttc

SEQ ID NO: 12352 - DNA, 1049 bp, Homo sapiens
tttaggataagactgttaaagttcatgagataatgaatgaacaagacaaggtgacctaacaatgatatattatcactctttatttaataattgtgtcattttacaaatgcttattaaatgcctacattgtatgaggcactgtgctaggtgaagaaaatataaaacatggttcctatctttatgtgtcttactaccaattctgatgggtttgacttttatagcatacatacagggtatgtatacatgaaatgtaatatatcttagaatgtacaaaggctgctaatgtgtaagctgagataattttagaaagagtttaacacctgaaggaatggtggaacgtttggtaaatcatgcagaacatggaacagtttttcccactggggaacagtaatccccagtgttggaggtgggtcctggtgggaggtgattggatcatgggggaaaaattctcatgaatggtttagcaccatctcagtgctaatctcatgatagtgagtgagtgaattatcacaacatctggttgtttaaaaatgtgtagcacctgccgcgtctctctctctcttccttctgctccggccatgtgaagtgctagctctcccttcgccttcttccatgattgtaagtttcctgaggcctccccagaagcagaagctgctatgctttctgtacatcctgcataaccataagccagttaaacctcttttctttataaattactcagtctcaggtatttctttatagcaatgcaagaatggactaatacaccatatcatgaaacataagtcttcagaagttaaaaaaaaaatctaaaacctgccagatataaaaagaatcagcactgtggtatatgaactatatattaatggaagcaatgcataatcataagattgtcgtcaacagacacttgttgtgcaacaattatgtaaatgtactggggcagaatcgatggataagtccaaagccctggcctgaaaaacaaatacacattccattttaaaagatgctgggtatattttcttctgaaaaggattggtactttgactaatagc

SEQ ID NO: 12353 - DNA, 1067 bp, Homo sapiens
tgacctttattttctcccctacctgtcccctgcctctgcagtctcccttctccaccctaacatcatcactccaatctgccctccattttctcctctcccaggctttggttccagttatttcttcttcctggagtacctcccctctcacactcatttctgcttatgaaagctcttctttttcttcaagcttagctcaaatcctacctcttccaaaaagccttctcggttcccctagttgaaataagtcttcttccctcttccaggttcctttagcacttactatctctcttataacttgtttcatagtcatccttatttcagatttatttgtgtgtgtatgtcctgcaggaacatggagtgtaggaatctcacttccatcccactccatagcagccagcccagtcctcagcccatctattcagtgggtgctcagtctgtctttgtttaatcacttgaatttgaatgtgagaagggacttcagaacagccattcatatccctttgtaaagagttctgaactcttgcttaatcattgttgactgactcctctacatggcaaagcagaggaaaccttatgtctttcttgagttaaaattaccataccttgttataattctctatttctgtaatgttggcccacagtatagaatgatcaaattattttaattccgcatcacttctttcattttccatccattgtttctgttgtgactcctttcactcattttttaattttatttttaacttaaaatgaatttataagcatagtcccattccattttctaatctgactttctgccagatatgttttatgtgtgggataagaggaaagaatgaatatgtggggtgtatgtggaatgctattttctgcctcacagacttggaaagacatttcccattataaaaaatgtgcaaattagagaatttccagaaatataagtgtgtgttctgtgagcaataatgctaagtaagaggtaatgtgtaattaacttttgatttttggctgcaatcacttttgtggagaaagatcactgattatggctgtgtttaataaggtgaaatagaatc

SEQ ID NO: 12354 - DNA, 1049 bp, Homo sapiens
tctttttctgtagcgtttctgtccactgggcctttttctttaaaggaactctgtttaccattcattagatagtccatttggagaaatatgtgcagaaattaataaatgaaaggaaaaaagtgaaaactccctttagtcctccttttattacttacctgagacacctggtatttgaaagagaggaaaaaaaaaaaacagaagagtaacagaaattctacctgaaaacctgacttcaagtattgagctgctgactggtgagaactagagatattttcctcattcacctcaccacttacttggaaattgtgtttctagggaacacagattaaatgaaccttaggaaacattaacaaaagtatgtttgatttttaagggtctgcctatataaatgtacaggtcggttaatcagttcagcagtctttggggattcatttgactaatctttggttaatatgaatgcttatacatatcatgtcatgttcccactattttccatggctggtgttttcctcctgtgcctttgctctattccaattttattataaaatccaattataagttggaaacaatgtagtctgtgtttcttagtactagccattgaatccttataaataattttaaaataaataaagagtccatcactctgtcttcatcctctggttatgcctgcaatctctctgctcccatacccacatgttgaggagtgacagggatctcccaatcatgatattgaccaatgtgagtgttgaccaatgaactcaacgtcaagacattttacctctactacatcctccatttagcatggtgtatttcttttgaatccattgttaatttcctgtcactttaattaacatggctgtatttgacattatcctaaagttttcacccatccccccaactccctttttttagcagatcttaccacccacaatcctagtgaggttcttgggctccatctgctccttcctttgtgcactcagttctcttaaacacatcggtcctttgctccttcccttctttgcatggctggtcattctacatctggctgt

SEQ ID NO: 12355 - DNA, 1071 bp, Homo sapiens
cacgcatttaggtgataaaggtgataaataaacattattttcccctttaactactgtactgttgcttgagattttacagtacacaggttaggcaatgtattcttgtcagtactgattatttttctttgttttgcgaggatttggcttttattttttattgaaaaatggatcctagcaatttgtggcggattattattacttggttttacaaagccataactggtgtgtatgcatgtgtttggattcacacttacatcttgaacaaggaaacattagaaaggtatttcaaaatcacagtaaaaaatacatattagaattcacaaaaagaaatcactggtctaaacacggtatgcctgaggcatagcgttaatttcccctgttttgccataattggatctgttacctggtgtactgccatttcatcaactgtttgtgaaaatctctatttagagaaaacccttgtctgtttagctcatccgccaccatcatgactgcctcccatgcatttgtaggttggtctttgaagcatatgttctgaagcggctgattgccttcctcagctgtaacctctgggtcttaattaagggaacattgtatttttctgacctaaatggtattatagcatgtgcagttgttaaactagtggagttttctgtattttcagaggctaataaggaggcagaaactctgaaagttgctctgtcttgattctcacctccatggaagactccaaaactgtgaccttaagctttctccctaagtaggggagtgtgattcttagctcttggggcagggctttagggcactttcagtgagcgcttatagctctttcatgaaaagagcattgacacataccgagtgcctcctgggtggtgggtgcccatctaagtgcttcccatgcattgattcatgccatcttcccgacaacactgtgaatttctaactgtttattattgttcacattttatagataagaaaatggaatcacagcaaatataagcaacatacccaggagcacgcagctggcaaacagctgagctagcacttggactcaggcaaactggctcccga

SEQ ID NO: 12356 - DNA, 1875 bp, Homo sapiens
aacatgcagtgaagaacttaaaatactctttaaatacatgggatgcaattttaagattatggtagacggagaaaaccctctttacattaaatttagtaaatctgagaaatgtgttggagatcaccagaaaatagataataaaatttggaacatttgtaaggaaacaaatattttctagcttaaccagacaaacaaaaatgtctaatcttatttattttataaagatgtattcctactgctatatgatgtttatcttatattgaacacagttaattttaacaaagcaatggaaatacaagtgattttgttttagaatatcaggcctctaggtagggtaaatgcctttcaatcctaggcaaaagagtataatacaagaaatttgttttgtattaagatttttttttcctattagaggcttcagttcctggactttcttggctgtttttttcttattgtgcctcctttaatatttttgcaaaaagtggagaagaaaaaatatttgaataatcgtttttttaacccccctaagaaacctgttggaatatgagattttgaagtaatggtagatacattttgcatttaaaaaaataatacttctaatattttttatttggaggttttatttgggttttctttttttaaacatgaaaggcactttacagcacactggtggcttctgaaaggggttgctggaaggcgaagtgctgagactgttgtctgtacaaactcaggacttcccaggagagctgaattctacatgcctaaacctgattaggcataaactgtgtgtgggcggaagggagcatgaacaccaggttcttctctcaaattctccagataggagcatcccagccccttagggcttggctttcctgctgtactccagcctcagggagttgatgtacagatacctccgtgttatttgcaggggccccaacctaaaatagcatgtgggactttttgtccactaattttgaactttttttaaaaacatacttgccattttcctttttattaggctttctgatacaatcattttatatttagggtagaggtgggcatacttaggacccataggctccacaatatgcaccattctgtgtgtgcccacacatgcgtgcatgcacatgcccagagtgccactagcccacctgcccttgcccccaacaaaagcatgcttcagcccttctcaaggaccagccaggtgccttctggcatgatgagtttctcacagagacctcctgtgagaagaatattctgaatgcacttcctctccctttgcttccaattttggctgagtgttaataggtgctcagcaacctgaagggagaactatattttcttcctcgtctcatccccaatgtctaactcagtgtctggctgtcactcattatatttgtttaggcagcagcaggaagtaatcctgaaagcaattctgaaaagtcaggcttgaggcctcacaagttcattgcccagcatacaagacataggccccaccctgtttaatatctttcttctcaacagatagcctcacatgcaaaagctacacagttaggagatctgtgccaaatctggaatttgcagtggctgatgacagacagcagtgtcgattccgtcactctgcttgattcccacccacgtctgatgcctgctgagaacacactctgtgtgattccaccctgtttccgtctcactcgcctttgtcaccatacactcttcttttctaaagctagctggctctttgtctagacagctccctccctcatctccagatggctttgtctgggaagcctacagtcttttccactaccaccccaagatgcagaggcaattaaatcaggctaactctcatggtgttactccagttaataggca

SEQ ID NO: 12357 - DNA, 1061 bp, Homo sapiens
tctctgtgaatctgccgtgattctgagggctgcccaatttgtgaatcattcattgctcaattaaactcctttaaatttaatttggctgaagttcttttatcaatggccatgattgattgaatcattagccacacgactgaactcaatcattagaccttttcctctccccacaagtagggctaatatcacctgactcaaagccccaaccctttaatcacataattggtctttctagcttggcagcccccatcctgaaattatctaggggcctaccatgagtagcttcattagctactcatttagctactcatattgtggaacctacgtgtggtctgagaatctaccagaaataatggagacttctatcaatttagaaattccaagggcttagaagctttcatcccaggaacctgggatgaggaccagacacattatttatacaacaaacagaaacttaaaaactgtttggtttataaattttattataggaatgctggcccagagataggaatatagcaactaattgaggccaaaaagtcctatgaagaaaatcttcacagtcaaagcacaagttcatctctttgttagagaggtagctgctgaggatacaagagaacaataaatgaaatgtgtttaactcatgtttctgattcaagccttttctggaagacatggcattgtagacacatttaaatcactgaggataaagttgatgtcacccattccttggctcgagggctttggcaattcccctttcattacctcatagaagaaggaagatctttgctaatgaagttctttctggtgtctcctgggcacagggtaaatctcacaacagatatttgttcagttgcttactgtgtctcctccatcatcgtccacgatccctgtaggatttttcaagtttaaacaagcacttacttgtgtttgatatctagttaaaaagctaaataaatagcttggttggaaaagaagaaaaacattgcacagagagttaaatattccatggtagacagaacttgatcatttcacaagtatttttcacttgctatttttactgt

SEQ ID NO: 12358 - DNA, 1029 bp, Homo sapiens
catgtgtttatactcattttgtttactgtcagtatctctcctctagaacataagtcctttgatgccctttctgtctcttttgttaactggtatatttctggctacttagaatagtacctggcacacagaaggtattcaacaaaaaaattgctgaataaataaatgagtaaactgcatgatttattctttagaaaaatcactttggcagcactgcgggaaacatttggaatgtggcctcaagcaggactgttaggagattgttgcaatagtcccgctgaagttgacggtggaggtgtagatgagaagactcagctaacgggtgagttactcaggaggtagaactaagagaacttgtaatgtgattgtctatagggcttaaaggagaatggtcactcccaggttcctggtgtaggcactgacagaaagatagggttattttctgaggtaagaaacatacaaagaaaagtagactttgggtctgggttggaggtactgagttcagtgttggtcatgtttagcttcaggtagcagaatgacatccaaatcaagatgtctacttggtggtgactgagagggggctgtctaggctggatcttcaacttagacgtgaacctaaagctgtagaaatggatggtgttgttcaagtagaaggtgtagacgcagaagatgagaacaaggagtattgagagaagaaaatagaaacaggaaatcaaaataagcagtgaaaagtttactgcacttccaaaaaactcttgaattccttattgttatgtttgtcattacattacagaactttaaaacaaatatgtagttcagattctagctctgaagctgtagtcttggtaacttaacctccttattccttctttttcttcatctctaagatgggtccaattataatccctacctttattatagatatgttgtgagggctagatgaaatacatgtaaagcctttagtattagaatgtgcattcaataattgttcactcatttttaattattaagtttaaactttcattattttta

SEQ ID NO: 12359 - DNA, 1046 bp, Homo sapiens
atacaaaaaataaataaatggaggagaagaagcagtatctcctacagaattccaaacaattgatgcagatacttcactctcaagaaagtggtaattttccactccttaaagtgtaggttatgcatagtgactttgtttcagagtatagtgtggaaagggcaaggaagcgactttatggtagttactcacagccagatgatcaagacatcagcagtgataagcactattgctattatgtatgatgtgataaagataacacttcacctctgtggtcttccttcccaaaatacataactccagtctcataatgagaaaaacgtcagacaaattttaattgatggcattttacaaagataaatactcctcaaatctgttaaggtcattaaaaccaacggaaatctcagaaattgttagagccaagaggaccgtaaggaaacatgacagctaatgaaatatgttttcttggatggggtcctagaacagaaaataatattaggtaaaatgaagacaattgaataaagtatggactttagttaataatgatgtatcaatattggtcctttagttgtagcaaatgtgcacttagaacgtgtagtaataggggaaactctctgggttgatataagtggagcgatgaaacaaataggtgaaactgtaatatttgtaatttttgcaatttttgtaatttttctataaatctaaaactgctgaaatacattttattttagaaaaatcaatgtaagtatacctactcatgtgttcatttgtagaattattagccgaaccattttttccagtttcaataatttctgctgaataaaacttttggtattcatgctactcagtttatttctggaatacagcaattctttgatttctccttataaatatatgcaagaacaacagtgtcctttagttgttagaatcttatatagtccatatattcttcagcacccatgttattcattgtctttttacaacctgctatttaaggacaaaatacatagagtcacaaatggaaagtaaagaagaaccatctctttcat

SEQ ID NO: 12360 - DNA, 1092 bp, Homo sapiens
catattgcaaactctagaaccaccactaaaaaagttaaaagaaatataattgagatgctcagagagtagataacatgttatataaaacgctcaattaaaacgggagaaagaagaacaagaggggagaattaaagcaagagaaggcaaaataagaaaaaaatatataaaacataggaaacctagagtcgtaggcaaatccttattgtctacaagaagcccactttaaatataaagcatcaagttaagagtaaagggatggagaattatacagtatgttaacaccaatcaaaagaaagctggagtcactatcttaattttagacaaagcagacttcagtacaagggaaattatcagggataaatagggacattaagactgataaaagtatcagttctccaggaagacataatcataaaaacatatgcaccaaacaacagagaatcagaatacatgaggcaaaaactgatgaacttgcaaagaggcacaatttcaaaataacaaattgactattgtagctgtggacttcaacacccctctttcactagttgatagatcaagccagcagaaaatcagtaaggacgtagttgacttgaatagcattatcagtcagcttgatctaattgacatgtataaaacactccatccaacaatagcagaatccacattttcaagcttgcatggaaattcaccaagatagatcacatcctgggccataaaacataccttaacaaattttaaagaatagaaattatacaaagtatgtactcagactgcagtgaaattaaactataagtcaataacagaaagatatttggaaaatgccaaaatatttacagattaaacagcacccttcacaataacacatgactgaagaggtcacaagataaatttaagagtattttgaatagcctgtagtctcagctacttgggaggctgaggcaggaggatttcttgagcccaggagtttgagtctagcctgaacaacatagtgagacccaggcacttgaaaaattttttgaataaaataaaatttaaaatataacttataaaaaattgtgagtttaactcctgtcttgccatatactagcagta

SEQ ID NO: 12361 - DNA, 1026 bp, Homo sapiens
acaacaggagagatgaaaaaaaaaaaaaaaaaagacactagaggactttgaaacctctgacaaccacatttatagcaaacattatatacaacccaatcttagacagataagcctcaagctgaagtcctttttgcctcatttcctgttatctgatacatcatgtctagctttcaacagaaaattacacagatgaggctgggcacatggctcatgcctataattctagcactttgggaagccaaggtggacagatgacttgaggctagaagttcaagagcatcctgggcaacatggtaaaaccccatctatacaaaaaataagaagattagcctggcatggtggtgcatggctgtagtcccagctacttaggaggctgaggtgggaggatcacttgagcccaggaggtcaagactgcagtaagctgtgatcacatcattgcattccagcttgggcaacagagtaagtaagaccctgtctcaacaaagcatgctaacaggcaaggaaaaacagcctgtagatacaaagcaagcgtcagaaccagactcagatgtgacgcagattttggaattatcacacagggaatttcggtagctatgattcatatgttaagggctctaatagaaaaagtagataacatgcaagaacagaggggtgatgtaagtggagcgatgaaagagctaagaaaagatcaaaaggaaaagctagacattagaaacacagtaacagaaatgaagaatgcctctgaagggtcactcagaagacttaacacgatttttaaaagtctcagtaatcttgaagataggtcaatagaaacttcccaaactgaaatgcaaaaataaaagaatgggaaaaaaaagagccaggcatggtggctcacacctgtgatcccagcactttgggaggccgaggcaggaggattgcttgagcccaagagttccagaccagcctgggcaacatagtgagaccctgtttctaaaaaaataaaaaaaattagccaggcgtggtggcatatgcccgtggtcccag

SEQ ID NO: 12362 - DNA, 1068 bp, Homo sapiens
ggaagtttatagagtacagttcaattgcctctccataattaattgaaagctctccaaagggatggcatttgaaagatgttttggaggcagatagaaattgttggttagacacattagcagatacacaataagagtaagtgattagatagtagtagcagctaatatttttcctgttatttagctagaaaaaatgaagattcggagaaatatagctaaatcttaacatgatctgtttcatagaaacatggtattctttgatttttatgtgatatggtcctagatattatgtgatatggccctattagattgaacacatgtggtattccttttgccctgtagtacttacctaatttatttataaaatactgtgctagaccctgagaagagaaagagatgtacaagacagagttagagttgcttccctcgagaggtccttgcctagttcgaggtgacaataaacatgtgaaaagagtaatgcctgacagaaatttgtgctgtcatatgatctgtcactctgtgagctgtagcaaagattttgaaatcaagaaagagaaatctttgagctcctgaatgtggaacaacttaatgggagggaagaagaaaaattgggggctttgaaaggagaacagcgtgagaaaaattatgagtgcaggaaggtgtaagacaaatgaacaggggaatgagtgttcagtgtagcaggtgtgatgatctgttaccaaaatatctcacactatgaccaaggattaacaaaaagtataagtagatggaaccatgatatataattatatcttctctctctgtttttctttttggtgtctttactctgaatcctcttttgcatttttaggcttctccttgtgctttcatatgtacattaattatttagatagttctgtattacacttttccttggtgatggttaataccctttgccattatctttatgacttctagttggttttaatattcacttacttaatcttctctttcttgatttacaattttgctttatttcttcataacttggtcaaaattttcattcaattaacaaaaagtgtgtttgaatag

SEQ ID NO: 12363 - DNA, 1234 bp, Homo sapiens
ctctgccttgggccaaattatttcctccatccctccctttggagcctgctcccttctgtccttaggtttgtgccagccagtagcctcgtaggtgcattagaaattaccctcagatgaaggctgtcaatgtgacttttaaaatgtttattttttatttttttgagacaagatctcgctttgttgcctaggctggagtgcagtggcatgatcacagctcactgtagccttgacttcccagatttcagcgatctctcacttcagcccctcccctacacacctttataccactccggtagctgggactatagatgtgcaccaccacacccagctaatgtttttaattttttgtagagacgggtctcactatgttgccctggctggtcttgaactgctaggctcaagtgatcctcctgcctcagcctcacaaagtgctggtattacaggcttgagctaccatgcctcgcctggcttttttgtttaatgttggtgcctagcagcctacttgactggacacaggcagctgttgggaaagtggtttttcacttgcctttgatgcttgtatttttttctgacttgtttctggatgtctctttctacccctttccctatatatttatttacgcttactgtgtcaggtccttaagaaaactggtactgtctttcccattaagatgtattaaaagcattgatgctacctaatccaatcctcacctttgaaaagccaaggagctggtatgtggatattatgcatggaagttcagggcaatggagatttaaggtttaacgggcagattagatgattggattccttttctgtacttggtcaaagagtcttatttaaatgtgatgtaagtcactagtctttaccattggtgtagttgttaagtatactttcaggtcttccttgttctgttttaatgctgatttaccatttactaactctgtgactctgggcaagatggataatctttttgtgtggcagttttcttagctgggtttgataatgatacctacctcccaggaaggtcgtgaggaatctcttcttccacgagtgagaatgcctagtgcagtgcctggcactcagtgggcactcagcaacgacaagtgcaatcacacagcagtggccatggttggtgttccacaggctgcctgtgtttgaatcctggctctgatacttctagtcctggtagcttgacttcatttttctcttactataaaatttctatgcaaatag

SEQ ID NO: 12364 - DNA, 1270 bp, Homo sapiens
gcatatttataggtatctttagaaaaacagttttctgtgatcaagtaaattggataaatactaggtaaacaaaattaggcagccttctttttttttcccagattattctgagcctttaccatgtgaatgtgtattttgagtctctgcagggggttatggaatggaagttttctcaaatataatggaccacagaaccccctttgtgttacatttgttataattcctgaagaaaatctttagaactttttgggaaaaagttgctttaatgtggtagcctctcaggctatcaatatgtatgggattatttgcctctattttgaattaccccagactgctgctgaatttttgtctccttttaaaatacattttctacatattcttgttttctgcagttttcatttgtcattgtgagtgctttggtttctcctaactgcctgataccatccccttagcccccaccagttatgatacaggtgctcatataatttatcattcaaaccagaatacttttggaagtgaaagagaactttgttaatagttatgctggagtagtagctgtaaactgtgactctccagggcaaactgaaattgtcacagctaatataaaatctaatacaaactcatataaatagtagaagcgttttattggcttacgtaaatgaaaagtttagaggctgactgggtgctgttatggcttgatcagggatctggattcatttacctgtctccatgtgtacagattatctttgggctggtctccatcatggtacaaaataattgcagtatttttaagttttacatcttgccagccagtttgcacagtttgtcagcagaaaagagagcatctttgtcccagaattcttagtagaaatcttgagcttgcgctgattggacaaactcctaaaccaatcgccaaggcctgaagaattccaagtccttattggtttggatatattgcagcaattagtgaggaatggagatgggattactctgctattaccatggttgacagaaaatatccctggaggtgggactctatcccatccagataaaatggctgctacatgttggaggctggatagaatggatattgggcagacaaccacattctctaatatacatcccttctttatttgtttcctcagctctgtaggagacttggcaaccagctatccaagttaactagaattccctgtaaaataacaacaagtgttcaaaaggccctcctgtaatgaatgtgcatgaatactggatttgtcacatctatttg

SEQ ID NO: 12365 - DNA, 1031 bp, Homo sapiens
gaatttttgtgtctcagtgctttaaattctcaagcgtttggaatttctatcttttttagagaaaggaaccattttatttcttacattttacacaagcacaggctatgaagcagagtgtttttctctctcaaagaacagtgtcagtgcatcttaagcaaatatatagacagctaaaactactgcagtacaaatgacatgaaggactttaggcatccccataacccagagttacatggtttcagattaagtaaatgctattgtgtccttaaatccttgcttcagccacctgagaggtctgcagaagcagatgacagtgatggtgctggaggtggggccaaagctaggacttgtcattaaccagcagggccatttctacttcacactctattctaatgctactttcttgttgtctctcatgtggggataatatttctgatttcatgccaactgctcagttttcagctgctgaggattctgctgagtgatgcatcatgtatccctcctcctgtagaaattcaagggaaattgctctctcaccatcacaacatggttgaagcccttaagccggattgtttacactctgcctccatcgcaggattatttgtttccttccttgcatcgctttgggtatttgatgctctattcgaatcattccttttccctccctcctcactctctccatttcagatgctcaacatggaattcctgtcagaagtctttttagagtgcttctccaaagctctgaggacttcctgaattataagagttcaccaggcccaagttgtagtgaagatgccagtctgtctgctatagcaggatttattttaaagcatctctgaagctttttgttttattctgctcagagtcaagagaacccctcttggggacagtgaaatatacttaggcacgtttctcctgagcacatgtttatattttagcgtgaaagagccccctaagcttgctaagaatttatatagcaaagattgcaatttctcaagtcccttgtaaagtcattatggttcatatgacct

SEQ ID NO: 12366 - DNA, 1093 bp, Homo sapiens
tatgatccagcaacccccaccattggatatatatccaaaggagaggaaatcagtatatggaacagatagctatagagtatatggaagagatcagcgtatgagagaacactcccatgttgattgcagcattattcacaatagctaagatagggaatcaacctaagtatctatcaacagatgaatggatgaagaaaatgtggtacatacacaccatggaatactattgagccataaaacgaataaaatgctgtctttcacagcaacatggatgagtctggaggatatcatgttgagtgaaataagccaggaccagaaaaataaatacagcatgttctcactcatatgcagaaactaaaaaagttgatctcatagaagtagatactagaatagtggttactagaggttgggaaggaaaagggaatggggggatagggagagattggttgaaggatataaaataacagctaggagaaagtataaatgggaggaataaattctagtgttctgtagcacagtgggatgaatataattgacaatagtttattatatatctttggatagctagaagagaggatttggaatgtttcttgcacaagaaaatgataagtgtttgagatgatgggtattaattgctctgatttgatcattatacattgtatgtatcaaaacattactatgtaccccataaatatgtacaattatgtgtcaattaaataaaaaataaattgtagtatatccatacaacaaacactactcagtaattaaaaaattaactattgatatatgatacaacagagatgaatctgaaaataattatgctgaattaaacaaggttgacctcctcaaaaagaatgtttactgcatgatctcatttgcctaaaatttcaagaaatgcaaacagatctttttgttgttgttgggggacaggaagaaggagggatggaaggtgggatgtggtgggagaaaagagaccaacaaaaagtaaataaggaaatttttgagagtgatgaagcacatattttacatattggatatccaattccatcttgattgtggtgatggtttcttgggtgtatatatgtccaagagctta

SEQ ID NO: 12367 - DNA, 1045 bp, Homo sapiens
taggaaattattttgtcataaaataaggctctgtgatgggttcttaaagagattatattattcaaaagaaaggggtcaccatttttctggggcttctgaggagttgtttcctctgtaatagattgaccatgagatatgagatcatcttagaaatatgtttttctgctttcaacagcacttgagggcatgttaacatgtgtgagactacagtcagctaaacaggccatcaggataatgaagaagaggaaggattacagagagccgaaaagctggaaagccagcttcaatagaaataatgacaggagctaacatttattgattacttactaggtaacaggcattgttctaagggcctacgtgttttaactcaatccttaggacaaccttttgagggaggagatacggttattaacctcatttaggaaacctttgtaggggagtgaatagaaaatgggacactatggaagtcaaaagtaaggaagtagaaaacaagcttgagaaaaaattttcccaacaaaaggctgaaaatgtagaatatgagaactatggggaaaattatagcagcttttaatggtgttatctttgaatggtaagattaggcatgacatttgttttcttctttatgtttttcaatgttttaaaataagaactttttgaaaaatgcttttttttaaacaaagagcatagttgacagagagcatctaaggttttcaataaataatcttaaataattcaatgaaaattaaattgcattacaggcagtattcagggagtagacaagagtgaagcagccccgacagggagttaacctcctaattgggaaaatagagcagagagattcatgctgctgaagaagcactgtgactatgcaccttcactcctccaactcaaaaagaagaagaagaaaaaaagcccgaggaaaatgaacaccactggctagttaggagtattttgagaattcactttaaagtgctgagaaagcactgttatacatgataattaaaagttagttaataatttatgcttttaattttaataaattatt

SEQ ID NO: 12368 - DNA, 1074 bp, Homo sapiens
gcttttcaaccagaggcaactccccaacatcttgcacccccaaggtatatttggtaatgtctagagacatttttggttgtcgcaactgagcatgtgactgcatttagtgggtaggagtcagagatgctgttaaatgtcctatagtgcaaaggaaagtccctttccccatcaacaaagaattatctggcccaaaatgtcagtagtgctgaggttgagaattcctggtatagatattcagaaagaagtaggggaaaaaattaggaacaaaaactccttttaggttaatttgatttgaaatattagaatgaataagtatttaacaacattaaagagggtctattattgtaggtaagagtaaggaaattagagacagttggggaagaagcataaaggcaatagattttcctaggcattttaacaaatatttgttgagtgactacacatcctttctggaacaagatgaggggagaataaatgtatatatacaaacatatacaaatattgaattctgttcatgtgcgaagcttctacagggaaaagaaaaataaataactatgatttcctgtcttcaaaaagcctgcaggctagtagaagatggcatgagaaatatactatcttctaagacaacgaaaagcctatagatttcaaaggaaaatataccatgtctggtggggaaaattaggaaaggctttatggagagcatcctgtctgaagtgtatccctaaccatggacaggacagcagtccgtggagatgttggaagggcatacaaaacaaagggaacagcatggcccaaggcacggaggagggaagatacagggtatgtttggagtctttaataatcaagttgatgaaagggtagaatctcaatgggaagcagttggaaatggactaaaaaatgaaaaccccaaacaaaagaagacaaacaaaaacaaataagattaagattatttataatagatggggagattaaaagaaagaagagatgagagaggcaaagtgcgtaggaatagacatttgatttgatgtaggcaaataaaaaagaggaaggaataaaagataatcctgaggtttt

SEQ ID NO: 12369 - DNA, 1024 bp, Homo sapiens
cctccagcaggttccttttgcccaggtggtttgaagctaataattaagttctttgttggttcttgaaacattgactgaaaagtttgacttgcctgaaaacatataggaaaagttttgaattaagagtgttgtcccttattggaatgtgttactgagaggggtcttacaatcatttctttacagcctttaaataacaatttaagtttttcatcagccttgatagattaggcttagaactcctgaggggtaagcacagattaaaataaatctccaagttgctttctatcttttcctggctgtattatgtgctactcttttcagattcaacaaacatttaggatggcaggaacactgtgcctgatatttttacatatattaattcagttaaagtaattctcacaacaatgtacaaagcaggtatcattgcttgtgttatagatatgagacaaccaatggttcaggaggtgaagttactctttgaaagttgcacagctaggatggggtgggtgagagaacttggtaccaggacttggagaacttggattctgtcttaaaattccattgatgagctctgaatctcaggccagttttcagtcttgttttagactccagtttcgtcatttggagagtgaaggggttagaatgagaagattggaatacatttctttgctacttctgtgatgtgtgacctaggggaagcttgagagaggtacatactgaatgaacattactttgtttttgtacacactgtgagaactccttgtgtaggtatatagatgtatattattactgggatgagaattttgggtgtggacagaaagtaaaacctgacatctctatatgacctaatgatcaaatatgcagagcaagtggagtagaattctcttacagccatttcttaatttgtctttatatatatatatatatatatacatgtagtctttgatcccaggtctcctaccacccatcacattggaaatttctgggtttatgtctcctcctgaatctcactatgtttgattat

SEQ ID NO: 12370 - DNA, 1031 bp, Homo sapiens
aaaaattaggaacatggtgctagttaattcaagtcttcatgtaaaacttcttctatcatagtggacattaaaaaaaatctctctgcaaagtgcattgaccctacctctagtagatgaatgttgaacaagtagcctatctaggaagcaagtgactagcatccatgggcatcccacaggttgtagtccagccccgatcttggtggttgggattgatgttgctgccaagtccctccgtttcatgttcaggctctgcctatgttcctggtgtctggtacctgatttttcaggatgctgacatttacttcttgcccacaacaccatataccctaagtcttgccaacatctttgaatgtcttctgctggtctgtctctcctccgttgttcttttactatgtcccaagtgcatgctttgttcagtatctgcctaagtctcaggatactgattttagctttttactaggtcctgacattcccgtagtttcctcttacctttctggacatgccagacaaactctgaccttaggttctgtgaaaactggtacctgcagaattcctcagtgtttgtttatatgaaagttcattgtgcctcttgattgtgggtgagttgaggaaaaggggtaaagcagtgggcagaggttgcaacatttatttggttataggacacctttgctactggagcatcttgtagggtaatgtagttcagaacatgcatggagaaatgctaccatagagtagtagtgacatttgggacttgaaaaaaatcttaagagcaggtataattccctcaacaacagaagaacatcagtgctttagaatgtttgattttgaactttcttgatgttttctctgccgttctgtagtgttattctaattaaaatctttcctctaaactctgctcttttttttccaattgagcaaattcggcatttattgaggccctactacatgtcatatgctgttctagttgctggaaacacaaatgtgaatatggtaggcctgcccttaaacaatgaattacagtgtaaaatgaa

SEQ ID NO: 12371 - DNA, 1035 bp, Homo sapiens
gagatgaggttttgccatgttggtcttgaactactgaccttaggtgatatacccgcctcagcctcccaaagtgctgggattacaggcatgagccaccacgcccggcccaaggatacacatgatgttttaaagcagaaaaacagtagaggaatgttttgtagtgaaaatctttgtctcgatatttattctgacatatgatttttgtgttagcaatcgtgtcataatcttatttgtgtccacattgcctgccatgggtcaagacatggtgtagatgtttaatatttgttaagtgaatgagtaaatgggataaaatgagtttacattttaaacaatagggcaggaaagagatattctatacttctatattcccaaggtatctgcttggtttctctccttatcccccagctttggaatatcagaataacaattttatgactttactacatttttttaaatgcctggcacagcattcctcaggcattcattaaatacttgttgactgagtgatctaccccttcctcctgcagactatttaacctaagggagactcctgaatgaatcaaaggcccctcatggattcctcatcatggaactagtcagttagatctgggatatatgcagtggatgaagaatgaatattcactgatataattttttccttctgttatgggaaaacaatctaggaagcttgattttaggatagagatttgggctttaagaatctgaattggattctaagtctaattcctacactaagtggtcctatagatttgaacatactatttgacttctcaagttcttcctttgtaaaataaccatagtaatacctactcttcagggttgttgtaaagatttccttcctccctccctccctccgtccctccctccctccctcccttcatttttgagagagagtctgctctgttacccacgctggagtgcagtggcgtgatcttggctcactgcaagctctgcctcacgggtttacgccattctcctgcctcagcatcctgagtagctgggactacaggcacc

SEQ ID NO: 12372 - DNA, 1033 bp, Homo sapiens
aacaaggcaatataagtttagtttctttgttaccatttcacattttctccctgtaattttagttatgaaaatgaaaatttgccaggctagaatcagacacctgtagtgctgcatctgctgagaaagcgcctcatctggctttgttagtgagcctgaatgctgatatacatataagatacttgccaccaaagggtagccctgttttgttgttgttgttgttgttattgctcacagtaatataaaattatgataatagcattggctctatactcaataactgcatttactcagacccttaccctcccagaccctaatgatcatactggaaaaagaaggaagggcagtgtattagtcttcccaggtttccacagtaaagcactatatgcttaaacaacaggagtttttttttttttttttttacgttcttggagggtagaaattcattatcaaggtgccaggttcctggagggctttacctttgggttgcagatgactgtcttcttgctgtgtgctcacatggccttttcttggtaggtgtagtgcagagagagcggggaggggagtgaaagctctctggtgtctcttcttataaggacactaatcctgtcagatcagggcacacccttatgacttcatttagccctcattacttccttagagacctttaatctccaaatgcaaccacacagggggttagggattcaatgtatgaatttgggggccacataaacattcagtccggccaggcacggtggctcacgcctgtaattccagcacctagggaggccgaggtgggcatatcacttgaggtcaggagttcaaaagaaaccagcctgaccaacaatggtgaaaccctgtctctactaaacatataaaaattagccaggcgtggtgttgggcacctgtaataccagctacttgggagattgaggcaggagaatcgcttgaacccgggaggcggaggttgcagtgagccgagaacatgccattgcaccccagccttggtgacagtgtgagactccatctcaaacaa

SEQ ID NO: 12373 - DNA, 2069 bp, Homo sapiens
gggtgggtgggaagaaagaagtttctgaagacagctgtcagaggaggtggcatagaggaagtgttaaaagacttgaaggaaggggaggagattagagagttgggaggggatagaaggaaaggaatttcaggcaaggagcatggtatgttccaaagcattgtgaaatgagacattctgggaaccatgactggtttcttaaaggggatggagtgtagagtatgaacatacttatgagcatagaatataaatattcatttcccctatgggatgaggaatggagctggatgggagcattagactagaaagggccagattggaaagggcttcgtatgccaggttaaagagtttgattgcatctggcaggcgataaagaattgataggcttccaacagaggagtgtcaggatcagatttttgtcttagaaagctcatcttggcagcagggaggaaacatttgaaaagggagggacttggaagggagtgaagcaggtgggaggctactgctctgtttcaggccgtgcagctactcaggagatggacttggtgaccaggtaaatgtcggaaacatgaagagtgtagatctctggttcaagtactgattagaatcagaattgtatattgagacccagtatcttgatacagagcctggtgttttttctatcacatattgccttttttattgcctcactccaccggtcaatgtaggggaaaaagtaaacataatgtggtagaataatataaaaataaggaaccaccaaagtgatggactaccagactgtgccatgatgatagcttattgtacaatagctttcttcttttatttatatacaatttatattacctattcttaaaggaaaaataattattctgtacatttatctcctaaaactaatttagaattttacatgagtttttaagctgaaagagagggaatggttgtactgtatttattttttagatttatcttccctggtaatgcaattgggtagggttttaagtttattattttctgaaaacaactaagtactctgtgaataaagttttaatatacttcttgtactatactcaaaatcagaaagctggagtttaagtcttctgtctcttagccattttccctggctatttggcctaggtatagaccgaccatcttgactgtggctttctcatctgtaaagtaaggatgattcttggcatactgacctttggggtttatacttagaggtgaaagctattaatgtaacgttactatatcacaaaggccagaaattgtgaaagacagagggtcttcaggtacatttgcctattagcaggccatctctggatggaggcattatttggataacttgtgtttcataaattggaaatttttattaaaaaatttcaatccgtagtcttccaaaatgaagttcaaacatgaggttcccctttggactcccatttgtaacaaaataactcaagtaatgcaacaaagttacaatgcatacaatgttgcagttatccaaggcagcctcatttctggctgcagctggaaaagtccagctcaaatactgagtgggctctgccactccctggtgttacttatctgcttctttcagtccaggcttctgacaacccaatatccaaaagatcattattctcaattaaaatgatgtttggaaccttttgaagggagaaaaaattcttgcagctctccactgccaacacatttttttttttttttttttttgagacggagtttcgttcttgttgcccaggctggagtgcaatggtgcggttcccggctcactgcaacctccacctcctgggttcaagaagttctcctgcctcagcctcctcagtagctgggattacgggtgtgcaccaccacacctgactaatttttttgtatttttaatacagatggggtttcaccatgttgtccaggctggtctcgaactcctgacctcaggtgatctgcctgccttggcttcccaaagtgctgggattacagatgtgagccactacacccggccaacatcatttgtttttattatactacttaaatatgtactaacatataactacatgtaa

SEQ ID NO: 12374 - DNA, 1044 bp, Homo sapiens
aacctccttaacaaaaagtccaatgtggaatttgactttttcccaaggaacaaagtaggtaaaagagaagaaagcaaagaaatctagggcctgctttgtttcaggcaccatgttagatgtttcccatgcattatttggtacagtcttataacatgcctgtaaggtaagtgttattattcgtcaccctgtcagatggggaaactgaggttcagagagctaatgaatttgccagaacttataaagccaagacttagggcatttatttctaaagagatatttaaaaagaagtcaagttacacttcctgaggtgaagtttgtagaattttattaacattgtaacatctttccctttcggacaaaattctaataaactgccatcaaatctttcattaggaattcattagagagtttgcttagttatgtatactgggaaaacacttctacagtatattttggacttttgacaaggcttttgcaaggtagatgtgttaattaactctaacaataaggattggaacctcaacatatttttaagttgaattatttgactacattttaagtaactcatttaagtgaatgggttttccaccaaagacttgccattattgcatatttttccttttttttcaaagcgtatttgccatgaaggcaagcattaacaagaattgaatgttcttccttactgtgaaaaactgggaaatgattgtattgttaacagccattgtatatttgtcctttgccgacattttatttaattaaagccaaaatctgaactctggctacctaacagacagcccagtggtcaaacaaagaggcttcagttaatactttcttctgcagcaactgattggtttcgttcatgaagaaaaagaaatttcaactgatattagtaaaagaatttgagaattgaatcttatgggttttaaaactgttatattaaatgctgcagatggcaaactattaaaggcatttaggatttgattcatttattttcaattaaattataatagtagttagtaatacaaaatacaagaatgatagtaa

SEQ ID NO: 12375 - DNA, 1044 bp, Homo sapiens
accccactgcaggagtctcctgctgaccttgaaagagcaaactgacaatgtagcagggactagcaggtggcttttaagggagtggaagatagcccccggctgacaaccaacaagaaagtatgtctttgtgcctacaactgcatggaactgaattcagtcaacaccctgaacatacttgaaagaggatcccaaactccgcgtgagaaccacaacatggatgacatcttgatttcaactttgcaagaccatgaaagagaacccaggtgctttgtgctcagacttctatcctggagaactgtgatgtaataaatggatgtttttagttgctaagtgtgtaataatttgttatgtagcattagaaaactagtacatataccctcagtatgaagaaaaagaagaatggcctaatattaaattctttttagtaggtttgtttttcatcatcatatgggcataacaaatctcaaacttttgcatgtattgtatattttaacaaatgaataaatggattgatgttggaagccaaagctctagttgtagaagggagatacaagaatggactggggaaaggcaaaggacaacactttggggctaaaaggagtagaagattttactataaactcgtagtttctaaaatatatacattagagctgagatttccaacatatgcaaaatacaaagcatctaatatatttctgcttgttgaaaaagcttagaagcaatgctatcccaacagtgatgaacatatttagcacccagatattgatttctaaataccattaccttccaaaaggagccagggctccatgaagaaatggccagttctgaggttggtacagagaaggtataagataaacctagagcatctcattgtgccataaattaagaaaatactaaaaacagttgcagggcatgtcaagaagacacaggagtcaccttaagcatcaaaataggcctgatgtggtggctcacgcctgtaatcccagcactttgggaagccgaggtgggcagatcacctgagatcaggagtttgagaccagcctg

SEQ ID NO: 12376 - DNA, 1088 bp, Homo sapiens
agaaaaggaagtggaccttaattggacaattatcaatacataagtggatttgagtgttattcacatagaagttactgtgttacagggtgctttacagtttttataatgtgcttttgaagtaaattatgcagtagttgaggctatgagatattttttctgaggaaatgagatttaagagcataacagtaaggagtaaaagggagagtagagtcattaaaatgggactaagaggaaatttaaacaatctattggaagcagaggcaagaagaaattaaaaagaagggaaagaacactgtcaaatgttaaataaaatgaaggtagaggtgagcttttatgtttggttagatatgagtccttatgaatgaacttcaagaagacagtttcaaagtgattgcattcacttttaaactccacagatctgggaagctgtggtaccattgggtaaggaggaaatggtcacagctgggcaaagtaaaacattgtaccgtttaataagtggcaaaaagatcaagaaagaactctttacaaggggaaaagtgtgttttgatggagtaaggaaaggatctagtttggagagacattcaaatggctgtggggcagcagagcaagacctcctttgcagtggtcagggaaagatgaaaagataatttattctgtaattttttttttgttgagatggattttaaagaatttaggataattgcagagatacttgtttaaatgaaaacactgatagatgcaaaagctcatatgggatggctttattcttaccaggaaagttgagggtaaggaattgaattttaggattttggagattacttgaattacttcctttgagtaaaagccagctcagtaaaggtgaataagatgatggatgggtaatcaaagggaggggtcatcttttcccattggtctctcagagttgaagtaacacagtcaaatatttcatttttatgattgacgtgattcatgttgttgtgatgtttttgggtagatgcagtgaaagcttgcacagatgagagccttgctgttgaggaaagaatagaggcctgccttccactttacacaaacatgattgctctgcacca

SEQ ID NO: 12377 - DNA, 1028 bp, Homo sapiens
tggtttaaaagattttttttctttttactgttttgtctttgtcttattagattttaagtatcaggacacttaaaatgtacaaataaatgtgacctttttattatttcataaactttagcatagtaaaaattatgttaatctggtactgacatctctaatttttttatcaaaaaattttaaattttgcctagaatgcattgaaatctgctaatgatggaatagtagctgaataccttaaaaccagtgatcgatgtttggcatggttggcctacatacatcttattgaattcaacattctcccttcaaaattttatgatccatctaatgataatccttcaagaattgttaacactgaatcatttgtaatgccatggcaagctgttcaagatgtaaagactaatcctgacatgttgttagcagtttttgaaggtaagtataaagtttataaattgtaatatcaactgttataacatcagtgtttagaacattaactacccattattgtgattctctgtaattaagtggaacaaatttatatctctatattgcaagttttagtttcacaatttattaggcaaattaagtcttgaatcagagaagatggacactggcatctttgaaaaccaataactgcacgatattacattgtttatctttctgattgtggcaaaggatatctgttaaatgcgtagagaaaataaattatgtaagtttgatgaattgattaaatcagagaactaggtacttttttttttttttagcagtccattaaggtggaagtttaaagatttctatcttttcaaccaattaatattttctccatcagtcagtgagtttggttgcttctctatattaaatgatacgactattgtggaacacattacaagatataaagcctcttcctgaaggaagtatatagcctagtcagaagataaaatctatacatttgtcataattattaaacatacaaggccatataactgtgtgttagtatatagtctaaattgtatgctacgtaaaagagacta

SEQ ID NO: 12378 - DNA, 1488 bp, Homo sapiens
tcttggtagtagaaataagccaagaataatcttttcataattataactttatagttacaataattcaagggttttttttttttacacgtttctttgaaatatttgactatcttaaagcttttaaataaggcagtgctgcagagtgctaataaacccacacatgcctggatgtgttgcttatttaactttcctgtgtgtcatttccatgttaatgggataagttacagtgttttcttttctgactcatttactgagtgaaggccaaaagaaccatacattattttatgaataggatcatgagaaagaattatcttctccaagagatagcaagcccttgaccgttgaaaagaactattatactgaaagctttgatattttgtacttgcagtagctggccttgagagagagttgtttaacttttcgcattcccaaatggtgtaaatcataaaaggtattgctgaatatggacataaagcacatttgaagttgataatcttagtggttttataacactgtacttttatctgtggtaaatgcttactgaacattcacttaaaaaaattgttgggtctgtggaaaatcagaaacttttaggcatgtgatttaaaatctgaaatctagtaccccttttcataagtgatcctgacttcttggtaaattctagtagaaaatggaattttaaaattgactcattggattagccctatttaaattttcaagcaggttctaaaaagcacttccaccttttcttttatatatacagggagtgctcagaatccttggattctgctttaaatgttctggcgcgagcattggaaaataacaaagacaatccagaaatttggtgccattacctcagattgttctcaaaaagaggaaccaaggacgaggtgcaggaaatgtgtgaaacagctgttgaatatgctccagattatcaaagcttttggactgtgagtagaaaagataacgtacgtgtgtgtgtgtgtgtgtgtgtgtgtgtataattatttggatcatcttaaaaattgataagtagcttaatagagcatatgctttatctgaatatagacataataaccttactttcagtttctagtaaccacaaagccacttctggatcagaatttagactaagcaagaagaaaatatttagtgaagaggtgatttttttgttgttgttaactttattggtaaagaaaaaatgtaaaattgttaaaaatttcacacttacctatttttacacagttttagtttgggcaaagttaagtgtagcttttgcaaaacacctgaaaaaattgtttcttttaaatttatcttaaattgcctctataaaattataatgactgccaggaaacatttttgtctttttattatttgtttccattgcttatagaaataatcccaatctgtaattcacactaatatctaaaattgccaagctaaaaacatttgattgagaaaaaatggcctcttcctctttctccaaga

SEQ ID NO: 12379 - DNA, 1050 bp, Homo sapiens
ttaatgtaatacatatcattccaggctgggtgcgctggctcacgcctgtaatcccagcactttgggaggctgaggtgggctgatcacttgaggttaggagttcgagaccagcctggccaacatggtgaaaccccgtctctactaaaaatagaaaaattagccgggtggtggtggcgtgtgcctgcagcctcagctacttgggaggctgaggcaggaaaatcacttgaacccgagaggcggaggttgcagtgagctgagatcgcgccactgcactcactgcactccagcctgggtgacagagtgagacttccatctcaaaaaaaaaaaaaaaatacgtatcatttctaagatggagtgaatgtagttcttctcaaatattatttgagtatccttcaaaatgttaaaaaaaaaactagttatatcaattaacaatcttctcctatctactttagctcctccatttacaacctacaaagataaaagaaagtggaagccaaagttttggagaaaacctatttcagataatagcttcagtagtgatgaggaacagtctacaggaccaattaagtatggtaagaagttatgtaatttaagatccagaattattaaattgtggtgttccatctttatttaacactttgctaatcctttggtgtatcagcctgcctggttaaaaaaaaattttttttaaaaacgatgccattgggtttttagacaatacagttaattcactgtgcaggattgcctctgaaattgcgggatatttgtgttcatggctcctctccagtaaatgcaaggagcactgcttagttaataattatgactgcttcagatatttccaaacatacattagttggtggggaaggtagctcccgtttgagaaccactgcctagcctgtgtcctccttaagggcaggtgttctattttacttcatctttgaatatgttttctgacatgcagaaggctcaaaagatgagaatgaacaaatgatgaatgaactaatgaacaaaataatgtatgaatgagtgcctgtatgttaggcacatttt

SEQ ID NO: 12380 - DNA, 1021 bp, Homo sapiens
cctgttcactctcttcaccttagatttagtccatattatcgaaccaaggaaaaacttcccctgagctcagtatcatacagtaatatgattgaaccggatcagtgtttctgccgttttgatttaacaggaacatgtaatgatgatgattgtcaatggtgagtagtttttgtgaacattttgtaatttgaaaaatggtcttgtttgcttaactttgatatgtacatgattatcttttctgtgtttttttttatcttaggcagcatatacaagactatacacttagccgaaaacagttattccaggacattctgtcatataatctgtctttgattggttgtgcagagacaagtactaatgaagaaattactgcttcagcaggtttttaaagacttcctattctctcccaaatgaaaattgaatttaggcaacttaaaaattctatattagttgttgacattgtaaaatacttactataattcagtgtatttacccataatactttatctagatttgctgtatccagtataattacggtaaaaatttacttcctctgttacactagccacatttcaagtacccaatggccacatgtggcaagtgcatgccagtaggacagcacagatttaagacatttccaacatttcagaaagttctttggacagagctcatttaaatatttagttccatttatttaaaagaaaatattaagctatttgtatagaaactttactattgattttaacataggagcctatttttacttattgttttcaaaaaatagaggaaggctggaaattacgatggctgttgtttccaattctataatgaaataagacttgatacacttgtgagcaaatattattaagctttttctcagatttggtgccaagtaataaacctcaagctacaaatcttttggaagtaaagaaaataataattactaaatttggtgttatcacagcccagagtgattgtaatgtcactgaatctattttatcgctcccaatttgggactttaact

SEQ ID NO: 12381 - DNA, 1056 bp, Homo sapiens
atctaatttgcactccacctagatgtatttcttcaaacataacataaacttaatatattcctgatgaagtatttctgttattaaactcttaacaaaaaatttttttacagctccttcaccagtgcaaccgccatttttctctgaatgttcattggggtatttttctccagcaccatctctttctttgcctccaccacctcaggtttctgtaagtcagaattgatttctaagaaaattattttgtcttgtcttttctaatttgtttttaaaaacgaatggttaggtttgaagagggcttaaaaaatcagaattgcttaccaagaattaatagcaatgaaatacgtagaataaacagttgattataccagcaagctatccatttggtagatttttttcatagctaatttttaatttcatgttgacttttcggtacctatcatgtttccttcttcactttactctcagatagtagctactcagaaaatttattcaaaaacagaagttatctactgttttggactgtctcttttttagggaattggaatttacatgcattaggatgcttctaaaaattaatactctcctttctcctcttttcataaaaatggttatttttaacttgaaaatccagcaaaagaaaagcattttctatgaagttaatttcttttcccccccatctccagtcctcccactaaaaataaaacaaaaaaataaaaacaataaaaggaaaaggaaaaaaaggaagtagaggaatcacacattaaaagttttgacattatttttagattgagaggacctagagatcaaattgagtatctctcagtaggtgtaagagggaacttttccgtttcaggaaagacgtctagtgtctttctagaacatatatggtgaggggaatattagagccgatagtgagagagaaaacagcactttcttcgttgtaatgttttctttttgggaatgaataaatgaactaaatgccaagggaaatagtggaagatctttgatgcaaatacatatccaaatttagggatttgtgtaaaattagtttccttt

SEQ ID NO: 12382 - DNA, 1031 bp, Homo sapiens
cttttcttttcttttctttttttttttttttttttgagacaagagtcttgctctgttacccaggatggagtacagtggtacaatctcagctcactgcaacctccacctcccgggtccaagcgattctcctgcctcagccttccgagtagctgggactacaggcgtgcaccaccatgcctggctaattttttgtattttcagtagagacagagttttgccatgttgcccaggctggtcttgaactcctgacctcaggtgatccacccgcctcggcctcccaaagcactgggattgcaggcataagccactgtgcctggctgctcgaattattttctaatgtatcagtcatgttgcaacaaattcacatttatagactaagcctttcaacagaactcatttgtcttgaaatttggtcattgccttctatttacattgatttagatgctagattagtcatttatttattgaataagtcacgtattctttggttcacttgagcagtcaaattaggatgtttggaacattgacaggtgtggtgttatggtaaaaacaccagacttaaaattaagatctagtttaaatcctagctttgcaatttcagttttgtcatcttaaggaaagatttctgagtttttaacataatctgttttagctacaaaagtatctcaacaggattgtagatattctgtaactttatcatgtgatgtttaaagctgttgtagattaggtaatatataaatgtaagattttgtacattatttcatcagtcatctgggcccaaggctagatatctggaaaaaatgtatggatggacttaattttattgatacttaagctgcctctactgatgcttttctaggtaaatgaccaattctctaatgcacaaatccaatacagtctgtaaacattgcattcattccaatttagaggactggattaatttagtcatcattatattctatcagtgtggataatccacttggtaattaagtgttgctgcttgtttctatgctttataaattctcttctca

SEQ ID NO: 12383 - DNA, 1089 bp, Homo sapiens
tgtcaaagtgacatttaaaaacaagcaattaatcaacacttagtgtcatgatgaggatgattaagacaagtatatattttggttaaagtataaatatatgaggaagataggcaatgccatttttttcaaatgtacacatacacacacatacacaataagaaatgtatttaataatacattttaccttattttcaaggcttatcatgacagtaactattctttaaataataagaaggaggaaggtaatattatgaattactaccaccaacagaaaataatgctgttgattacccattaaaatggtacagtagtatcattgtctgttggacatatagatcagtttttttcttctaaatgctatttcaactctctattattaacatatatatgtatgtgtatatatatgtatgtgtgtatatttttattagaaaaaataatctattattcaactagataaaataagaggtaagagataacatagtagaactcaattatctactaaataaatattactcccattctctgtggaacaccaacaatattctcttcagggaagtgacactgactattgtagaaagaacaagttaatgtgaaaaataatgtttcaagtccttattattttattttcttaaagagtaatcatagagggggaagcataatacttcattaccatgtctgtagaggaatggaagagcatattatgcaaataagaaatacaaggcattccttgaaccatagtcatccttgagagaagtggaatgtgtctcaagttctgttttatgaagatatcaacatttttgaaaaatatggagatgaaaaatagcaacataaaaataaatctcagaccttgactactgattgaattttttcacctgctatccattattatttaatctgtacatagagaaaaaaatcagctgagctgtccagaaacatctggatgttatgataccccacaaatataatagccacaggtaatgagcctaaagataggaaaagcattacctggttgctgtttcagccttcagccaatgaatataaataagctttcgttgatcttttgtcctactaaaatgtaatccagtttat

SEQ ID NO: 12384 - DNA, 1074 bp, Homo sapiens
ttctctaattccaaaatgagctactctttacctaacggatacaaagatgcctgctaatatatattagtgatgaaaaactttcaagcacaaatttctatggactgaatgtttgtttctggggaacctggcatggacagcattatgtcaggttgtggaagtgaaggtgccaccccagggggtctggaaagcagagccattaaagcaaagaggattattcttgaggcttaggatatcatggactttgccttgctaagttttgagtttgtttgggaactctcacctcttctttccttcctatttgtctcttttggaatggaaatgtctatcctatgcctctcccaccattgtacttctgaagcacattactttgtttcacagcttcacagctggagagcaattttactgcaggatgaattttaccacaagtctcatttgtccctgatttagataatatttagctgagactttggacttttaattttagagttgatgctgaaataactgaagactttggggaatgttgggatagaatcaatgcatttggcatgtgagaagaatatgaattcggggaggctaggggtggagcgtatggactaaatgtattcttctaaaattcgtatgttgaaactctaattaccaatgttatagtatttggagatggggtctgtgggaggtaattaggtcacaagagccctcatgatggaagtagcacccttataaaaacagacaggagagagttttcttccgctttctctgctctctgccatgtgaggatacaagaaagtggacatccagcaaccatggaaatagtcctgccttcactggacactggatataccagtaccttgatctttgattttacagactccagaactatgagaaataaatttctcttatttaaataacccagtgtatggtaattcgttatagaagtccaaactgattaaaatagaagtcctttttttcctatcttaataaataaaaagatgcattttctataaatcgcggagttttccaggactaatatcgagtagatgcgatgaaaaactatttttgaactgaataaagaatata

SEQ ID NO: 12385 - DNA, 1115 bp, Homo sapiens
ataaaattacttgctaatggatgcagagttgctgaaatggtgaatgtttgtccctattaataaaaactggaagtagaacgaaaaataacgagcttcaatacctcctgtggaaatttatccacgattggacaggtctaaatgctatttctttttttttttttttactataagttttagggtacatgtgcacaacgtgcaggttagttacatatgtatacatgtgccatgttggtgtgctgcacccagtaactcgtcgtttaacattaggtatatctccaaatgctatgctatttcttatagtgaacaaaactatcttttctgtaatatttacttttctgctacagatttactttcacagtgtcttctcccccttttctgtgactaatcttcatatattgaagaaaaagttgtcatgtattctctaagaatttttaaaggactgtaaccacactagaatcgtgattttttttttctccatagcatatgattccaggaaaacttccaacaactcacgtgtacatatgtcactcttaaaatatgatgttttcatggtagcaagtggtctgactagcaggaaacagtgagacttgtctttcatgccttgtgaacttgaatttccttaaaatagactgtgccaatgatagactcccttgataaatctgttagtagtttacatatattccttgtgtttcaagtagattttcagtaagttaaaagcagaaataactcattcatgttacaatgaattcttacataaactatttcctcttatttcctggtcagttgagtattcaatggaggcttgaaactcacactataatgtggaattctacgcgatttaacatcttatgttgtcactaataatactgcatagttgaacgtcttaggcttaatttcctaaattagtggatctctctttaacaaaggaaagattctttcatgagtagtgaagtccctgaaaaaaaaagtttgaaaagttctttttgaagtcttagcagtaaagtcaaagacatgacagggtactgtgcatttagacgtatattttcactagcttttgctgggataagcactctctggaagaaactctcagaatgccaaaggttgaaactgcttcc

SEQ ID NO: 12386 - DNA, 1027 bp, Homo sapiens
gagatgtaggcccagaactttaaaatgctttatatgaggcatataagtttctaaagaattttttaatacaatgtactacaaatactcaaaaataacaaaacaaacaaagaaaagactgacatagcaaaacctggagagaattcaaaaatagaccaacaattgacttcagttttagcattttcagctacaaattaaatgcacacaaacatacacacgtgtgcacacaaacacatacaaattttaccatgctcatacagagttctaaaaagcataaaattttagcacaaaataaaaatctataaaatctgacatagtatatttgaataagagtgaagtagaaattcttgggaaaatgtacctgtacgttaacccatagtaacataaaaaaagatactactaaaaactgatagtaacaggaaaaaaaattcactactaaatagttttgaaagcagattctgtatgtatgagcggtttagacacacctagagaaagaacccaccaactggaaaatagatctaagaaggactcaaaatacaatattgagaaacaagaagactcaaattagagaaaagaggataataaaaccacaaatacagtaagcgattcaaaaatctacatcactgaagtctcagaagaagcagatagaaggaataattcaaaacaatgcttgaatataaaatgagaatgttccagaatcaatagtgtcaacagtccagagtcaagaagctcaccaaatccttagcacaacaaggtaaaatacatttttaaaacaatttagtagtattttctccaactgaacaatggcataccctagtgattttatttctaggtctatgccacaaaaacaaaaatatatgtgcatcaaaaatatgtataagaatgttcatggcagccctaaaccgggactgactcatatgtcaattacagtacaagacatgcattgtctgtatttttcaataaacggaaagtagaaagtcacacagcaatgaaaaggaacatgttagagctacatgcaatagcatgaata

SEQ ID NO: 12387 - DNA, 1043 bp, Homo sapiens
aaataacttatttaaaccaattgactgtaataaccacaaaaaagttgtttacaattcacatagtcagtgtccaaatatttaaataaatgccattctaacttttcattttgtctacactgactagctattccaaaattactaaaatttattattccatattgttcacacagaaaaacgaacatattttgtctctttctctttgtctctctccctttctcacacacacacacacacacacacacacagagatttgaattactgctacttttgcacttgggacatttattgaaacaaagactaccattttgccataattagacttcgtgaagagcagtattagattttggcaattttagcaggcatgctttttttttttttcttttgaaatggttcattgaagataattgaaaacagcaaaggaatgtccttggtgagtgttagctggatcacgtgatgatgctggatgggaactaagctataactaggactacatgaaacctgcaaaagaccaacgattaaaaaaatgaaaacattattgtagaagttcagatgaaactaaaatggctagaaattaacattatctgcttatgtctttcagtaatattcctcattcactttggtaataacaaacttaaaaataagcccaattaagggcttatcagagatgttgcccctcttttttcttttattatagttatttctgttttgtttattttgattattagattttgaataataaaagttaagaatataaaatagactagagaattgaagattaaggtattttcactcaggcctaaacatacacacacacacacacacacacacacacacacacacacacacacgcaaagagagagagagagagaatacaatagacaccaactagaatcaactattttaacactgtcacatgtggttcttgtgatttcttgtttgattttgttttaaaaatataaaatattgcatatggctaactctctgtttgaataatgtcttattttcatgtaatcttgagtcccatttagctttctgcttcccta

SEQ ID NO: 12388 - DNA, 1075 bp, Homo sapiens
gcaggaagaaaaagtgctgagcgaagagggtagagctccttataaaaccatcagatctcttgagaactcactcagtatcatgaaaacagcatggagaaaacagcctccatgattctactacctgtaattgatctctcccttgacacgtggggattatggggattacaactcaagatgagatttgggtggggacacaaagcatgactatatcattgtatgttctcacttttaagtgggagctaagctatgagaacacaaacgtataagaatgatacagtggactttggggacttagcatggaagggtgaggtggtgagggataaaagactacacattcggtacagtgtacactgctcaggtcatgggtgcaccaaaatctcagaaattactgctaaataacttattaatataaccaaacaccacctgtttcccaaaaactattgaaataaaaacataaaaataggccaggagcagtggctcatgcctgtaatcccagcactttgagaggtcgaggcaggcagatcagctgaggtcaggagtttgagaccagcctggccaacatggtgaaacttcgtctctattaaaaattcaaaaattagctggacgtgagggcgcatgtctgtaatcccagctcctcaggaggctgaggtaggagaatcacttgaacccaggaggtgaaggttgcagtgagctgagtttacaccactgcactccagcttgggagactccatcccataaataaataaataaataaatgtctacattgtttggtataaagtaattttttaaattaacgtaactattataacattaaaaaatagaaaataagactaaaatataaatacaacagtttgtatcatgaatggaggttggattttatcaaatacatcaattgagatgatcatatttttcttctttgtcctttttatgtggtggattatatttattggttttcaaatgttgaggcagtctcgcgtggttggaatgaatcccacttgatcatgaagtagtgtataattctttgtgtgcagtgttggagtccatgtgctaatattttgttgagggtttttgcatg

SEQ ID NO: 12389 - DNA, 1242 bp, Homo sapiens
cacaggagtgtgtgcagacaggcacacatttcagacttaatctaaacagatccatgcagtccctgaaatacttttttgtcccaaatttgatcccaggctttaggctgaggccctagagaggaaaaccagatctaagggatccaaagccactaacgggcacaatgtaaatgtacaggaccaatttctgctgactaaacccttgcttcatggaaggaggccatgccccatgacatggatgaggctcaggaaactcaaagattgtcaacagcaggggaaatagggcatatgtgggtaggagcagatactcccagcccctggggccccttgttaacatgggtgaaagccactttggcacccatgggtggcacctgccaaggtctccaggacttggggacaaaaagatggaagagagagaggggatgcccactttctctccatcacaccctgagttatcatggaaagaaagaagggaaatgaaggacacctttactaccctgtctttcagaatggacaactggctatctttaccatccccagtttataatcctctggagtgtatcctgaaccactgagactgctttgaccctctgactctggaggaaaaatacctcatagccctctgcacaaaggtttggccaaattataacagactagcttggcctcaggaaggaatcatttattttgataccatccagaagttggaccttttctgtaggcatgaagacagatggtctgaggccctatatgtgcaagctttctataccttgcagagcaatccagacctttgtcaacagtgtaggatcaattcagccctcctgtttgccatctcaggagaggctgcaagcagcaatccctggaagctaaagaaatgaattgggccgggcatggtggctcacttctgtaatcccagcactttgggaggcagaggtgggtggatcacctgaggtcaagagttcgagaccagcctggccaatatggtgaaatcctgtctgtactaaaaatacaaaaactagccgggcttgggggtgggcacctgtaatcccagctacttgggaggctgaggcaggagaattgcttgaacccaggagacggaggttgcagtgagccaacattgtgccactgcactccagcctcggcgacacagtgagactctgtctcaaaaaaaaaaaaaaaaaaaaagaaaagaaataaatcccagaggcaccgccagcagagaagccagctccctccagccccactcct

SEQ ID NO: 12390 - DNA, 1081 bp, Homo sapiens
atctgtaagccaaggagagaggcctcagaaaaaaatccaccctgctaagagcttgatcttggacttacagcctccaggactgtgagtaaataaatttctgttttataagccattcagactgtagtgttctgttatgttaaccctagcaaactaataaatacatacctatcatatatatgtaatatatattatatatacatttttaaaattattacatttattattactgataatatacatatacgtgggaaacataacggaaaatatggcattattacatacatgtaagttatggcttaattgattcactatcttccaattggttataattttgtttgggaaattttttccactgactaataagttatcacctcataatccttttataagtgaaggtggtaaataataaacattttaaataaaagaaagagagttctgccacacattttttcagctgtatattttaatcagttctacagaaatcagttaggtgaaagacttataaatctctcttggaatataaagtaaaaattttaaagtgaaatactagagatatcaatatctaaagacattgttaaatcagttattaatacataagggaataatatgtagtattagtacaaaacaaaaatgatcaaatatttgtgagatttatttaactgtgagaaggttttaaaaacttatttcctttattggggaggttacacattttccttaaatatgacgcatacttcttcattttcttgctaagtagcatcagctaaagttaagatgatgcagtcaatttaattgtttgtttgagacagggtctcaatctactacccaggctggcacagggtgatgcaatcttggttcagtgcagcatcagcttcctaagttcaagtgatcctctcacttcagcctcccgagtagctgggactacaggctcatgatgccaccatgactagctaagtttgtttgttttttgtttttttttgttttttttttttgtagagacagatctgactctacttaagctggtcttgaatcccagagtgctgggattacaggcatgagccaacacacccagcctttttttttt

SEQ ID NO: 12391 - DNA, 1021 bp, Homo sapiens
aggtgaaattagggctctatctccccaggaaactgggagacaaacatccctagattttttttttaaagaggcgtacttagtctttaaaaacattcatacatatttcaaaggactcacaagtattttaaagtaaatgtcaaagaatagatgtttgtggggcaggggtctcttaccctttttgcgccagagaaaattaatttttcttttttaaatttgtatttacccttacagcatacagttcacctgtgtgtggtggtatccttttgaagggttacatcaaaagtgtgtggtatccgtttgaggggttattttcaactggttcaaaggtcattccaatgcatacacacacacatacacgcacacctattgatatttatttataattatcaatcacacacacatttaacaaatcttacatctgtttataaagatttctacaagctttgttatgtttcttaccttcatatattctaaggaattattacaaaaatatttggagcaaagtttttattaaactctgaagaaaaaaatatctgttgaaatatatttctaaaattgaaatataaaccagagaggggccaaaataactttaaaagaaaaccagactctgctcctatacacaagttactttaaaatgttttctgggccaggcgcagtggctcacacctgtaatcccagcactttgggaggttgaggagggtggatcatgagattaggagttcgagaccagcctggccagtatggtgaaatcccatctctactaaaaatacaaaaattagctgggagtggcagcacatgcctataatcccagctattttggaggctgaggaaggagaatcacttgaacccaagaggcagacgttgcagtgagctgagatcgtgccattgcactccagcctgggcaacagagctagactctgtctcaaaaaaaaaaaatatttctattgttgttgttgcttgtttatcaaatgcttctctaagcaagtagcctttgaagtcttgctactcaaaagtgtggtcc

SEQ ID NO: 12392 - DNA, 1046 bp, Homo sapiens
aggcaatgaatacacgattttaatttgtgtaatgtcctttgtggttagaggtgagaaatagccagattaaaagtcagatgcttttatcttcttagtaatcaggtaacctcacaaagtcaagtgcttcagtggtccaatgaggaagtggaacaactggtacctgcaatcacatgcaattaaagcaggctaaacattctggtattttgcgacttattttaagatgtgttcatggtgtagtttcaagtctaactaggtgtcagtctgtgatttaattcattcattcaacaaatatttttgagctttcattatgtgccagaccgtcttcttggcatttgggatacatcagctagaaacatcaaatagacaatctgggaatatccagtagacgataaacatacgtactataaaaataaatttctagaaagctagaatgtagtaatggctgcagaagagaacctggagcatgatgagggggttgaggagtagaggtgagtggagaggttgtagtttaaacaggatagtcggagtagcttccttgagaaagtgacgtttgaatagatctgaaagtaccataattaacccctgaaatgtggtgctgaggcaaatggctttctagattgaagccatcattcaatgttcaaaggcctaaggcaagctaccctggtctgtctttagaggatgaatggccagtatgcaggactggtgcctgagtgagacaggggagcagaaatcagaaacaaagagacataagggtgggaacagaaaccttagagagcagagtattgaactcaagtgagatggaaggatctccagccttgtgggttgtaagagcagaagatacgcaattcagaaaaggtccaagaagccttatttttgaccctgttcagggtacatttcctttcccaaggaacaagtacatctagaatataagattacatgcagaggccatgtgtctgataaattgtttctgttctactcagtttgttacgcagaagttaaagtattggagagaggtgaaaaataaaatagtgacaaaaagaattaat

SEQ ID NO: 12393 - DNA, 1035 bp, Homo sapiens
tattttacttgcaatggatttcaatgagaaaaatgtcactttaaaagtattttaaagatacactaataatattgcaaataatattcataagatatttattaataaataattactaacaaattactaatagcaaacttatatgcttttaatatttttgaagccaaaaaaaagttatctttcaacttgacttgaaggtattgcctaataaaaatggcagaatttgttctcattagcctccctcagattcattttattatgctttattactctaatgatactatttaataaagttatatttaatttatttgaaagtactgattacaaattatttctttttagcatctcacatttcgagatttctatagtctgtgagaaacaatacaactttaaaaaattatagtcgtacataatttgtattgtcagaggcactccctttccaccccaaagtttgcctttttgggcttccaaagcaagagattttatttggacttcaggtaaaggtccacgctgagactggaactctggttgctggattcagagtccagggtgcttaccattacaccatggaaccaccggagaggtggctgctctgactcactggaggtgtgcaagtccttcctcagacttttaattagagttgcatccattgtcatatctattttatgtcttctagaattctcttatccctttactaaagtcattagaatatagtcatttgcatattttgaccctttgggtttttttaagcttctatccacttaaattttcttttgagtacatctttctcacatcacccaaatctgtttccaaaatgcagttgagcaagcctaaaggcaaacttgccttattccactgatcgcgtttggtttcaagttaaagccagttactgtggacaatgctttgcaactccttaaattggaaattaaatggtccatagattattttacagagctaacctgagacttcaaaatcccttattagacactaaggatttcttcaacatgttccagttttgttctatctccaagtaaatga

SEQ ID NO: 12394 - DNA, 1033 bp, Homo sapiens
tcacaatgacatgtgaggtttcctttgtcagttgtcacatttcatttttgtgacacttctatttattagtcttacactttcttcattattagtggttataatatggtttaatattcacaatgttaaccatgattaggttgaaaatccttaatctgaaatgttccaaaatatgaaaatttgagcactgacattattccataagtggaaaatttcagggctgagctcatatcacagtcaaaacacagatgcatgacacagtttattcagaatccctcagagaaaaataaaattaccttcaggctatgtgcataaggagtatatgaaacataaatgaaactcatgtttaggcttgaatcctatccccaaaatatttcattgtgtatataaaaaaatctccaaataaaaaaaaaacaaatttgaaacacttttggtctcaaacatttcaaataaggaatacgcaacctgtaatgctattttagcagcttttaaatagtgtaatatttttcttccttttcagaaatactgtatgaattttgattcacatttatagaatattaattcttcaagagttatttctttaaataatttaacattctcttttagacatttggcatttcttcacattttttaataccttttaaaaacttttgtggttttcttctcatgtattatagatgtatctcttttttagaaatttattggccttttatattatgttactattgtgaatgaggtttattttttattttttattttattttatttttttttgagacagagtctcactccattgcccaggctagagtgcaatgttgcagtcttggctcactgcaacctccgcctcctgggttcaagcgattctcctgcctcagcctcccaagtagctgggactacaggtgcgtgccaccacacttggctaatttttgtattttttttttttttatttgagacggagtctcgctctgttgcccaggctggagtgcagtggcaggatctcagctcactgcaagcttcgtctcctgggttcatgcca

SEQ ID NO: 12395 - DNA, 1028 bp, Homo sapiens
ccacaatatttccccaatttctcctgagcattttattaagtcgtgcttttctgagattttactgctttaaaatttattgttacaaagttgttcataatatccttttatctttttagtgtctacaggatatagagtgtgccaactttttctctgttctagtatgctaatttttttctattttatttttcatatgaatcttatacaagtttatcatttttgttgtctttttcaaagaactaattttgggcttgctgtccattttattaaatttctgccattctcattttatcttctttctacttttcttgggattaatctttttatctgtttttatttatgaaagatggatccatcaatcatcagttcttttttttaataagtacatatggaagttttcagcctacaagatatatattataatgcatccagaaggatacagggagacatcttatattaaacacactaatatttctgcatgtaaacataagtattacattagtataaattaagactttagataacctcacttcagttcaggcaagatttcctcaccaaatgagttatgaaaatctttagtttcaaagcattttggtgttggaattgtagcttaattgttctgaacttgtattaaaaattattttttaagactaaatataattagttgaacatttatataatgatgttaaaagtcgtataattgctcctcaaaaatgtgaaaaaactaataattccaaaagttgatttctttggcaaaatcaataaaatgactaaaaatattgttaggtttataaagaaaaagaatagatggcaccagtgactattgactgctcttggccaagaatagccagggcctttctgaagaggatgaacataggcaggaaatattttctaacagatactgagatttggtaaaaactttagcaaataaagaatcaaataacttgaaataaaaaaagtaagaaaagatagagagcccagaaataaactataatttttatatagttgtaggtagcttttctatagtttct

SEQ ID NO: 12396 - DNA, 1043 bp, Homo sapiens
tttattacattcctctgccctctgatgcagaagaaaaaactatctctagtttccaagaatcttttaataacaaacatttttttaaaaagattgtcagttcttttggctcaggggaaccagatcatgcagaaatgtaagatattcaaggaggattgtctctcaccacatgtatgcacaccacctacatgtttgaatgtaatattttatataatgtatgcatatttacattcacatattctatatgcatatccgtgtttttacataattaagatcatactgttaatcctattcatactgtagtttactctatgtcacctaataagagataatgtacttttaccatacatttatgtattctttgaaaatacaattttaattattgtttatcatatcatggtgtgacagaatcatataatacactaataattctctattattaaatatgtagtttgcaaatatttaataatgtataatgccataacaatagatgcttcatggaatatgtcttcacattctgttgatcttggaagtttgaataagaagggaaatcagacatcactttttatgattattttccctgactgaatactgttatgacattttcctaatctgctcacataatgaatatatttttcataagtatacaatgagtcagagataaataatattaggcatcaaaatctatgaaaaattctttaaatttctatttcactaaactttatttccttacatgaatcccttgaactgatgacttttattgtctcactcttccaataagatttagtgagttataaatcagtaaaagataagtagcatatattagatattatgtcattgaagaagaactaatgatacgttatccttgccactcatgggtagtggaaatgtgtaagcctaagtcatagtttagagtggttattgtacacattggtgttgctcagacatctagagactcataagaactcagcagcaatcaacctgtcagccagccaaacacatcctaagtagggtagccagataaaatgcaggccatctcatgaaac

SEQ ID NO: 12397 - DNA, 1050 bp, Homo sapiens
ctttaattcataagtaccatcttttttttttttagtcaaatataagaatgaagttaaattacatgtctcaaaaacatggatcattttgccccacctgacgtgggcaagttctatgattgctacccaattgggtagtagcaaatgagttcactaggtgaggcaacatagtacactttaagtaaatctcccaaacacattttaaagcccaagaaatttatatgtaaatattatttgttatgcaatggttggagagtaccagaaagactttttaaagattgttttgttttttctatttttcctaatgctaaattcttactcagctctctgtctttcctaagcaccctgatgcagtgcccatccactcctccaaaaacttccctcagaaataactacctaaaaattacctcttattcctttgtaccaccacacatcctcaactttttctttttctttaattttgtatttcaaaatgcctcctcctttccaattctctcccaacatgtttttctatatttcttcctcaagaatctgtagatgatggcaataattgccaaatgaataatatatggagaaaaatgtgattagctcaaatgccagtctcatttttattgcaaaccagcaacttaaattatattgaaataggccattcttttacttctggatttggagaaagtgcatctttatttgggactctgatcagaaaaggagtcttagatagcctattatctaattttgagagtacatgaaaaataaattaggcattttctcagtatagtgaaatcatatttcaaatgatgcacctgcaagactagagttgatcgttgagcttacatataagcattcttctgtagaatttttagtaatcttaatggcaatccacaatgatgaattgaagctcgtgatgaactgaaaacaggatgagctcattaatcattttaatacagtacctgtcacaggtaactttagaattatctatttccttctcatatctgaaaatgcttagttgttagatgactattgataaaatgtcatagtgaaaaaatatctcaa

SEQ ID NO: 12398 - DNA, 1042 bp, Homo sapiens
aggtggtttcactgacagttaaaaagttcttactagggttaagagttaaaattctgattaatatatggtaattaaaatgagataagagggaaaatgactctctctatatatattatataagaaaagtaaaacatgtttttggtaaggttatatgaaacatatcaatattctttttatgcttttaatcttacaactctaccaaaagagacataagagtcattttttcttttaaaatacaaattttatttttattttatttatcctctgatatggttgatcacttgcttctcacttttagggggacatttttattgatacataatagatgcacatattttggggggctctttttaaactattttcttcattgaattcttccaatgcataattcttcccctgcatcactttccactttttctaaaaattttgtgctgatgtctcccatttttctgacctttaaacatagattgttccgggtctatatctgagatatttaatctaggctcacagttacaaatattgtttccattctgataatttccaaatttatgtctccagcacagacttatctcctgaactccagagatgtatattcaactttatactcaatatttcctaatgcatatatctaatactacctcaaaattaacatgcctaaaaatctccttttctactgctctgtttccccaaattggtttctcttacagactttgtctctcagttagtggcaaatttattcttcctgttaccaggcccaggaacttagtcattcttgacttcacaaacttcatcgtattctacatccaatctaccagcaaatatctgtaaagtctacatttacaatatatatagattctgaccacctccactcttttattgctaacactctggtctaaattcactgctatttctgacagagattattacaaacctttaactggcatttctcctttcacacttgctcttgcatgagtttattctgtacaatgtaggagtatctaaagattaaaggctgacattaatgttactgcctccaaacttg

SEQ ID NO: 12399 - DNA, 1046 bp, Homo sapiens
aggttcccttgttgagctgagttaaagatttacccttcaacttattggattttatgggtgagtttatatttcccaccttctaattattttttgttagagtgagaattagttttcttttaaatgttaccattcctgctaggaatcctggctatgagagaaaaataatgctgtttggtgaaaccttactattcaatcactgctaccccttctcatctgagggagcatggcttcctagaaattagaaaccttccctgccacttaccagccaccaagcaagctgtacctgctactcactactgtgcactgtgcttgaaagacaaaatgtcttatgatgatcccttatttgcttgcttaatttgattaatagtgtaccatttttggctgatacactattgatatttctgtattattctttggggatttttcctctctttttcacttcctctctctaatctcccagagattctgctctcactttagtagaataagtcttttcattaggaaactacaactttactggaaaaggcctgacttcccagtaggctttaataacaacaaaccccccaagaaataaactttctggatactactgtatttcgccacacaaaaacattttttactgcaactatagagctgggataaaagggacattacaatacagcaaaaactgtcagctatcaatcagcagctctctgcagaaattggaagaaatgttctttgtacttttaacctattgtgctccactaaatgtatgttgtaggagcaactataacgtgctttgaaagagggaagaaaagcccaaatgggtgaaacatagttaattaccaagaagaaatatccaaactgataaaagagaaattgaagaaaaagttagagatagtacctaaaaaattaactacaaaataaccagctaacatcataatgacaggatcaaattcacacataacaatattaactttaaaactttcctatattatatttttatgatcaatatatctgttaatttatctcctactgagagaatcttttcctaaggaacctctatt

SEQ ID NO: 12400 - DNA, 1029 bp, Homo sapiens
cactactcctattaaaataataatagctaatcactactgggcacttattatgggccaagaatcagccaaataaattttgtgtattgtttctttgatctttaatgtagccttctgaaataggtacattacctattatgttctgaagattaccattatgttcttatcgaggaagaacctgagcatcatagaatttagctaatgtgtcaaattaattaaacattacatgataaaatggtgagtcaacctttctggtcataacctcaatactatattgcttgttttagctgtatgagaggacatatacatagatgccattataattaattgtttttgaatgattaaaataatgtctgtatactcgttgaaataacatgaacatcattaggtaatttttttacattattgattataagtgagattttagtttacttgtagtttactgtagtttacttgtagtttacttgtagtgagattataagtagattgttgtttacttgtacaggaagaggtctctgtagtgatttcgagtgacatatttgtgaagtgaaaatttgcaaattgctgaagagggtatcaatatgctacacacacaagcaaaaagaagataaatacgtgcacacacacaaacacatacaatttctgcttttgtttgaaaatggaaacactggctgtagaaacaagaaattactacctataaggggctaggtggaatggagaacaaaatataaggatgaaatagagcataactttgtatgtaattttgactaccatattacaatgggtttagttttgtgcaaccaccaccctcaaaataagatatgttaaagtcctaactggcagtacctcatgatatgaccttttttgaaaatgtggtctttgcaactaaaattagttatgttgacaataggtcatacccaaatagagtgggcccttaatgcaatatgacttgtgtccttataagaaaatgatgtggagctgcatggagagaatagcaggtgagagaagagattggggtaatgtagctgcaag

SEQ ID NO: 12401 - DNA, 1685 bp, Homo sapiens
tggttaattgatttaattttagaagtgccctattctcatccttcacccatgtttatcatatttttgatttcataatttatttgtgaaaaccctttataatttaaatttttttctttgatatatgtatctatgctgcaattgtttttctactttcgatttgtattttagttttattcattgtatttattgtgccaatccaagacatttgattttagatagtcaaatatatcagtgttccacgatattgtttctggtttcacttttaagtttttactgtccattgatacaaacttgtttaccaatgctttcttctgatattttaatagtattaatctcatttttatgaatgtgaaataatttttaactgagcagtgaaatggtaacctagcttctatttttaaaataactagcccattgccttaattgcagttatttaataattaatcatatctatacaaattttatatatacatttattgtatataagatatctgtgaatacttatgatttctgagctctctattctgttcacttactatgcatcatgagtggtccaagtaattctcactattagcaaaagaagtggtcccctgtgtatgaggaacaattaaagcatgttatacagtgtatatttaattacacaattaaagtctattctattgctagagggtgatagtagttcaaagcaagcaaagacactcataccatcttctcattttagtcctggtagtggaattccttaatattaggggtctttgcttaggagtttagtagtggagacctggttgaactagatctccaacatggggcttcatggggaaagtcagagagttaaatgatgtattttatgcatctcacttacattcttgaaacaagtttattacttgaatttcccactccaatttgaaaaagcagggctctgtttttccaagttgcatattccccaagactgctataatataactgggaatggtccttatttctccacattttaaaagcatttcttattacatcaaaatatcacaaagcttaagatttgtgtgttttgggtatatcaattttagtaatttcttctactggtacatacacataattgacatttgttttcttcatattagaacaaaataatctcaaagagaacttttttagacctttctcatatactcttttgcatatttctacttagacctacacaatttaattatagaagtgttactgatgtttttgaggactcatattgtaactcatttattttcccagaattcaaaaatatattcttccaagaaaaacaaagccctgtctatactcgatgcaggttggtttgatttcattgttcaattttggggaaagttacatctttataagattatgtttttctcttcagaaaaaagccacatctctccattaaaaatcaatgtttatatcccttagcaaagttgtacagctttcactctgtataagcctatgcaagtcttgttaaattcataaatatgagtcttatttttgagttattcttcttaatggacattttcttgtatacatctattgattatatgatgcttttaaagtaaatatattatccaaaaataatggttatttctccttttctattccatattggtatcttctattttttcctttgattactttgtttagcaactcaggtgggctattggtggcaatag

SEQ ID NO: 12402 - DNA, 1058 bp, Homo sapiens
aagtaggatttaaggaaatagtcttaatatagttgaatccagtaattggttcaattatgccatttatgccatttttatgtatacttgtactaatatataaagtattttatgatttgttttatcttaatctgaagaaatttctaactgctttaggcaagtgtttttatattttatactgtgatcacctttcaattattcaattataagaatactctgaagttaactgccttaaacatatattctttgttaaacatatattctttgttttacttggtaaaatctaaagtattacatgtgttgtgcttttaatttgtctagcttctactgaaactaaaattgatgtggccagcatcaaggaaaaggttaagaaagcaaagaataagaaactgggagctcttacagctgaagaaattgcacttaagatggaggcagatgaaaagaaaaagaagaaaaaaaagtaacatacccaaaactccttgactagaactatctccttttgtaaaggattttgagatatcaggcattagttgccttatttgtgagaaattttctgagggctttttttttttttggtggtggtggttgttcatagaagagtgttctttataaattatattattattgtattttttgaaaaatttatacgagaaagtggtatataagtctttgtatacattacgaccattgtgattatccattaaatccagtgtctgatgctattggttagtaatgatgtcccagcatttgatgttccctctctaatgataacaagtaaatatttaggtttatcccttttgaaagtttggttttacttttaacagtccatgaacagaaaattaaggcctctaaaatcagatcccctagttactcctctgttctgaatctggggaagtagtaaaccaaaaagacagggaaaaccagatatttagagtcgaagcagcatgcaaaaaataataatgtttttaactaatgaaggctactggagttactaagaatcacctaaaaatgtgctactgtaccttgctcattttgcagatttagaagctgaaacatgggtt

SEQ ID NO: 12403 - DNA, 1811 bp, Homo sapiens
taattttatgagtaataaattactttgaaaaatttacatacctttaatattttaggagcttcacaactgtctgaaattcacctgtgaagtcccaatttcagtatgcctgctccaggccatgatagttgtcatgtatctgtcccagtctgagctgagtcatgtttctaattgattacctttcatcttaaatggaagatgtggatgtgtccaacttttccttgtttattgctgatgctatgcccctagataactgcattttttttttcaaactggggattgaaacccattagtgtattgagaagtcaatttaatggctataatgagcctttagaaaatgacatatcacatggtaaaagtatctttttttgatattggctttgtttgtgtgtgtgtgtatatgtattaggttgtgatataaaatgtgtttctaactgtgggactgctctggagttggttgtgccattgtgggtgaaggtggctcagcaagctgcaggttgtgttttgtagctgcatctgggattgagctcattttttttttgtaaactcatagagactcaaccatatgttgaattgttcagcacttaactatgttgaaatattcttgagattatgctcacaagtgagaaaatagcattttaattcgctttgttgaaatctgttttttcctgttgaaagttaatgcttaagttttctaatcattgcttttttctgaaactatgataatttgcttttactttgtatttagtcccctaattagctcgaaaaaagtttgaaagggaaagtcaattcttacccaatggagcagatggtagactggagctgggtccagaatagggaagctgtacagctttacatttttaccttagtcagattttaagtatgacctcatttgtttgatttataatttttaaattagaggcaatctatattccagtgggtacaaagtattctaaaaccaagggtaaatggtttcaattgctccagtttcttatagtctgtaaagtgtgaaagtaattgagtattcattatttatacttaactacctagcttcttcagggaagtaattgataggaattgagaggtgacagaaattaataggttggttaggagaggctttataattatctaaaaaaactcatttttagacaactgcttgtttgctctttccttctgtagcatgttaatgcaaccctggacctgatcgaaggcagcatgactgtttgtactacaaagaagacttttgatccatatatcatcattagggccagagatctgataaaactgttagcaaggagtgtttcatttgaacaggtaaatctagaattacagagactttgctttgtttgcatcagtgttaacctataacatcccaccatcaagttttcatatttgtgcttaggtaacaatagcgtgggcctggaaaatgaatgtaattgtaaaaaatgttgataatgtcttctttttttttttttttttgcaaaaggcagtacgaattcttcaggatgatgttgcatgtgacatcattaaaataggttctttagtaaggaataaagagagatttgtaaaacgaagacaacggcttattggtcccaaaggatctacattgaaggtattttttaattagtggaaaacttgagtctcttccttaatactttttcagagtaatgaattttaacttgatctcttgatacaggcattggaactcttaactaattgttacattatggttcagggaaacacagtttcagccattggaccttttagtggcttaaaagaggtgagaactatgtattatcttcgattcattttca

SEQ ID NO: 12404 - DNA, 1029 bp, Homo sapiens
ctcaggtaatctgcctgccttggcctcccaaagtcctgggattacaggcatgagccaggccaaagtgggattattttaattgtgaataatgtcagacccacttttgccctgtgcttttctattaaatagaaatcctaagccaggtacagcttcaggcacctgtagtcccagctgctctggtggcggaggtggaaggatcacttgaggccagcctgggcaacatagcgagaccctgtctctaaaaaagaaaagtgctaggggcacctgatttagttagtatattgtctttctgaactaggactgtctcatttgggattagtagacttaaaactgtacagctgtttgggtactgtcttttaggaactataaagtgatcctctgtggttgtttattatgtccttctatttgctatgtacttaacaatattaacaataactatatattaacaataacccaagggtttttttttttatttttctatttggtgttttcaataatattttaaaaggaaaattgcggacatgtaacagttgcttttatgtatttatgtttaaaccagcaaaaactaagcagttctaatttttattcttcacaatttatcttagtatgcatactggcctgctagcttattttctttttgttaaaaacttggaaaagttattaaggaaatttaaaaatgacaaatcatttgttaacatggtgtgagaaaaatcatggaaagtaaaaagtaaagttgagcatttcttcccttcatcatataatttaaactgaagagtctgtcttttttttttttttttttcggttgcccaggctagagtacactggtgtgatcacagctcatttcagcctcaagctgctgggctccagcaatcttcccacctcagcctctcaagtagctgagactacaggcgtgtgccaccctgcccagttaattgtttattttttgtacaaacgcagggggcgtctcactatgttgcttaggttgctcttgaacttctgggctcaagtgatcctcctactttggcctcc

SEQ ID NO: 12405 - DNA, 1825 bp, Homo sapiens
ggtgagtttaattttactaccttaacaaaatgttttttctgtttttgttatacttgatttgtatactcggttattttcagttacatatgtacatagtctgtctctgaacattttggtaatatgttttctgaaaagtgcttatcaagtttcctgtaattctccttggacccatgactgtctcacatatatttttgcagaggaatgcttctttaaattatactatgtgtttgtgctaattgtaaatgtgtttattttaaatatttgcttagaaataaaatttttccctttatactgctatagaaaacatttgaagcaattcacccttctaaaatttgaaatctaaatagaacatttacttctaaaagtttagcagttgaaagattgtcaattgtaatagatttttcttctttgttttgcaaggtgccagatagattggaaaaaaggaaagaatgtcactttgaaaactattaagaagaagcagaaacacaagggacgtgggacagttcgtactgtgactaaaacagtttccaatgactctttctttaacttttttgcccctcctgaaggtaaataatgttttagcttgagtattaacggttgttttataaaaagcattgcttagcttcttattcattgtaatttcttttctcaattttgcagttcctgagagtggagatctggtaagttgaattgttatatatttattgaattgttaagtatatttgaaattaaagcactgaatttcaaaaatggagagtgggatggttgttacattgagttctgaggcctacaatgcatggggcagactttttggatatgaaaaataattccattcaaaattatatcagtgcttctgctgagaaacactgagataaaaagcttaaggttttcttttcttttgaaacttcacatattgctgtgagggatttaacttttcaaaactgttgtcttccttagtaaaaccagaatatattaagtcacttatactgttacattcctaactacattatggttcaaattcattcctgaatttgttactccaatgtaaatatggtttcatattgtgactaagtatgttcacatatatggcatatggcaaagaacatgaaatgttcctgccatatagactgaactgaggaacaaccttaaagaaagtctatacacacaaggtagggcaggtatgttttgaatttggttttcttttgggcatgtttttgaatttaaattaactgagatagtttaaatagtttgtacatatatggaattagaaattaacctaaactgaatacttttgaattggaatactcttggctaagacttagaacaaatttgtaaaaggcaaaagtaagtatttctggcttggcttataggacaaaaaaagagaacataaagcagtgtgaatttcaggtgagaaaaactactttaagtattaagatagagcatcacactattttcatatcagtggatgggttggagtttgtgttcaagtttggggtttttttttgtttgtttgtttgtttgttactaaatattgatgatgacaaaacagtctagttaaggatagaaaacctccacctgtggtttgaattcctccccacccccttttggatttttctatttattagattatgttgttgactcaaacattcatggaattcacagagggtgtgctcattgtttagtatcatagaacttgtatcattgtttagtatcatagaagtgggattattttattttattattattattttttttttgagatgaagtattgctctgtcatccaggctggagtgcagtggtgcgatctccactcaccacaacctct

SEQ ID NO: 12406 - DNA, 1050 bp, Homo sapiens
ttcagtgctgtgttaagtgttccacctctctagcattgctattttatgttgtttggtaaagagaatataatgttttgattaagaacaccatggggtgaggcaatggaccaaattagtatttctgttgcttttcttgtttattatgcttaagtcttcatttttaattagtttttacattttttttttactaaaatggtttttcctacacatcttggtcaccttagtggttctctttggaggggtgtggtagcagtaattttgatgggattaaggtttgttatgggcaacggcggtgtttacacagatagactagaactttgaaggtaatatctggtgactgtgctttttggtttttatacctttgctactttatcatgaggtctaatctatgtattaaataatgtttgctgtcacttaatcaaggaggaattgaaagaaaaggccaagattgaagatgagaaaaaagatgaagaaaaagaagaccccaaaggaattcctgaattttggttaactgtttttaagaatgttgacttgctcagtgatatggttcaggtaattttattcataaatgtaccagtttactttgaagggtaaacctttgaagtttaaatggctgtgatcactgttctcttcagtgttgatctttctagaatgattgcttacttttgaaatagctaatatctgtagaagagaaattacagctttgattaatgtaatcaaataaattagtttattttaaaaaatgagataatgaaatggtcccattgataatggctcattatcgactggtgttttcttataaccctgtgccttttgtctttacatacttagtatggaagtatgatgggaaagttaatcttatagctgcaattatgcaattcccttaactcttccaggagaaatttgcattttaaaagaataccataaagatgttaaactcattcacaatggttacattctctggcaaaccataactgttgtcacctttgggaaactgcctcaagcatttcttgagtgagcccctaccgtctacattgtagtagtacatgt

SEQ ID NO: 12407 - DNA, 1024 bp, Homo sapiens
taaagatttagggttgacaatatgatttacattttgtttatcaatttacccagttacatttctacttttgaaatatagccagtggatcaatgtatttatatctatttgatttttatttactttgaatctaccttttgcttcagataaaaaacctgtcattcactaactccaatgcttcagtttcagtatgacaaaagaagtgtgacttccattttactctgatgctatataactgatttctaacctttcagcctgcctagggtagttaaaagacgagtgaatgctctcaaaaacctgcaagttaaatgtgcacagatagaagccaaattctatgaggaagttcacgatcttgaaaggaagtatgctgttctctatcagcctctatttgataaggtaatgctttctcctactttgtttaatttaacattctagaagacgaattctagaaacataagcagacttggaagaggttaatctttagaactctcattgaaattgttattagaggcagcacttggaggaactatcaataatagcagttaaagttgtggtatgcatttgttaaatttgtaagacttcttagtgagaaaccactggttttagcttggatgccagtgtttttatacagccttttttttttaaatcattttagcgatttgaaattattaatgcaatttatgaacctacggaagaagaatgtgaatggaaaccagatgaagaagatgagatttcggttagtaccaactttattttggtatgtttttaagatgataaaatcttaggacttgtcagaaatgttagcatttaatgatggagtacaatattatataaccagttgtattttttcattttttaattttacgtctttattacacgtttttctattactttatttttaaaaaacagtcattcaagattgtaatttgcatggcaataagcagcggtttcatgggttctaagtttcttaagtgtccacagcagtttaaaacaccacaagtcttatttccaatttgcagcacctgac

SEQ ID NO: 12408 - DNA, 1088 bp, Homo sapiens
tcatcattcctagattggatcaaatacatgtttgaaggctttgaaccgtgcagctttcatcaaccctcgcattgggctcttgtgaagggtgaagatgacagacaacgattgttgcaaggcaggagcagaacttaaaaagctttcttgcggaactgctatcttccagtttgtccgcactgctacctgctgtggccattccctccctaagttgttggttaccctgtacagttaaacacaacctccagtcttacctgaaattgcttatggtgtgtgtgtgcctcagtagttacttcattcttgttctaaagtttctgggattagctttttgggggagcaagaaaagccagaagcccatgccagttcaccaccttggcagaatagtgcttttcacttaaaattaacagaaatagaaagttgatatcttcaagtgtttgttttttatttctaataatcttaagtaaactggtggctaagtaagtgaattatttgatttacaaaagtttgtggcaggaaagtttaacctggattttgtatctgttgcacagattccctgaagttatttaaattttaagtgtgaacatttattgttagagaggtttaatcattctttaggagactcataacctagtgtgtataaccttttaaaaatcagtgccccctgttcacattagcagacatggaatcaacctaaatgcccatcagtgacagatctgatacagaaaatgtatacaccacgtaatacttgcagccatacaaagaacgagatcatgtcttttgtgggaacgtggacggagctagaggctattatccttaacaaactaacacatgaacagagaaccaaatatcgtacattcttacttaccagtaggagctaaatgatgagaactcatgaacacaaagaaggaaacaacagacactggggttacttgagggtggagtgtgggaggagggagaggagcagaaaattaagtattgggtactgggcttaatacttgggtgataaaataatctgtatagcaaaccttcacatacacccctaaacctaaaataaaattttaacaaaatagtgcttcacagttcattgtatg

SEQ ID NO: 12409 - DNA, 1191 bp, Homo sapiens
tgtcttgatcttattaagtttttagaatattaattttgcttttggttttccttttccatactgtcttttgttactgctgctgttatctcttttttaggattgctctatgttattctttccagttttttaaattgaatgcttaattcatttgatttttattttttaatttgtgttttttatggccttaatactcttacttttgtaaatgttgagtgtgaagatctgtatgctgaaattaatagctcaagcttattgtattgttcagcttctctttatttctgcttattggttgtctgtttgacctgacagttttttctgtcatttgtagattgaaatattttggagccatattaggtgtatgatatttgtgatgaacatttcttgttctcttgtttcattttactgatatgtgtcttcctttgtgttttataatgttttttgggggggtcataatttttatttgtctgatattacaataataacccccagcttttatgacaaggccttactctgtgatccactctggagtacagtggcacactcatggctcactgtgatcctcccacctcagcctcccaagtagctgggagccacaggtacatatcatcatgcctggctgttatttttgtagagatgggggtctccctatgttgcccagactggtctcgaactgttgggcccaccttggtcttccaaagcgctgggaatacaggcataagccatcacccccagcctctttttttttttttttttttttaaacttttaacctagtatgtcttttttttccatcttttcatctgtgtgtcttcctctagtatcagtgtttgctgcttttattttttggatacagtgtctcgctttgtcatccaggctggagtgccatggcacaatgacggctcactgcagcctcatccttcggctcaagtgattctcctgcctcagcctcccaagtagctgggactataggcatgcacaaccatgcctggctaatttttgtatttttgtagagatggggttttgccatgttgcctgggctagtctcgaactcccgagttaaagtgattcacctgcctgggctccccagagtgctgggattacaggcatgagccaccacactcggcctcaatgtttgcttctttattattagttgcatttcttagaagttgtattgtttttggatttattgctgc

SEQ ID NO: 12410 - DNA, 1169 bp, Homo sapiens
cctttagagtctacctttgtattagttgtacgtaggcttccagttccttttttttctgcctcattttttgagccaggtttgtttgtttgtttgtttatttatttatttatttatttatttatttatttatttattttgggtcctcctccagtgacatgagctagttttttttttttttttaaacactattcactaatcaatccattgttcccccatttaggtgtaccacctaccttcattgcatatcaagttgtaaacacccgtgtttgtctttgagcagcactcttatgttttattggtctttgtctcttgtcattgtcatacttaattactatgactttatagttgtcttaatatttggcagggcaggttgcatcctttcatacttctcccccaatcatccacatttttgacagttaagtttaccagggttgtcaacaagcaaaaaaaccttaaaacgttgataggaattatattgcatttgtagatttacagaattatatcttttaatattgtctcatccacatacttctaattattcaggtcacattctgtgtctttagtttcaaagttatcctcatagagtctattggttaagttaatttctgtatattttgtgtggctgttgtgaatagcatcttttttgtattttctgtttggctgttcttgatttacagaggattgctgttttttttttttttaagttgctcttgtatccagtaactttgctaaatttattgtagtaatgtgttctgttttgccccccagtcacaagattttatctgcaaataatggcagttttagctctgttcttccacattacattataccacatacttttctttacaacattaccaggactttcactactgtgttaaacattagtattctttgtcttatttctattcatactgggaatgaatataaaatctccattaaattcagtgcctatttactgttttttaatctgacctttggtttttttttttaactgtatcaattaagatgctctattgaacttttcccttcagtatattaagtaaatagtaaatacatgttttggaaatacttattttggatatcaaactagccttgcattcctgtagtaaattgaatcatgatgtgttattgttacattgttgagtaattgaattttacagttcttactt

SEQ ID NO: 12411 - DNA, 1469 bp, Homo sapiens
gtgtgtgtgtgtgtaaggggcgggtaggtatagatacagcaactcaattagaagtcattgtttgcatcctgcactgttggagtgacttggtgtacttgtgtcaaacagctgcccatgagttttgtctgaatttagaaatgttacaggttgtgatgtggtgcttataacagtatgtttagtgtttaatatatggagaacatgtagtgtgtgtctttttaaagatccactccttcaagcagaagagccatttattaaatgtaggtaatattcacaatttattttagcagatatttttaaaaggagtggtggtgggggattgtactacttagggtatgtcttgtagatctgcgccaagaatattaaggtaccagatgactcagcttttcatttttaagccggatggaagttaattgtgaaaagacttcagaacttgtattaatagcttcagcttttgtttagtaacattttcttaacagatacagaactgtatcctcagtgaccaatattgatatttaaaaatctgtattggttatcctggctgtgtgtacatcatctagtaattgaattattatcagaagtaaattgacctcaaaaaaagtaattgggaaaattaagtttatggcactttgtgtaataactgtattgatgatgaagagaaggttagtactgtaatttgttttgtataagtctagtgcatatttggattgagtatgtttttaaaaagccattgaaaaccacattttgtttggctttagttacagtctttgactgtcccaactattaactttattaactttattcatacacatagaaatacattacacaagcatcaaacataaacattcagatcactcacttcatctttctcctgggcctaaaactgtcagtatatttgcagttttctgatatgtgttgtctgcattcagaggactgtcaagagtcatagataggcatctgaatgaagctttgagcttcttaaaatgcaaggtgggtgaaacacaggataccaggaagagaaaggatattgttcatatagttgtggcagtggccttgagaactgtcttgactagagatagattaggaatctgaattattcctgaacattgggttttcctttagtgtattctctttagctttccctgcccgtctctactcattagatataccagcaatttatgggccagttaggaaaacttcatgagattggattgtcctattaaaaaagcataatacattttcataaaatccttctttcgatgcccttttttttttaaagcacgtcagctaactgttcagatgatgcaaaatcctcagattcttgcagcccttcaagaaagacttgatggtctggtagaaacaccaacaggatacattgaaaggtacagcttttccatagtccttatttatctttctataatcaacgttgcaggcgtatctatttttaagaccatctaggatttagatatgca

SEQ ID NO: 12412 - DNA, 1056 bp, Homo sapiens
tagatgtaatctcatgttcaataattagatttttggtgattttttttttttaagatgaaatgggaaggatgctatcttattaatttttaaccttctctttgaatggtgctatcatcttggctttgttctaaacaagagctagactcagaagtcttcactttattctttctcacctccactgtgaagtaaagaaaaggaaactccaaagatagtataggctagtattgttgctccacagccataagggatccaggactcttctgttttcctaactcctttttctttagctggtggctttcattctctaggatgcctcctggtccagtgtggctgctggagcttgagccatcacattcatattctaagtgggagggggagagggattaagataaaggcttcccagctatctaccatcctgttaaggatacttcctcaaagaaatacagcatttctgcttttttatcttgctgtcaaaatagtgtagctaaaggtaggctaggaaatgtagacttttagcttggtgtgttgccatctcatataaaatgagaatgttgttactaagaaggaaaagtaaaatcagtagatattcggttgaatgcacgtacttgttgacatcacattccccaaaaacctgcaaaaccaattttataaagcttcaaaagtataaactttacatttgaccagatgcttttaatgaaagtgtaagcacttccagtgtgtacttgtttacatatgaagttagaaaacggaattaccttttgaatttcctatttcatgtctttgaaagagatactaattttgaaaatgaattttaagtttttctgtaactttttttggtaattggtacatttgaaccttggtgtgatactatgatattatagcaaagaacagtctgaacttgatcaagatttggatgatgttgaagaagtagaagaagaggaaactggtgaagaaacaaaactcaaaggtattactttaaattacttcaggagccagtgattgctggcacatgtctactagagggtagttataagtaccagtctatttttttggacc

SEQ ID NO: 12413 - DNA, 2587 bp, Homo sapiens
acgactattctacctttatgccggatagtttgggtgtaggatagtaagatgggatcatttttcttcagaattttgaaggcattgctccattgtcaccttgcttccagtgttgctgtgttgaagttcagagtcattgtaactaaccatttgtgtgtgataattaagaaatatgtacatttacactatatatacatttctggaagctactctggcttcagagttctgaaattttcacattattatttttttctcttaatgttacatattcagtggtggaccctttcagtgcagcaattcagtggcttttagttcagggatattcttgattgaactttgtgattgtctcatttgttttctctttctggagctactattagatgttgtgtgttggattgctctcatgaccttttgtcctattttccatctctgtctctttgctcttctttctggacagaactgaagactttcagcttgtgttgagttttaaaatttctgttgttttagtttccaagacctgcttcgttcttcctgtttttttgtttttttttttttttaaatagcatcctcttcttgtttcattgatgataatgtcttttctctggatgtttcttccatctttatagtccatttgctcttacattttctttctctcatttgttttggtctcaatctaggatgctttcctcaaatataaatcaatacttggttggctgctcattaagattggattgggtggggtgtagggacacttcagacatgtttaaaaaagaaaattgattggaaaatttgagcgttggagtggggaggcttgttaatttgggatttcagtgtagggtcaccagagtgggcatttgttagaaaccccagtgttagaatggtcatttttttttttttctgggctagtcagattcatcgttgaacagtgtctgggtaaagatctggcttctggtgttcctttaaatgtagaggaggctctacatttagcattctaatgtgtacatagtcctatatctttgatactgttgactgtgtctgttgtcttccagtccaagttctgaattttaccctttcctgagaggaaactgaatatttctgctagtgtagagaagatctaatgatttaactgcttatcagtttttactttcttgttttagcgaccttctctcctgtcccaccccttgccctagttctagaaatgtacctggtgctaccagttcttatccttttgaagactgattgggctgcttctcagctttccccactgctaatcttagatttcagttctctcaatgaaattatcacttgtctggtttccagcttccaaaatgttgctgcccttgttttctttgatttcagtgttagcctgctaacaaaacaaaacaaaaaaaccctttatcataattttagtggagattttagaaggattaagatcagatgagtttgtggcatctgccatcttaactttgcaactctcattttaaactttaaaaagagtaaattggttgtgacagcttgatttcccccttccttattatttaattttggatgcctgttagccctgggagggtggaagtcagaggggagtcttgtgcttgaaaaccagagtcagtaaacctttctctgtaaaaggcttggtggtaaacattttcagcattttgggccacatacgattctctaactgcagttggccctctgtgtctgtgggttcagcatccatgagtttgcatctatgaattcaaccaactgcagatggaaaatattagggtaaaaaacaataaaatataacagcacaataataaatacaaataagcaatagaacataacaactattgtttgtttgttttgtttttaatagagaattcttactgtgttaatcaggctggtcttgaactcctggcctccagtgatcctcttgccttggcttccggaatgttgggattgtaggcatgagccactttgtctggcccagcataatacaactatttacataacgtttatatggtatatagtattattataagtaatctagaggtgatttaaagtatgcaggaggatgtgcataggttagttgtaattactgtgccattttatataagggacttgaacatcccaggattttggtagggaggtttcctggaaccagtccaccatagactctgagggatgactgtactcaactctgctgatgtagtgtgaaagcagacaatacataaatgtagtgcatctgtgttccaataaaattttatttacaataatagggtgggctggatttggccacatgggcatagtttgtggacagctgttttaaagcctttggatatagatgttcaattgattaaagacacgagaggaggagatgctccagttatctgtaaccagtgaccgttaagtgtgtacacttatcaaacacttaaagtttatactaaatcaaagttcttccagaaataggctgggcgtggtggcttatgcctgtaatcccaggattttggaaggcggacgtgggaggatcacctgaggccaggagtttgagaccagcccagcctgtctctactaaaaatacagaaattagccaggtgcagtggcgcac

SEQ ID NO: 12414 - DNA, 1030 bp, Homo sapiens
tacattacctttgattgaataagggaaaaaccttttatgtatagggtaccatttaaaaatcgaagggaagtaaatgacttttacagttattttcaaggcactcttgtgtttcaagcttgtttgaagttgcccaagtttaaataaatggcctaaatctatagtttagttctaagaatactgtcctttggagaatgtatggaactaaaccctggtaggtggacttggacatcttctgtcataaaacctgactttcatagattctccaagtcaacattatgttagtaaatagaaatttaaaagttttcactataccaatttgaatatctttctaaattttatctgctacaaagtgcctatttttatattaggcccattgatttgcagaattataaagctaatactgaatatggtaaattactgcacttggcctttaatgagatttttgaaacgaatacctgtaccataactaatgtaatccaaaatgccatctcattttattcagcttgctcctgttggctcctggtaaaactgagttgattctaaattctcaaaatatattcaaaactaagggtctttttgtagaaggggctaaagaagcagtatctgttggacttcaaaggtctgaagatgtcaaaatacaatattttattcacttcttggttgtaaatttgaaacaaaggattagagagaatgactcatcaatatcaaaatattaatgatcagtgtattcagatcttcaagtttaatcaaacctgtaattgtgttctcagtttagtctttgggtaactatctagcacctgtatggacatgtatcttatgtcatgagcaaaagaggcaaattggttgcttagatgtagaatgttaaattgtgatgagagctataaaggaaggaaagggtaaaggggtcaaagagtaatacagcgtttacacaaaggaacctgttataatttgatgattttaagttccatttcaaactagtttcatctaaataagtttttgggcagaataggggttagaaggagagagttgt

SEQ ID NO: 12415 - DNA, 1209 bp, Homo sapiens
ccggcgagttgcaggaattaggccttgacagggagcgtccgccgtctaggctgcggcgagcgagggaccaggcgactggcgccagccctgagcgttcccagcacaacgccgaagggggcggggcgggccgggcgccgggcacgcgggccaggccttccccacaactgatggggttgaaatttcctttccggctcagcagggagaaaagatatggtggggtgcttaacagaggaggttagacaccggcgggaaccagaggagcccaagcgcggcgcctgggcctcggggctgcaggagtcctcggtgggggtatggaggtcgccggggaaggaggacggttcagttgctaggcaacccggcctggacccgcctctcgctcgcgttgctgggagactacaaggccgggaggagggcggcgaaagggccctacgtgctgacgctaattgtatatgagcgcgagcggcgggctcttgggtcttttttagcgccatctgctcgcggcgccgcctcctgctcctcccgctgctgctgccgctgccgccctgagtcactgcctgcgcagctccggccgcctggctccccatactagtcgccggtaacggatgggggcctggaagggaagggggaacgtggtgttggctgggcggcctgcgcagatgggagggccggagggatggagggactgggagccgggagtcggggccgctggccgcccgtggcctccggggtcgtcctgtgaggtcggacaggaccgcggagtccggaccccggagcctgagaggggccccggggccgaccagcgcttttatcggggacggctgaggcgacgtaggggttggcgcggcctggaggcctaaggttctctgagctccaccgtcttttccgcgtggaccggagcgaggccgcggtgacgcccgggtgccctgagactcggctgcgccgcgaggaccgggaggcccccggcgtacgggccgggccgagtgcagagccggccgcctcttggacacccccctgcttttccctcaaaaataataccaggagggaggccgctgggagatgaaaagaacggcggaggctgcgaattccgacgggagggaggggctgtggagggacgagtccccgaggcggggagggggcgggggaggctgcgacgctcccgggctctccgcccattgggggcggccgcgcggggaggggaaacccccggcg

SEQ ID NO: 12416 - DNA, 1049 bp, Homo sapiens
gggcttagggttgccgctccaggcacagctgctggaaatcctagtctgttttttctgccttcgcgtacaacgggccagctcaccccacctggcaaagctgcagggcttttccaccaggcggacagaagggcagccctctcgcccaaccaagaagccgtgctaccccggcttcgactcctggcttccgggttttctccccgcctattccgtttccggccgttcccacccctgttttcggtcggcccgggtgttctgcaagctggtcaaaaaggggaagcggcccagatatgttaagttctatggccgctgcagggtctgtgaaggcggcgttgcaggtggccgaggtgctggaagccatcgtgagctgctgcgtggggcccgagggacggcaagttttgtgtacgaagcccactggcgaggtgcttctcagccggaatggaggccgcctcctggaggcgctacacttagagcatcccatagccaggtacccgcgtcccacacgctaacccgtagccgggcaccccaggcagcctctgtggagctcttgtcccatcctgaggcgatgcgtacttagaaagactgacctcgggtgaaaccgctgtatgctcggaattagagccctgcccaagggaacactcctgcaccccaaatcttaccaattctcaagaccacttctccccactccacccaacggtggaatcttggaatagagcagagttttttccaagaaaggaaaaaactaaggatgtatccaaggaacaatattctcattttatgcttatggctgtgtaaacatggttttaagatgtgggaagccagccttctgaaaatgagttgctttatttcttttttgtacaggatgatagtggactgtgtttccagtcatctcaaaaaaacaggagatggtgcaaaaacatttattatctttctttgccatttgcttagaggacttcatgcaatcacagacagagaaaaggatcctttgatgtgtgaaaacattcaaacccatggaaggcattggaaaaattgttctcggtggaaatttattt

SEQ ID NO: 12417 - DNA, 1015 bp, Homo sapiens
ccttttcgatggaatcacactttttggctgtcaccttgtgccatatacacacaaaattttgtggaaggcagttttaactttctgaagaatatctgtcaaaatttaagaaaacaaatgtataaaattccattttttccagtgtttagcatttctagtaagcagtgaggttgtttgacatacagtgatgatggcattattgataagccatacatgagactgcagattatattgaatcatattaaatgtacagaaataaaatattagatttatatcaaattttccaatttgaaccagtggggaaaatcccacagaaatcagtaagtttacatttcaatttctatcttatttgactaagtggaaagagattctttaaaatgtataacctgccattatgtaatttggtttcattttattctacctgttgtgtgagtttagtatatttaatttactttttgttactctttacatactgtttatttttgttagtttttaattgaagatggactgttgaaattgtataggaccagtgtcttattaatatgattaatatatttagaagagccacgtgaaacccatgacaaaatgaatgtgaatattctttctaaaaatttagaaaatgttatctttttgcatttattatgtaaaactgttttacagtatcaaaatttttcacttaaagaaaaaaaatgccatgaaacatttgaactgatgagccacagaacttcagttgaaatttttttcactttttagcatgctaaatatacatctgagtttaaatgttctgtttaatggccattcataaattcaagcactaccactggtcagttttgtgtgatagaataaaaatatgttacctgcagtgtaagtacagcacactgtcaaattcttttccttaaggtgcacagtaaatgtacagatagttataggccactgttttgtaatgtagtacatttctaatctattattcctaacctattataactgtttgcagaaagaaaagaatttttctaataat

SEQ ID NO: 12418 - DNA, 1059 bp, Homo sapiens
tactaaaagcaacctacagattcgccacaatccatgtcaatattccaagcctatttttttgcaaaaatgggaaagcagattttcaaattcacatggaattgcaaggggccacaaatagtcaaaacaattttgaaaaagaagtataaagaggactctcacttttcgatttcaaaacttactataaagctatagtaatcaaaggaacgtggtacttatgtaagaacaggcatattgaccaatggagtagaattgagtgtctaaatgtcaagccagacatccatggtcaattaattaatttatttattttaattatactttaagttctgggatacaagcacagaatgtgcaggtttgttacataggtagacacgtgccatggtggtttgctgcacccatcaacctgtcatctacattaggtatttctcctaatgctatccctcccctagcctcccacccaccgacaggtcccggtgtgtgatgttcccctgcctgtgtccatgtgttgtcattgttcagctcccacttatgagtaagaacatgcggtatttggttttctgttcctgtgttagtttgctgagaatgatggtttccagcttcatccatgtccctgcaaaggacattaagtcatccttttttatggctgcatagtattccatggtgtatatatgccagattttctttatccaatctatcactgatgggcatttgggttggttccaagtctttgctattgtgaatagtgccaaaataaacatacgtgtgcatgtgtctttatagtagaatgatttataatccttcggtatatacccagtaatgggatcactgggtcaaatgttatttccagttctagatccttgaggaatcaccacactgtcttccacaatggttgaactaatttaccctcccaccaacagtgtaaaagtgttcctatttctccacatcctctccagcatctgttgtttcctgactttttaataattgccattctgactggcatgagacggtatctcattgtggttttgatttgcattgctctaaggaccagtgattatttttttt

SEQ ID NO: 12419 - DNA, 1035 bp, Homo sapiens
gaatggactcaaccaagtaaatattggtccttcagtgacatgtgaggctgaagacttctaacaaaattgttaatgaggctgcttggccactgcctaacattgcaaatgctagaaatcacacagtgcctgaatccaaaatccatgtttatttttttcaatcacaattttcacagagcccctaacaacatctcaggttctgcagaataccaattcagaaaccttggtttggagagtttccaaaaactactttagcgaagacccaggcagtgtatcaaagaataggaaaatgggggaaaatgtgaccaggttaagaaaaacagaaattgatttacatggttgaaaattgattacatggttgttttgtcatccatttaaaataagaattatgttttccaatcatgtttcatactcggttattggttaataaatgtgagagagaatttgtgatacattttttaaaatttttgtttaccgttttgtgttttagggcagctcttgaagaaaatccttatttccgtttgaagaaagtagtgaaatggtatttgtcaggattctataaaaagccaaaggtaataatgtttgtttacattttattgtctttagtgttttatgaattctttatattttatgtaatctgtagattgtgtgttaacagttacattactgggcttctttgacgtagcaaaattgcaaaatacctgatcatttagacatgtattatgattgaagtcatttaattttatttaatgtaaattttatttactttgaaattttataaggacggttcccagatggtagagttaaacccattttgactagtttaaactattttgaatcctttgtatttgtaatttgaaattgcttttttttttttttaccagggactgaagaaaccttataatcctatacttggcgagactttccgttgtttatggattcatcccagaacaaacagcaaaactttttatattgctgaacaggtattagaaatgcatgtatggaaacaaaactgatctggaagttattggaatattt

SEQ ID NO: 12420 - DNA, 1033 bp, Homo sapiens
gtaacttaatagacaaaaatctgatagaaaggaagcattgtgtgatttactgaagagttagcagttcagagttttcttcttcatcctccatggacatattaacacctttttatttgttagtggtctttatggtactcttaaagatatatttaatactttttatattttactactaaatgttaccatttatgagacatatacattgttttggttttgtttttttttatgtaagagattcgagtacaaccttttttattcctcctttaacacttaattcatgaagcaaatatggagagagaaaaacttaaatgatatcaaggtaactttaaaatcttaataattaataatggattttgtcctcactttcatgctttcatgtttcatagtttagacaaggttggtatagggaatcttctaaccttccaaagtttacttttatctgattttttttgttttgttttgtttttgtttttgagatggagtctcgctctgttgccagcctggagtgcagtggcacgatctcggctcactgcaacctctgactccctggtataagtgattctcctgcctcagcctcccgggtagctgggattacaggcacatgccaccacgcccagctaatttttgtatttttagtagagacggtttcaccatgttggccaggatggtctcacactcttgccctcatgattcgcttgcctcggcctcccaaagtgctggggttacaggcgtgagccatcgcacctggcctcagattttttttttttttttttttttttttgaaacggagtctcactctgtcgcccaggctggagtgcagtgatgcgatctcggctcactgcaagctccgtctcccgggttcacgccattctcctgcctcagtctcccgagtggctgggactacaggcgcctgccaccacacccggctaatttttgtgtattttcagtagagacagggtttcactgtgttagccaggatggtctcgatctcctgacctcgtgatccgcctgcctcggcctcccaaagtgctgg

SEQ ID NO: 12421 - DNA, 1025 bp, Homo sapiens
gagcgagactccatctcaaaaaaaaaaaaggaaagaaaaaaaaaagaaaaacagaaattaaactagaaagctccggattcaggtagataccgagttctaccaaccgttaaatgaaagaataattctagtcttgcacaactgctttcagaggatggaagtggagagtgagaagaacactagtattagtataactttgacatgaaattcaactgaaagagattgtcctataatttttccaatcagtaatgaatatggattacaacactccttaatggtagtagcaatatctttttataaagaggacaatgcgttatgactaagttggatgaaaatctaagaaagcaggattgacttaacattagaaataaatgtggttcactacactaacagattaaaagcagaaaaaataatatgattatcttaatagatgtgggaaaagttttgatgaaatccaaatttcgttttgttaactcttagaaaactagaaggagtgaacttccttaaatatctgtatcagtacctgttccagctggacatggtggcttatacctgtaattccagcactttgggaggttgaggtgggaggattgcttgagcccaggatttgaagaccagcctgggcaacatgatgagacctcatctcaacaacaacaacaacaaaaaagtcaggcctagtgacatgtgtctcttgtctcagctactcaggaggctgtggttgaaggattgcctgttacaggaggtcgaggctgcagtgagctgagatcacaccactgcactccagcctaggcaacagagcaagaccctgtctcaaaaaaaaaaaaaaaaaaaaccagaaaaataaaccctgttccttaaatatatatattaatatatgtaccaatatcaatatctatatccaaatatatatataaatacacatataaaaatatatcaaaaatctacattaaacattgtacttaatggttaaatattgacagttttgagattagaaacaagaatgcattcaccatttctaggcaatactg

SEQ ID NO: 12422 - DNA, 1028 bp, Homo sapiens
tcagtttttattactgctgttgtgatttggctttcttggatctgcaagaccatgactacttgttcatctcgagctttgcagtgtcaaatttatgttgttaatatatcctctcctggatatgtacttttgggatatatatagatatttgtttatttttttaaaataccccttttcttgattttacttgagttttaggagggaacgcatttgttcagtatcttcattttgccattttaacctagactcttttaagactttgtgtatcatctgatttaatcctcataacaatcctataatatcagtactactattagcattgtatacgtgagaaaacaaagactcagagaaattaaactgtttaagtatttctaggaaagataaaacagagatttgaatgcagtttaatttcaaatcctgcttaactattatactagcataatgctgtttgtgatgttctttatgcctttaaaggcaagcaccattacatgaattataattatttgttgtctacagttaataataatgtacattttatgatatggagaaaagcaaaaaataataataaccaaaccaacccctaaaacccacaaacttgttgcagttatgggtattagtggtaaacttattctccattaattgattttgaaatgcctttgcccaagaaagaatatgtcacatacaagaaattgagttttgcctggtgcggtggctcacacctacaatcctagcactttgggataccaaggtgggtggatcacctgaggtcaggagtttgagaccagtctgcccaacatggcgaaaccccatctctactaaaaatacaaaaattagccaggcatggtggcaggtgcctgtagttccagctacttgggaggctgaggcaggagaatcacttgaacccgagaggtagaggtggcagcgagctgagattttgccactgcactctagcctgggcgacagtgagactccatctcaaaaaaaacccaaaaaacaaaaaagaaattgagttttgctttttcatgtgttct

SEQ ID NO: 12423 - DNA, 1090 bp, Homo sapiens
tcttgattctaggtgaaatgatgggaggagagagtcttccttgagaaattctaaacacaagcacatatttatatgagtttggggtcaaaatccatattatctctgtggcagaaacacccttcagtttagtttaaaacagtttgggttattagtatacacaagtgcctggaagaactgacacaaatcttctttagagaagagtattttaaacacagacttcaaagaagtgtatatgagctcataatttaaaatcaataaaaaattaaaatgagatgccattgtgcacctgtaagaaagagtagcttaaaatctaaaataccgtcaccaccagatgctggcggggatgtgaaaaaaaaatcatcaatacgtgggataacgaaccattttcagagagaatccacatgaggtacctactgtgcagctgtataaagtctgcatcagttggaactatcagttgcagaatgaaatttaatgggtgagagtcatttttaaaagagataaagctgaggatctttcagaattcttgaaagacaacaactgtctgattaaggaggccccacaattcccaagcaggaaatctaaaaaataatagccttaatgctgatatttggcaagaagaaaggctcagaagtaatgaactagaaaaagaataatagagtaaacccaaagtaaacagggaaggaaataataataaagataataagttaattaaatagaaggcaagacacggttgagatcaggaaagatgatggttgtttgtaaaggctaataaaattgtcaaacctttggcaagcttaaggggaaaaagaaacattaggaatgaaaggggacacaactaaaaatacaagtagatgtttaaaagatattataaacaactgtaagccaataaatttcaaaaacttaatgaaatgaacagatttctggaaaggtgatttcccaaaactgactccataattagaaaatactagtgatttttataatctttaaagtaacctaattagtaatacagattacttttacaaagaaaacatgaaactcaggtttacaaacaaatcctaccaagcctttagggaaaaaaaaaggtaatttc

SEQ ID NO: 12424 - DNA, 1047 bp, Homo sapiens
cccattacatgttaatgtaagtaacatttttattaagaactacagtgttttctttccctctactccccaaaaagttgattgagaaggttggtaatggtttatcccaggacttctcaaccttcgaactattttcaggacttctcaaccttggcactgttttggcctggaaagttctttgttgtggagggctgtcctatgcattatatgatgtttagcagtatccctggcctctacccagaaaatgtcaatagcagttaccccagttgtgacaaccagaaatgtttccagatgttgccaagtatcccttgagggacaaaaccatccatgattaagaactgctttttggcggtttttgcaaatcactttaatgtctagcttaaaagacacctgcatttttgtatctgcttctgcagtctgttgtgatgtgatgatccgattgaagtatatgaataaaatctggtctcatgcatatatatatatggggggggtttatacataattatagatattctttgataatatgccaaaacttgactagtagtaattttctttatgttaattgcaatctggaatctgaaacgctgtcagtacacttttcatactctgttaaaattcactcttgaattttgaatggctctttactcatgcatgattttgtaacatcatgcattagtcatttggaaaatatttgctcactgaattatgcagatcttccaagtgttgacacattaaaaaatatagtacagagaagggctttatgtatgcttctcattctgttgcacagaatattaaaatcttacgtactaaaggttcaagagcaataatttttacttcttcatcaaggacatctgtaagtgaaactgtcattcttctgtgagtgcatgactgaagaattcagtgcctactactccagtttggtgcctctgccttgatttatgctaagttgccagcagttttacccaagattgcttttgtgccatcaatgaaaatggcaacataatgaaaaagtattatgaaactagttttcaccttgcagatcctctagaa

SEQ ID NO: 12425 - DNA, 1045 bp, Homo sapiens
agaatcttaaaaatgatgttaagatggtggtatcctcatcttacagatgcagaaactgggataaagagaaattatatagcttttcccgagctatacgacaagtagacgatggagtcaggacttgaactcaggcctttgcatatcgaattacattttctttctatgagttttagggcattatgtgtttagcgttaattcatactggatgagataacattgttatagatgaccatatacgatgcagaggggatcagaagagtcagttatttgagtggagttgaaaagtcagtatcaaaaaagttttttaagacaaggtaatgcttaacctgagtgttgaaaggaacttaggtatttgcctggtgaaggtgagaatggcattgtaggcaaaaggagctgtgagagtaacaagtaaattgttcaacaacatggtatgtttgaagaagtgaaagtcattttcagtttgtcacatttgtgaagtgtaggattgatgggtgtttggaggaatgcatgacataagattgacaaaattgtgaagagccttgaagatggggttaaatgtttttctctccaattttggtaggctgtgggagtgcagaatcattgaagtgactcaaccatgttgttgaacaactttagaaggctctctatgatatcggtatggaagataaattgcttaagtgtaagaaattcaggtggcaggtagtagcagtaactgtggatatgagaaataaagggtaaatatgagagactacgtagagctttaggaccttgtcctggacttaatattaggagtggaggagaatatagatgaggaaaataaaagtgaaggagaaatttagagcgacttacaggtttctgtgttgtgtgatttggtgggaggtaccattccttaagggagaaaatataggaagaagagcaggggcagagaaagggaagatgaagtcggttttggacatactgagtttgagatgtgtatccaagtggaggtgtacagaggcttggtgtcccatacagtttctcatttaatcctttctataatactgta

SEQ ID NO: 12426 - DNA, 1038 bp, Homo sapiens
aggccattattctttcctccagagccagtattaacctctggagtaacctaacctattggaagtgggtcctgttgttggataacccaaagtctgtggtctgcccaggcatctcacccgaggagttgccagctagattgaagtcctaaataatgaaaattcttaagttgcagggatctccttatgtaaagttaaaataactgtgaagattttagtcactagtttattacttacattcttattttctcatgttaaaataacttcatcttcccaacagctgcttgctaactctaacagtttgtattaatcatacatacaagattgttaatagaagttattcttgaactgaaatggagtagtagaacgtatcccaatatacccattactcatcttcaacaattatcaacttggattgacattgtttcatctatactcccaccttcctaagccagagtttttgaacaaatcttagataaatcattgtattcataagtatttactgtccgtatatatctccaaaatataaagactttaaaactttgatcataaatacattattcctaaaaattaataactctttagtcagataattattcagtgcctacacttccctagttctctcatattcttttttttttttttttttttttttgagatggagtttcactcttgttgcccaggctggagtgcaatggtgcgatctcggctcactgcaacctctgcctcctgggttcaagcgattctcctgcctcagcctcccgagtagctgggattacaggcatgcgccaccatgcccggctaatttttgtatttttagtagagacagagtttctccgtgttggttatgctggtcttgaactcccgacctcaggtgatccgccagcctcggcttcccaaagtgctggggttacaggcatgagccaccgcgcccggcctctcatattctttttatagtaggttgttgtgttggacttagttgataagtcacaagtctttttgaatcttttaaatctctccgatatctgttaatttttacctttc

SEQ ID NO: 12427 - DNA, 1085 bp, Homo sapiens
taattgtgtatttccagacaaaaaatttacttttttccccaattattttattatggtaaaataaatcatcttaaatcatcttaacccttctttagtataaagttcattggtattgtgtacatttatattgtataaacatcagtatcatccatttccagaactcttcgtcttgcagaattgaaactgtatgtccattaaacaataactctccattctctcctccccctgtcccctggcgatcatcattccactttctgtctctacaattttggctattgtagatacatcataaaagtggaatcatagagtatttgccattttgtgactggcttatttcacttagcataatgtcctcaatgtctattcatggtgtagcatatgtcagaatctccttccttttaaaggctgaacaatattccattgtatgtatataccacattttgcttgtgccttcatttgttgatgggttgtttccacattttagttattgtgaataattctgctgtgaacatgggtgtacaaatgtctcttcaagactctactttcatttcttttgtttacttacctagaagtggaattgctggatcatatagtaattctgttttttaatcttttgaggaaccgtcatactgttttccgcagtggctgtaccattttacattcccacctgcagggcacacaagttccggtttctccacgtagcatacatcactttttaatacacttattttggtagggagaaacattagtcttgttatttacgcccctttatagtcacaatatgtttgcataattaggaattgagttttgactgttgtggaaacccaaggtatgtgttttgaacagttgagagtattattattcacactatgctgagtggtgagttagtgggtgtaagaaagatttggaccctgctgttggattcttaaaatataagaagtgcttttaggaagaaaatggctggataagtaaggtgatggaaatagatactttgctctttctgatacattattcttttgagcactttcttgtagagcagaagaatgtcaaaattttacctgctcaaattgcttctcttccacagt

SEQ ID NO: 12428 - DNA, 1029 bp, Homo sapiens
tgggtggcccaagacaattcttctcttccagtgtggtccagggaagccaaatgattggacacccctggcctaaacaaatacacgttttttcccctgtaatctcagctgtcatgtccacaggttgtctctaaattatgaaaaccaataaatagtgttgataccatgactgtgtaagtattatttaatgctaagccagataatgtgcttagatgattattccttttctgtccctgggctgccagaagaaacatgttgataatatagagaattagtagactttatttattttatcaattctgaccatcaaattaaaaaaaaatttggatatgaccaaaatctaactttggaattaaaaaagtttttgaataggacttcctgtttttcttagtgtcttaaattgccctcttttcttgtactatatgcctctattatagcctcccctacaccccagcccccccacaccccaactcttcagcatactgccttttgtgctgcattctctatttatctgtatttgtctgtaactctgcctccatttggactcttctaggtcttttcttgtaacttcctttctccttactcttgaattggatccattctgttatacatatttttttttccttttttttttttgcatctgcttgatctgtttattggagtacatcttcaaataactctttgaaaaagaagtatgtatgagaggcaaactttccgaattctgtgtaaaaaagtctccattctattctcacaaatgattgataatttggctgggtacaatattgttagttagaaataattttcctttagaaccctgaaaggattgctttgttgtcttctagcatctagggatgctgattagaagtcatacatcaacgcctgtaatcccagcactttgggaggccgaggcgggtggatcatgaggtcaagagtttgagaccagcctggccaacatagtgaaaccctgtctctactaaaaattagctgggcatggtggcaggtgcctgtaatcccagctacttaggagtctga

SEQ ID NO: 12429 - DNA, 1090 bp, Homo sapiens
ataaacgaaacaaactaaaaataaagcttgaggcttctggatgttatattctgatacatttctgaagcaactgtcatatccatggaggaatgtaaataatcctcgaatgtagctggccagtccagatgctgtctcatggcttttgggaagccacaggataaaccaggaatgtgagggagcctcagccttcaccatttgtaggccatgtgtctgtgccaccattgttctaaggaaaaaggcatctttggaacatgtgtaaagtctaactttttcccctgcagtggtttgcaggaaaaatttagatagcacaacagtggcaattcacgatgaagagatctactgcaaatcctgctacggaaagaagtatgggccaaaaggctacggttatggccagggcgctggcacgcttaacatggaccgtggcgagaggctgggcatcaaaccagagaggtgagttgggagaccgttggttaccttcagaaatgagttgcgacagttagtgccgcttgctgaacaggaacctggcagtctccagatttttagttgaaactaagcaaataaaatgggactctgattttctaatgtcaactagttcaaaatattgagttttggacctaacaaagttcttattaataattccagtgatttctacttctggctttatagcattccaagctgtatcaaggagtcgtgttctcaaaagcaagtgatttgtatttacttcaatttcacagcaccttggagaccggatgtcatgaaattaaatggtagagaaatgtgctgtgtgaatcatgagaggtgtttctcatgtgcaatgtaagcagccaatgaaaattcctaagtcactccttctatgtaaacatttttcatcaagaaatcacttttctctaacttaaaattttttacttaaaaatggaaattacttcttatttttgattctttgagagagtagtgttaaactttaaaggctttgttgccaacgtatcaaggtgctaaatttgtgaaagttcacttagtatttcatattcaggttaaataacttatttgtttagaattccccccacacacttttttttttcttttttgtcac

SEQ ID NO: 12430 - DNA, 1023 bp, Homo sapiens
tcttttttcttttttcagtcaccagttccagtgacccccaagagcatccaacgcacacatcgtgagacgtttttcaagacacccggcagccttggagaccctgtcctgaagagaagagaaaggaaccagtcacgaaacaccagctcggcccagaggagactagaaatccccagcggcggcgctgactaacctgccgctttgccaggtgggggtgggatcaaacgccctgagagtcccggatgtccgaggcgggatgcaaaccatcccgtcctgagcacgggtccttcctctctctttcatccacacttctgttaacttcccaccaccatcaatcatctgatttcctgaaagtaattaattgtgcatttaataccagttagagttccgactctgcatggtgtcacagtgaaagcgccgactgacttatggttttgattcaagaatcgtcttattctggaagtagatctgaataggctaccggagccttgtttttctaaaggggggcgctgtctagcacttaactagggtaagcattcttaacatgtatttccacttgccctgagtaaatctgtggtgagagaagcttcctttctgcagtttaaaaaagctactgcttccttaggcttcatcaggaagccaccttcagttgtgaatcctatggtgttatttattttgttcctgaaatgggatttagtgcaaaaagtttacaactacagtctttaacacatttttttcagggtatgacgacttgaatgtttatacttttattctataatttgccctgcacttattttacaacctagtaataatgtggataaatgtatctacatgacacatgtcaagaccaaaataactgtgaatgacacaccttgctgtaaatgaactgtgctaaccctgactgtgggcttgagaacaaagatgaactctagaactctagcagcctaactgctgcttctcaaataactgtgtgaacagtgagatattactgtttgtttctaaaaatcctactgtgcccagtttcct

SEQ ID NO: 12431 - DNA, 1025 bp, Homo sapiens
atgaattcctcctcagaatgttacggatgcatagaattaaatacatgggattacaaaggaagccaattatattgaatgcaactagaaaaatcatttttaaaattactgatagtaataaaaagacctggcagcaagcccaatagtgtcaaaatttccaagttgtgatgagcttaacagtatattaagaaatctgtaataggtttaatgtaatatgcacatatctgtactatttcctaatgacaaagtcaaggtactgttaaaattgttaatttgttgcctgtgataattgagggaaataaaaattttcagttaggaacttataaagatattttggccaggcacagtggctcatgcctgtaatctcagcactttgggaggctgaggtaggaagatcacttgagcccaggagtttgacaccagccgggcaacataggaagaacctgtttctacaaaaaataaaaaaaaattagctgggtgtggtggcatgcttgtggtcccagctactctgcagactgaaatgggacgactgcttgagcccaggagggtgaggctacagtaagccatgatcacaccactgcactccagcctgggtaacagagcaagactgggtctcaaaacaaaacaacaaaaaataagtaaataaataaaaataaagatgtaatctttcccatctaagctttttgccttctcagtttgggttcagtggaactcatgttaaaaacttcacaggcaccaactaaatgatcacacagataaatgtgggattacaatcttggccacagctgtgaaggagcagggtgtgggctgtttggcctggtcagctgggggaaggtctcatcattcattgatttattgtggactcccgtttgaaagggccatgacaaatgtgagcttgaatgatatcctcatgatgacatatattgattttcgcctgttctgcttttctttcaggattaaatggtttcaatgtacttttatctggcagtcaaaccccccctactgtgggcccgtcctcaggtcagctg

SEQ ID NO: 12432 - DNA, 1050 bp, Homo sapiens
attaagcttctttccacatgtttactggccaccatgttttttgctcctctgtgaaatgcctgtttgtgttctttgccaattttaattggtttttttttgtcatgttgatttgtaggggttgattatataatgatactaaacctttattatatatgttatgtatctattctttcagttcggtaattgtcttttccctttatgttatttcttgatggacaaaagttcttaagtttaatatagttcattttttccttttaagggtaatgttttttgtgtctgaagaagctcttccctattccaaggttagaaaaatattctccttcattttcttcatttaaaatttgctttacatgaaatccttgatccatttggaattgctttttgtgtatggtatgagtcaagatacaactttgcttttctatacatatcatcagttgtccctgcaccatttattcaggaggtctttctcttccccctagctggcagtgcaactgctttcatattaaaattccatttacatgtgtgtctgtttctgaactcctcctgttccattgtccatccctgccctaataccctattgtaataagcactgatatcaggtaaaatgggaccctcaacttatttttcttcagtgtgtgggctactctgggctgtttgttcttccatgtgtattttagattggattttattgagattgcatttaatctagagattaaaaattaacctctttaagatactgagttttcttatctatgaagacaatatatttcactaaattttaagtattctttaaaatctaagttttaggattttatgcaaatagatttttgctagatttatttctaaaatccttatcatttttgttgctttcgtaaatgatgtcttttcaatttatttgctgttactgttgtacaggaatgcagcagactttaaaaaacatattatcttgtattcaactaccttgctaaattctaaaactatttttaatgatttgtctgaaattcttttgagtttttttgtatgaatagtgacatcttctgcagaaggaaa

SEQ ID NO: 12433 - DNA, 1096 bp, Homo sapiens
agactaggagagttttaaattactgttaaccaggcattgtatttctttgcataattacacattgacatcacatattaaatggtacatttctcccaccttggagtattccaattactttaacatttttatgttattagataccatattaatgttgtcctggaaaccaaaattacactggtgttcatatgtcttctgtattataactcaaaatgaactttggactatattttcaccttatagtcgacattataacaattccttgcccatataactttcctacctactatattggtaactactacgtgaagatattgattctatgtgtaatttgtttttatatccctagagtctagcataaatctaggaaataataattgtttcataagttttgtttaataaataaatagatgacttcctgatcccataatagactgacgtattaggaggtaaagaacgctttttactcaaaagaaaagaaaatagttgtttaaaaagttacaagtaaggatttattatgaaagcaatgggattactgaattaggaaaaaagatttagtccatatactgagagtttggacttgactatcactctggagagaatacatacgttcatttatgtagaggattgcctcattttccaaccaaaccaattagttccaatatactataatatgcaccagatgggaaaattttatttttgatgtccatgggtgatgtcaatttgtatttaaaatgtagaaatatagaaacccatcattcctgctgagacaatttttgagctgatacttttggctagagcactatggcaactccatttttgtctgaacagccaggtttcctgttaaggatgttaggtgaaaatcagaacagcacaatttttgtgctgtttagaaaagcaaatcagagatttgtggttaaggaaaacagtttgagactcaaaccatctgattaaaaaagcatgatctaatcaaataaatatacatacatttaaagtgcctttcctgcagtttgttgacctggaatgaccaaggaatcatccaaacacaactgattttgaagatttgttttgccgtatattatgtatgtgtctttcaaca

SEQ ID NO: 12434 - DNA, 1025 bp, Homo sapiens
tatgtctgctaaaatattactgaaccctactttggcatggtccctctaaagtctgggttaattaggtatcctgcttaattgttgaagtacactctgcactatgcatgccccagattgggaagtgttcaacaatcatttgttgaactaatgaatacagtggagatccttttagatctattttcttctcaagattcagagtaaattaagagatatgagttactccttttaaatgtgttttaaatttacagggaacacttgaaattcacagatgaactttcaatgaaatagtgtagaatatacatcctctcaaatgcatttcatcttgttcccttgggcattgctcataaaatactctgtctacatatttcagagattccaaagtttccttttgagggtggtgggggctagaggggtgtatgaatctttatgagaatgtgatgactcttccaataaaactacatgtacattcaatatattgcctaggcttgcaggagatcaaaaacaacctaatagactcctaatccgtgattttgggttaagaattcttgctacatttttctctatttctgttccctactggttcacaagtatgttcaattttctccatactgagtcaaaatattaattccacattgcatcctatttaaccatatactcctctttctcctatttacaattaaattttcatagtaaatttttatgcatttacttccatatatagatatgtaatctttagtaatctaggttccccattccatcctactaaagtcatcacaaaagtcctggttgtcaaatcccatacctcgttctcaattccgaactcctctacattgttaatattgttgagcttcttttcactctttgtttcaaaattttggttccgtgtcaatgcacacacattttgttttttctagttttgtgttctacttcagtgtatttttctgcttactcttcctttatcatatctgtgtttaatttcccccaagtttttatcctcggcactttcctatttctataatcttcta

SEQ ID NO: 12435 - DNA, 1030 bp, Homo sapiens
ggaccgccaagactctatccttcctgtacaatatgaaaacgtcagccatcaggctcttttttgagtctcatattttgtgtgactctcatgctcatgtgcatataataaatttgtatgtgtttttaccctgttaatctgtctcttgtcagttggttttatagacacaaattattgaatcttcagaaggaagagggaggaaagttgcctttgtccctaacagttttggtgagcccaggcaggagaacaagtcactctgctcagtttagaggctgtaaatgggaccctgggacaactaacaaaaaagccagccaagaaaggtaagaatttttaccaaggtcagtattcccagatctctgcctttagagcccagttgagtaagagtggcaagagtcactccttgtctctttttccttcaaatttggagttgctggtgaaaacaggtctataaatgaagtcttttattgatttgaatcacttttgtaataaataaattggttatatgtagaaaaactctcatcttaactattgctatctatgaaaagatcaaattaaaaaaaagaagagacacacgtaaatataactgttacccttaaagactcctttggcaatattaaaataataaaaatcagttttagaacaaagttaaaatccttttaaatgagaaaagtttttggatctctgggctccaaagtttaaaacttcccttctctgaatccacctccatttttttcagtacatttctttagctcaggagataaatacttgtaagaattagtttataagaatttatttgaattatttgttttgaatttgtataactcttgacttttggggtactcgtttgataatgatcctcttccctctcatgaatggcttttgttttcctgtttgtcttaccaactgttgtcttttttaaacattttgtctactgagggcacacaggttattaggccctcatgtatgggtggcctaccaaaaggttgagagacccacaaatatggctggacagaaatatgggttgtaccccatt

SEQ ID NO: 12436 - DNA, 1014 bp, Homo sapiens
ggtttcaccgtgttagccaggatggtctcgatctcctgacctcgtgatccgcccgcctcggcctcccaaagtgctgggattacaggcgtgagccaccgcgcccggcctgaaatatgaatctctttattgacttctttcaaaggaatttcatatttttctacagtcttttatttctaattatacgagtgatgaagagtttgaagaaatgagagtttactcaagatgtgctaaagatttataatttgaagactcttataaatcttgccaggaaatatgataaacagaagacatctacttcaaaaagtgctgaaagcaatgacaagagcagaatattttcattaatctgtgtggttaaattcagcttttcttagttcccctttaccacagaagcagggcttttcacttttttgtatatatcaggctatcttgtattaggaacttaataaacactagtcaaattgaattacatctactatttgtatattattcaatacattgacaggttcttgatatttaaacaaatacaaggcttgagttctctatacaagatctgcccttaggacattaaagacaatacttgggctccagaattttattttttgaaagcatctaataagaaaatttcctgtctattagcacctctggtggctcagtacgcaagtgcagccgactcattgctcgttagctgtctctggcctgactttatacccacactaagaaatgggcatgggagcaggttatggggtgagggggtgattgtggttagcaagtcctgagtggggatagaacaaaagtgtaaaattgaaccctttattcagaggctttgcttctagaatcagagagaggctagcaatgttgaatagcagtctgcctttcttttgagatctatttgatgttactgaaagctttccctacattttatttaagattattcataagatgttagaggaaacctgacagacaaagaaaactttcacccttgattagtatatgaggctatctactcctgcagaa

SEQ ID NO: 12437 - DNA, 1026 bp, Homo sapiens
cacaggattactgcatgatgcttggaacccatttcttccctggctcttggcaattctgttcatgccttacacaacaagctactcaagcacattcaagggcattccccaagaaacaatatgctaattctgcatctcaaattgctgccagttaaacagggttctgatgcacttgggcagcaccctgaagaaagaaacccaagccaatgacatacactgtttaacctaatgaattatgcatctgaaggcaaggtgtccttatggccctatgacgtttcttagaaaatatgggctccataagacagaaaaaaattgtgggagcattagaagcaatgaatatcatacacaaggctcaaattaattatgacaagtggaatatgtctgaatatcagtttatatacattttagtagatatcatcttgtttttcatgtctaaataatcattgctaatctagatattttttatctttttcctaattattcaatgactcctctttgtctcattgtcagtgctagaacaacattagttttacttgtttggactatgaaattcaaaataatttaattataatatatttctcatgtttttcaaatatattaacctatataaccacaataatataaatggaagaaaacaaaatgaatagcttattttagttaaaccagcatgtctaatattatatatattatgtgcctaaataataagcttaagaaatggcagagatacaaatacgcattatttgtacatttccaaaggagtataattttgaagaaataaagaatacatagagtgtcacagtatattaaaatatacaattccttaggtttaattaggaaaaaaattaacagacaatattaatgtaccaatgtatagactgaatttaatcagataaagctggtagggtgaaggagacgagtatgaataaacatcatatggaagggcaaaataaatatttgttgctgaattaaaaacaatactgaactttgatatctcaaagaaaacagatggcatacatgcttgtttccaca

SEQ ID NO: 12438 - DNA, 1026 bp, Homo sapiens
atgcatccaaaatcaatacctctagttctatcttcttttctgagctagggccaatattccaactgcctgctggggatcccacatgtaagtcctacttatatttcaacctcagcatgtccaaagccaaacttgatgtcatagcccaacatgatcttctttttgcccttttggtcttaaagacattacctcatcagccatcttagacatcacttaaatgtctctccctcaccatctgcattcagtagcacaacaaagcctaatagttctattttctaaatatcttaaaacatgatcatttcttcccttcaatcacaaccgccatttattctcaacatctccattatatttccatgtaatactcagtaagtatttttgcaacactcaataagtatttttgcaattaatttatgttctcatttactcagtggctggaaccagtgatcaattctacttttgcctaagttattatacaatatttcatagattctgagatgcattccctgctacattttaactccgagaaattggaatgtatctaataacagacggtgtttaactggaagtatttttctttcttaggatttcttaaaattaatgtgctctacagtcgatggtgccttagatttgatgaaacatgctaatggttttctgtgtacagtaatctccctttctccatgggggttacgttccaatttccccagtggaggcctgaagccttagatagtactgaaccctagatatactatttttttcctacatatacatacctatgataaagtttaacgtataaattaggcacagtgagagagtaacaacaattaccataataagatagaacaattataataatatactgtaataaaagttacatgaacatggtctatctctctgtctctctctgtctcaaaatactgtaatattttcaatctgtggttgaccacaggtaactgaaaccttggaaagcaatccacagataaggggggactactcaaccttcccagccattctgtcttctgtttcctcttt

SEQ ID NO: 12439 - DNA, 1486 bp, Homo sapiens
attcttcctcttctatagttatttagtaggagcaagaatcatcttccttaaaaatatttctactcttgccacataaagaataaaatacctaggaatacagctaactagggaggtgaaagatctctacaaggagaactgcaaaccactgctcaaagaaatcagagatgacacaaacaaatggaaaaacattccatgctcatggagaggaagaatcaatatcatgaaaatggctatactatccaaagtaattcgtagattcaatgctattcctattaaactactcttgacattctttacagaactagagaaaactattttaaaattcatgtggaaccaaataaagaccccaaatagccaatgcaaccctaagcaaaagaacaaagctggaggcgtcacactacccaacttcaaactatattgtagggctacagtaatccaaacagcatggtattggtaccaaaagagacacatagaccaatggaacagaatagagaatccggaaataaaactgcacacctacaactctctgatcttcaacaaacctgacaaaaacaagcaatggggaaaggactccctattcaatcaatggtgctgggataattggctaggcatatgaaaaagattgaagctggacccctgccatatataaaatcaacataaaatagattaaagtcttaagtgtaaaacctcaaactataaaaactctggaagacaacctaggcaataccattcaggacataggtatgggcaaagatttcatgatgaagataccaaaagcaattgcaacaaatgtaaaaattgacaaataggacctaattaaactaaagagcttctgcacagcaaaagaaactatcaacagagtaaacagacaatctacagaatgggaggaagtttttgcaaactatgcatctaacaaaggtctaatatccagcatccataaggaacttaaacaaatgtacaaaaaaccccacaaacaatcccataaaaaagtgggcaaaggtcaagaacagacccttttcaaaagaagacatacatgtggccaaaaatcatataaaaaaagttcgacattactgatcattagagaaatgcaaatcaaaaccacagtgagatactacctaacaccagttagaatggctagtatcaaaaagtcaaaaaataatggatgctggcaaggttgtggagaaaaaggaatgattttacattgttggtgggagtgtaaattagttcagccattgtagaagacagtgtggcaatgcctcaaagacctaaagacagaactaccatttgacccagcaatcccattactgggtatatactcaaaggaatagaaatcattctattataaagactcatgcatgtgtatgttcattgcagccctattcacaatagcaaagatatggaatcaacctaaatgcccatcaatgatagactggctaaagaaaatgtggtacatatacaccacggaatactatgtagccataaaaaa

SEQ ID NO: 12440 - DNA, 1037 bp, Homo sapiens
cactttgggaggccgaggcgggcagatcacgaggtcaggagattgagaccatcctggctaacacggtgaaaccccatctcttaaaattacaaaaaattagccagtcgtggtggtgggcgcctgtagtcccagctactcgggaggctgaggcaggagaatggcgtgaactcgggaggcggagcttgcagtgagccgagattgcaccactgcactccagcctgggcgacaaagagagactccgtctcaaaaaaaaaaaaaaaaaaaaaaagttacaacaggagcaaagtctctcttttttctttttaatttatttttgatagaagagggagatgtaaaggcctagagatggaactgaggcggagcttgcagtgagccgagattgcaccactgcactccagcctgggcgacaaagagagactccgtctcaaaaaaaaaaaaaaaaaaaaaaagttacaacaggagcaaagtctctcttttttctttttaatttatttttgatagaagagggagatgtaaaggcctagagatggaactgaaatcttccatggatcaatttgacatagctttttttagtgactgtactcattgtatagaatattaattgaagtgatctctaacttttgtatagtaagatggtactagatgcttttggtagttatgaagagatatagcttagttgaagcaagccaatcggctctcagtgttttttatagaagttacagataaataatttggaatttcctttctccgttgctttgctgaaactcaactctgaactcttgctgtttctgagctgcaggcacttgacagaaaatctgagcttgcagctcacagccctcttttatcacactgtgttcaaacagtcattgttttgtcacacagtgaagcaaaactttaaaatccatctatacacagttcagactgaggtaaataggatgatggaaaatgttgcaacctaccagttagaaataatatatcaataaataaaaatatctaacatttattaagctatactattacctagacattattataag

SEQ ID NO: 12441 - DNA, 1049 bp, Homo sapiens
agccaagattgtgctactgcactccagcctgggctacaagagcgaaactctgtctcaaaaaaaaaaaaaaaaaaaaaaaaaaaaaagaaagaaatgcaaacgatttgtgagttggtcatgcatagttacatatttagtgaaagtacaattgaaaatagaataatctcagatgcataagattcttattaaaatcttaatcaaaatccagagattttggatctacttccaggagatcatggctgaggctaacacatatacatagatacgaatttttattttataattgactatttctctctctctcttttatgagatagggtcttgctctgttgttaggctggagagcagtggcgagatcatagctcattgcagccttgagctcctgggctcgcatgatcctactggtttcagccttctcaagtatttggattacaggtgtgagccaccgcacctggccttgttctcttttttaagtttttaattttccattactagctaccaatataatcctaaagggtagaattggacagatatcggctcagatcttcttcgtttttcagtttcttcttttgtaaaatgaggataatcagaccaaatctgtaaggtttttatgagtatgaaataatttatgcaaaaaaattagcatagtgtctggcatattaatttgttccattgctccattgttcaattgatccactggcatattagtttgttccagagatcagtggatcaatggaacagactaccagtggatcaatcaattgattgatcaattgatttatccacacatctctaatagcacttggcctcccagaattgtccagaatgtggaaattttttgtttccaactcaagtcacgtcccagaagctttttctgattatctgattttgttcagtttaggagctcatctccctggaaaactttgaagttttgtttgctctgttgatacaacttgggtaaaactgttgatattaatgatgtcctaacttctgtatttcattgagtcagccagactaaaattgtacacacacacacacacacacacaca

SEQ ID NO: 12442 - DNA, 1030 bp, Homo sapiens
tgtttgctatcaattttgcaaaaaacacatctgccagatagccaagatttagttcagagactgaaatcaattaatattctaatttgttacccgtcattagcatcacagtatgttatgccaagtcaaaagtgataacctttatatatcttatagtcctaaaggaatttgattttaaggatgtgttttatttttgtttagtattgcctcctgcatataaatcctattagaaatgtcaattatataggcaggaaaaattatgacggattaaaatgaaagtgtaaaatacatactattacacacttttaataaatggcatggcttttatttatgatgctgtgttttctaacattgatttaacataccactttaaataaatggcatggcttttatttatgatgcagtgttttctaacattgatttaccataccactttaaggttttagttaccttacttttttcttcctgttaaatcaaggagagtgctagcaacataatattttttaggggtggtactcagattctttgacattctgttatttcaggttgctggtcaaaggcaaatctccatggacaagcagattgtttatctggtctgatttccagtgcccaatagagggacacaggactaagacaatggtttgggaaggaaaaagatgagattacccaagagaagcaaaagaaaggagagtttcatagataatttttttccagctgattgctttcctactaatgaatagggaggaaaaaataaagtaatagctggctctgagtgagaaaggctaaaagatggaggagttgtgaccaaagaaacaattacattttcaacgtttatgacacagtcaagcattaaaatgatgctttcataagtgttggaaatttaaaatgtatgatttagtaagatgcttaaatttgtcagcatattaaggcctcaaagtctaagaggaatggctcaggatacaagttaaattggttgtcattaatccactcattcatcaaatatgtatttagtgcctcatatgtgctaggcatg

SEQ ID NO: 12443 - DNA, 1049 bp, Homo sapiens
tcaaagttctgcacgaatacatacataatgaagttttttttttcttttttcttttcttttttttttttttttgttgacggagtctcgctctgtgcccaggctggagtgcagtggcgccatctgggctcattgcagctccgcttcccgggttctcgccattctcctgcctcaaactcccgagtagctgggactacaggcgcccgctaacatgcctggctaatttttttttttttttttttttttgtagagacggggtttcaccgtgtgttagccaggatggtcaggatctcctcacctcgtgatccgcccgcctcggccttccaaagtgctgggattacaggcgtgagccaccgcgcccggcaataatgaagttcttatgaagtcaaagccaggttagaagttatttatttatgtttgagttttcaagcaaagaccaaagtgtcattttttaaagcatggcttgcttctacacagaggtatggcaatttcagagtcattccttcggccagaaaactcattgctcataccttatcttgtagccataatagctatcattccagtggaaaaaattttcaggaattgcatttacttgccaagacagctacctacttcatcagatgaagtttttgagtaacttttaaagttctcattccattattgccacatagaaaaagaaactaaagatagaaatctcagttaaaaaaaagccgttcaaaagtcaaactagaatcccagcttcactagctcaacatgtactaaactgagatgtgtggaaacttagcggggaaggttaatataaccatggagcactttagctttttttttttttttcttctttttttgagacagggtctctctctgtcgtccaggctggagtgcagtggcgtgatcctggctcactgcaacctctgcctcctgggttcaagcaattcttctgcctcagcctcctgagtagctgggactacaggcgccaccaccatgactggctaatttttgtatttttagtagagacagattttaccatgttggccaggctggtctcgaactcc

SEQ ID NO: 12444 - DNA, 1015 bp, Homo sapiens
tggacaagggtgataaaaagaaatcaaggcatccccttaattttccagaaaatcataataattgagataagagataaatgactatgattccagatagaattaacgataattgcctcagaggccattattgtctgaatgtgtcccccaaaattcatatgttgaaacttcatcaccagtgtggtaattttaaaagtcaaggtatttaagaagtgattaagtcatgagggctcctcccttgtgaatgggattaatgccttataaaagaggcttcacacagtatttgcccctttgctcttccacctgccaccgtgtgaggagacagtgttcaaggcaccatcttagaagcaaggaccaggcccctatccagacactgaacctgttggtaccttgatcttggactttccagcctccaaaactgtgagcaataaatgcatgttctttaaaaattatccagtcgcacatattttgttatagcggcaggaatggactaagacagaggcaaaagttaaaaaaaagtggaaatccagagaaagaagagaagaactggaatggacttatgaaaggggtatcatgaaaaatgtgtaaaattcacacatgcgaagctgatgggtgaaagagaggcaacgtgaataaaagagtagaggcgaaaataagtactacattgaaaaagagaacaatatcttttatgcacattgcctcgtcttttggaattgaccactaacatgtctactggtcttcagattctgttcttcattaagacttttgcataatttccataaaatattttaatcttatgattaaaatactagtaaaaatctttaataactccctattttttaaaataaaagaaatgctctgctttaaattgatattaaaagtactttatatttggatgctaaacatttatctcatactatggtgcaggggctgattttctgcaaccaaactgatctttccacgtatctcaattatgccctgctcaggccacatctatttgctcatgtggttccctttc

SEQ ID NO: 12445 - DNA, 1021 bp, Homo sapiens
tccttttgatatttccatgcgtaaattgctataatgatttctaaacaaggaggcaagaaaggtctctggctttcatgctattgtcaaaatattttttcttttttgaatatgctaattttcctcctttaaagaatgtcaggtacaatagaggttctccatcacctgcacaacccaatctctccgtctgttgagtcctagtttttttctaatatatttttattttaatcaatctaatcttactgtaccctttatccatctcattcatctcacttactattaaatcctgtcttttggatctaaaaataatcttctcaactctccattaatggaggattcacttaaaatatttttttcagaaatctcattggtttgcaccaatgttatgtgattagttcacctactttaatgtggggcatcctaaggaagatttaaatggactgtgccaactgggtcaaatgggcttagttctgtgtaagttaactttaaaatttgacttaattattcggactattcttcgctattttttctaaccaataagatctttattgaccttcattttctgaacacgtaattcaagatgttctttcttaagagaaatattttcagcagccaagatggctcttattactttcatactttgtgttccttcactgtgcatcttcctagattttcactatagcttcctgcggtttttgaaatactgctctggaagctgtttttcaactcttattttttttttgttttcttttataactgtgagccttttgagtatctatgtttgtgtgctgaaagcatctattgtattgtaaatgtcttccactgccattgttgtgtactctagaaggttgtttagtacacagcaggcactcattaaatgtttagagatccacggccaatgtgtaggtggttgctaaacaatctaccatgtattaagggaatatatgtttttacctttctcaattgcaggtgggatgctaataatcctggagttcttaataatttcccataaattgtttctctc

SEQ ID NO: 12446 - DNA, 1034 bp, Homo sapiens
tttccttagaaaaataatctaacgcttagatgtaaatggaagaattcctaatttcaacttttgaatagatttttattactggatggggattgtggagtagagaaaaatataatgaaatttaggagctgcaaggaagatctcaaccacctgagaaagttcaaacctgggaaaggcaggaccctcactgcttcctatcaaccaaagcacaagacagtcttagttcagaaagacagtgatactagaacacaacagaattttgtcctacagtttaactggctcagagttactgaagcactgggatttgctgtcactttctgggtattagggtggatttcaaaatacttgttactacagcaattttcattccataaatctgaatttcttgttaaagtagcattatgtcaaaataagactttgatgatatttgtggttctctgaggaagtaccttgtgcttctgcttctgaagttgtgtgtgcatgtgtttgtgtgtgtgtaaagttagctaccaataaaaatttcttctctgacagatttctgttgtataaagaccgtctgcattattaggggccacagaacaacaacagaatcttaaaaacaattttctttgaagttcaatgaaacagccttttgctctaattgcttatttacttcaactagcaaagacaagtcattcgtttagaatacaatactctccagtttcagagaaatcaagggaacctgactgaaattgatcaaaataaaataaaaccaagagaacaatcgcagctaaattataggttctacactgaattttttcataagagttctgtatttgactttattcaaggcctgaaaaataaggaacggtggaatcaaaacaaaagaaaatctttttgccaatcatactcagcaagttttgctctttctggctgtggatacttatagaaaaaataataggtattttaaagtagttctaaggtatatttgcactttgccccatatggctccacataatcaagtcccttctgaaaataaatatgagtttttttgtttc

SEQ ID NO: 12447 - DNA, 1032 bp, Homo sapiens
tgactagaattgtaatattagtggaaatttgcattttaatatgatttagtaaaatagtgaaatagctaaaggatttccttaggggattaaaagctatgaaacttaataaaagggatagctgtgttttttgtcttcattcagtattttgcttatatgtaaccatctaaatcaagagcctggtcactatacaaatattataatgtttttaaccttacaggatcactaaatccagccatttcctggaagaaatagaattattttaatatacttgtggcttcttaaatcaaaattttttgaaaaactacagtagacacataacatatttaggcaaatgtctttcaagcaatgtaagattttataattgaagttcatcttaatacttttaaatgaaagaatataaaacacaaaatatagtgggcagatatgggtaaatgttttcactaaggatgaaattattatttctgaaaagatgtatttattttaaattaagtattattaggcagaaagaaagaaaatagtagaactctggacataaaaaaaaaaaaaaaatcaccagaagaaggatcttaagaaagaacaacaaagaagtgaatggagtgtgctatctcctattgaaaaagcttagcactcaccccagaatgcgagctcactgacttgtaagtggtgactaattgcactgaacaatttctttaatcatgactctttgaagtcctatcacgcattggagacaaatggaatgaaaattaggaatgcattctggacattgcagagggggcagtaagcgaccatatgtttatgctaatataacttcagttctcacctgaaccctgtgctccaagctttgctccaggactttcttgaagcacacagtgctgtcttatgcctcggttttctcttttctatgtactctatcttttttgtgagctgcttttttgcctatttgttttgtagggaaatcaacagagggaagaatacagtgcagaactgtggaaagctatttggagctgttttgttcttttgcactttttctga

SEQ ID NO: 12448 - DNA, 1051 bp, Homo sapiens
agaggaggacggatgatttttagataagaggagaggcttaggtttacaggctgtttaaaataatagaacatatatacataaatatactaaaataaacattgagttttctattacagttgtctctctgataaaagttaatatattttcttatttggtatgccttacaccatgtgcttataaaaaataaggtgacatggaaacatttatgatttcagttagattggaagggaagtattcataatccaaatcacagctattgagattaatcagaagtaattagatttgtctgttgtaataaaaaaaaaagatactgggcactgaaatgataagaaaaagccaaataaacattactagaaccaatgattgctgaacaccagtcaggaatactttgataaagtaaaaacacttaaaaattaacctctcttcaaaattgagaaaatctactctctttgcttttcctctgcatttagtatcattgtgcagaatacttactatgcataatattctggcttatgactggatactagatgttaacctaaggacataaaactacaacttttgaaattgtgttttctaccaaagaaatacttatgtgacagttacagataaacccacacctaaagaagttttcttccagttctctaaatttattaaacaaggtaaagattacataaaaagtaaattattttatgtaaccaatgatatcattcataatacttcatttaaaagcatctatctccattgatttagttaaaatcctgtcatgcatgaacaagagagtgtatgtattcattgcgggaaagacagcattcataatgacccttcattttgaacctcataaattattctcccagttggacttgtgtggtgatagtcgctcagagagctacataaaagtctcttaaattgtacaagacaagacaaagatgatttgacaagttcacaaaaagaaaatagtgaaagcaaaggaacatcatttaatcaaagggagttaaagagctaggaacatgagattacaggaagaaatttgaaataatgcaacttgaaagta

SEQ ID NO: 12449 - DNA, 1193 bp, Homo sapiens
agtatttccagaatgtctttactgctactttaaattcactgcttaggtacagaaaaaccagattttaaataagattactgacaatacatgagggacctttgtcttgaaaactcagaaattttagagtgaatagaaagacacttcccctttacataattgaaaacaaggtttgagaaaatgactcatgccctcattttcaatttatttcatcccagaatgtttgccaacacaaggcatatgctaagcctggctgatggacgtggtgattttgaattagcctgctggcatattcacagatatttcatttttcagaaacatattgttctaagtaatgcattaaaaagtttttttcgcacgttaaagatatccaccaaaagaattgtttttaatgaatgatttcaagccaagatccacgaagatcctggagacctgcaggacatgttttcctgatgagatattatatggctggaatctctctgttgtttgtcaactgaggtgcctcaacaagatgaagaacatcagggcagaacctagagtaaaggaagaaggctagaaatgcaataaaaaatatgttcatattccttttattgattagttaagaagaatgactttgaagtgctcaaattgccctctacacacacaattttgttacaagagtcatgtctatttgtaccatttaagcattgggacacagcttacttaatcctgggattgtaacagatgtacttattttcacaaactttgaaattcagaaaaataatgatttcattcctttggctttatttcagggagggatctcactttttagatgtgactatgacatcctagtcatgttctagtccattccattctgaaatgactgaaccgaatcctactctgaacacgctgaaaggcaatatcgaatgttgactgtagtgaagataagaattttgcatattctgactggaattattgtgagtgcctgaacaagcattcatgtgcatgtctatgtatgtgtcaggatgagatcagtcttttaagtaaaacaacaaaggaaaggttataaataaatgttaacaaataccttgaaagtaaattgctcattgaagacaggattaagggtttttcggtggacttttgtctcaaatttcttcttcttatcaggtagcagaaacactttcacgtaaggatcagatgtgccccccatgtccaag

SEQ ID NO: 12450 - DNA, 1032 bp, Homo sapiens
gtatggatataccacattttgcttatccattcatcacttgatgaatattttggttgtttctacttttttggctgttatgaaaaatgctactactgttgttgtacattttttttggtgtgtatacatgagtttccatttttcttgggtagaacttagtagaattgttggatagcatggcaactttatttaacattttgaggaactgtcaaactggtttcaaaagtggctacatcattttaccttccattagcaacgtataagaattccaattttttcacatctttgccaacacttgctattgtctgtcttattttagcagagcctgaaactttgagttcctttgtggggtgtcagagcttagaggaattaattggtgcacaatcactgaggtcacaccatggtagcactatcttccactcacacgtgctgagccttaaactgggttcgtctttgtgcaatcttttcacatcccacagactctcgcacatggtatctaggctcagatatccacttttttattaaaaccatgtatgacaatgccttctgaacacttaggctgtcccactgtcctcaaaaaaggaaggatgtaaatctagtcatcagagcaatgcttttcggctggcaaggaaataagggctctgaccaatgtttttaataacaaaaaccgctaatttttttttttttttttttttttttgagacggagtctcgctctgtcgcccaggctggagtgcagtggcgcgatctcggctcactgcaagctccgcctcccgggttcacgccattctcctgcctcagcctcccgagtagctgggactacaggcgcccgctaccacgcccggctaattttttgtatttttagtagagacggggtttcaccgtgttaaccaggatggtctcgatctcctgacctcgtgatccgcccgcctcggcctcccaaagtgctggaattacaggcgtgagccaccgcgcccggccccgctaatatttttttgagagcttctctggtgccaagtattgttctaagtgcttt

SEQ ID NO: 12451 - DNA, 1044 bp, Homo sapiens
agaaaacatgactgaagcctgtacagtaggtatcacaacacattcctgtatagactattacctggggtcctggtcattttagctttaaagaagtgtgatacatacacctacctatgaaccagcagttcaggagaaatgaaagcatatgtccacagaaagctgtacaacagctttattcctaacaatctcaaactggaagtaacccaaaagtccaccaataggaaaatggataaatcttgatatattcacataatagaataccacttagcaataaaaaggagtgaaatattactgtatgaagaatctcataaacatcatcttgagctgaagaagccagacacaaaataacatgattccatggtatatagttcaaaacaggcaaactaatctgtggtaagaaaaatcagaacagaagttacctctaggagcttgcactaagacacattggaaagaggtatgaggaacttctttggggataagaaatgttctgtagcttgattggtgttacactgtgtatagcgttgtcaagactcattgaactgtacacttaacatctgtgcattttattgcatgccaattttatttcaatttaaaaagtcacgatgttagtaggaaaaaggtctggaaaagagcaacttgggggaatctctgagaagctacagtatgaaaacaagctgcaaaaagattggttctcatgtttaaaactttgtttttacatcaggagaattaggcataaacttcttgtcttaagggagagtagactactagaaaatggctgtggaatcagaaaaactggcatttacatcttgagctctcattggctagcatatgtcctaggcctgggttcctcatctctaaaaagtgaaccttagtactgcccttatatcaatagaaatggtaataaggagtgtgattttggagacaagtgttctactttaaagagagactagaatattttcagcgaatatcccaaaacttttgaaacagccccaggaaagacatttccagcacacctgagggctgtttcacatggaaccccagtca

SEQ ID NO: 12452 - DNA, 1049 bp, Homo sapiens
taccagatggatctaagttacaatggcccactcagtgtgtgtgttcttgctggcagaggtgttaagaggagaaaagggaatgaaggcggggtcatgtgggtctattgactttttctgataactcgtggcagaacacttaatgtaagtctgttcttcaaccataatatactggactgaattctgaaagcacggtcatttgttacatcaaatgtgttatctccctgtgtgtgtgcatttgtatttttgtatattgaaaatggaaacaggccaggcgcggtggctcacgcctgtaatcccagcactttgggaggccgaggcaggcagatcacaaggtcaggagtttgagaccatcctgaacaacatggtgaaaccccgtttctactaaaaatacaaaaaattagccaggagtggtggcgtgcacctgtaatcccagatactcaggaggctgaggcaggagaatcgcttgaacacgggaggtggaggtggtagtgagctgagattgcgccactgcactccagcctgggtgacagaggaagactctatctcaaaaaaaaaaaaaaaaaaaagaaaatagaaacaaaaataccataatcttagcctcctaaaataattattctcatttcatggattcccaaattatttttatacatatgcaaatatttttaaaacccactacaaaagcatatatatataatttatatataattttatattttgctttttctatttaacatactaaaacatttttccatataagtatgcctaatggctatctaatattccatgaagtcatagtatcagtaaccattttattatcattgaaaattgagcctattttaatatgtaaaattatgttacagcatgttggcatccatgaatatgtgtatgtatagtatttcagatatgacagctaaaggctcagtttgttagtgtttctatttgccataattctttataatgtaagatttcacatctctggactgacgttttcggtgttaagtaaacttcattaaaataaaagatttataaaatgttgtacctattttttc

SEQ ID NO: 12453 - DNA, 1074 bp, Homo sapiens
atgagaacattaaagcacagggaggttagctgtcttcaagtttgcatggctcatgaatggcagaggcaatccgaacccaggtctgactacaaaaaccttcttattccatgaaccttatctgtagccatactaaatcagtgtaaaaggaggaaatcataggccttacctgaaatgggcaaacctttctctgttttccataaactgtaagtttcacagaaatgattttatataaatttttgaattactcaaagctggcatctataaatagatctgaatttggcatctaaaaggcaattgaaagcttaaaataaattctctatatattttgtgtatgaaattaagtgcttaacagtatttattctttattcagtatccaaattgtttgttttcccacatccaccaagaataagagtatctgcttcttttcttttcagccataacatagctttttcctacctaggaaggtgtgctaatcacattctgaaactgatttaaaaagtaacactgtaaataccaggaactctcattctctgagcttctggtaggctagccagagagttagcgctccttaaccatgagaagctggccaaaagccttgttaaaataagcagatggtttggcctccccctgcaacccccatgcttttcctgggaagatacttgaataggaatcggatattaacagcagagtatcccaaggttaccaggttttcttgtagtagagcaaactcaccaactaccaaagatttttggtagttggccaggaaaaggaaacaaaaaatctgatggctacttataacacagcccaactggcattaaaaagtcaagctttaaaaatccatgcttcaaggaagtattttggattaatatgattatgtcatggtatctcaaaggtagtgaaaaccttttaataagatattttctgctgtgttattccagggtataagtctttatgtatttatttttgtcccgttctttgtaggttatggaatattcacaaaaagcttttttttttgccagtcatggttttttccagcaacgtggctcttcttagctgtttccaaatgtctcagtt

SEQ ID NO: 12454 - DNA, 1045 bp, Homo sapiens
aagaggctaagctggcaaggaacccaaccaaaccacctcagctttatgtttttgttttgttttgttgtgtgtatgtgtgtttgtctatgtcttaaagtacttacaaaattctgagggcagagctacttcacagctgtcttatacttgcagactctaaggcttaattagagttaaaagaactagttgaggcctccaggctcaggtgatagaatgaaagcagattatagagtctctctctttctctttctctcagaactaaaaacaagggataccaacaatgaaaaccactagctccctcctttctagtaataagtcagcaatgaaataaggaaaagactgtaacctaataatatggacattaaaacaaaacaaagcatgcatgcacgtgtgcacacatgtgtgggcgcacagacacacacacatacaatgctggctcacaaaagaacagatcttggagtggtacagtgtagcttctaaccctgaactcccttcctgcccctggaaccttactggtgaattactgaactctcaagacctcactatagtcttcagatctggagagaaactaactaaatgactatccttatttttctcatttttgtctgaagggtagtggattggctattggacagaagtgggctgcttctttctgacagagcatgtatcggtaaagataccacattgcatataaactcattagaaaggggaatcgtctcatttgttcacacagcttacttccagcacctagattagaatgtgccttgcaaaggagaggggctcaataaaaatttgctgaatgattttaaaaaatcctagagtgttccccttcaggatggatatgtattctgattaaagagagggattaaaatgtagttcaaagtatctaacaaatcccagagagagagagagagagagcacgagcaaccaaaagtgcagagcccaggagttctaactcagatgtcacacagcttcagcagagctttcccttccctctctactccctgcaccatttccttaggctgcagttaagtggatggtatccaaa

SEQ ID NO: 12455 - DNA, 1102 bp, Homo sapiens
ctgggatgggactcaagaatttttttttttttttggttgggcacagtggcttacgcctgtaatcccaacactttgcgaggctgaggtgggaagatcacttgaagccaggagtttgaaaccagactgcacaaaaaagtgagactctgtctcataaataaatgagtaaataaaatgaaaaagaatttttacttttaggaaggcccaggtgatgttaatgctgctgggattatactttgagagtcagtaagatgaatgctggcctaggatgaatcattttgagttttgaataagtgaatgaatgaaaatgaattccctaaatcataaaatgagaaatcagatgaaatggcctctgaggtctttttgagtctatgctcctgtgattctaaactacagaataccccattcacatttttttcatataatgaaatctcagtgtttactaagattgctttcatcttttgttactgcattcattttacatgagaggctcatatcattccgtaagtgggaatctcaaggcaggtgtttggacttcagatgttttcttgagagagaaggacctcttaacacgggtcctccatgcttctgcactcaagaaaataaaaaaggaaaaaagaaaagcagcagtgaattccaatcttgcccatactgctttaaaaggttaaaagtgagaggatgagactttctaaaggaaaagtgtggttgactccctacctgaagctttggagagcatttacccaaactgttaacatttcagccttaagaaaatatttacccaattcataattgtccaaaacaatcagctggatatctggccaaaggagtcaaggcttcctggtgagctcaaactttcgtcacggatgaccgggcaggctgatttagccacagggggagggatatttgtcaacacttggagcagagctctccttactctaacaggcctgcatactgttagctgagtaaaggctggtctatggtcgggcgcggtggctcacgcctgtaatcccagcactttgggaggccgaggcgggcggatcacgaggtcaggagatcgagaccatcctggctaataaggtgaaacgccgtctctactaaaaataca

SEQ ID NO: 12456 - DNA, 1022 bp, Homo sapiens
aataagctactcctgtttactttttacaaacttgagaacagttttagatttataaagttattgtgaagatagtacagagggttctcatatgccaccacaccaagtttctcctactaacatcatacattaatactgtgcatttatcacagttaatcgtccaatatttatgcacgattattaaagtccatacttgattcagatttcctaaattttcccctaatgtcctttctcttttccagtgtccagtccaggatactacattatatttagtacctgtgtctccataaaattctcttggctgtgacagtttcttagattttccttgtttttgatgcccttgacagtttttagttctgggcaggtatttttcactttactatggatatttcagatacacagaaaagtacagaaaatcgctagcaatatcctgctaattttttgttatctgtcctgcttcctttttcttttttgttggggtgttttaaagttaaactccaattatcctttcacctgcagatacttcagtatatatctctaatagtaagaatttaaaagaataaccacaatgttatacctaacaaaattaatattaattatttaatatcatctgtttactttgggttccctaagaagcaggcatgcatgagatttattgggggaaaacacttgtgaagaaaattggagagggagctagaggaggttgagaaaagtgtcagaacttgatacaggtctgcctggtgaaggggagaggaggatagttggacaggaagtcttaatccatagttgttttagtccatttgtattgctataaaggaatacctgaggtaattgagaaagaagttcatttggctcatggtctgcaggttgtacaagaagtatggtgctaacatctgcttcaggtgagggcttcaggccgcttccactcacagtagaagaggaaggggagccaatgtgtcacatggcaagagaggatggaagagagtgggaaaagcaggccttaatgcccttttaaacaaccagct

SEQ ID NO: 12457 - DNA, 1001 bp, Homo sapiens
cctatgtaggtttaggttgagactctggattccacaatttttaaaggttaccatctgaggtttctgatcatagtctacttttgaagcagctgctgctgtttctttattccattgaacaccctggaattgacataattttatctatcagcatttctccccttttagtttatttaataattaacccggtctccagggcagttttcatatgaccatgtgtatattcactgctcacgaaaaagtttaatgttagattaccaaatttaatatagttacagaattactgcataagggcttcccttcttggagactcttacccagcatgggaacagtgatctgcccacatgacagggtggtatgccaggcatagttaactgcttttggttgtgaggtactcatcttcctttagttacccttagttatgtggcacacatgtccttattgcctagttcgtcatccacactttggatcttgtgaaaatgctgttagtatccaaccttaaaatatattagtatatgggtttttattaaaagaattactttgaattttctatttaattcatatgtaaataaaggaacatttcatttcacttaaaaaaattatatcagttattaggctgggtgcagtggctcatgcctgtaatcccagcactttgggaggccaaggcgggtggattaccagagttcgggagtttgagaccagcttgaccaacatggagaaaccccgtctctactaaaaatacaaaattagccaggtgtggtggcgcatgcctgtaatcctggctactcaggaggctgaggcaggagaatcgcttgaaaacccaggagacagaggttgcggtgagctgagattgcgccattgtactccagcctgggcaagaagagcgaaactctgtctccaaaaaaaaaaaaaaaaaaattattaatacttttaaagactgagctgtttaagaattttttggggaacatttctagcagtgatttttttggcctttaatgatagcg

SEQ ID NO: 12458 - DNA, 1066 bp, Homo sapiens
tctaagctttaacaacagtttcttcttggaattattatttcatagttttatttatttttatttatttatttagttttgagacagagtttcgctcttgttgcctaagctggagtacaatggctcagtatcggctcactgcaacctccacttcccaggttcaagtgtttcttctgcctcagccttccaagtaactgggattacaggcatgcaccaccaagcccggctaattctttttttgtatttttagtagagaaggggtttcaccatgttggtcaggctggtcttgaattcctaacctcaggtgatccacccgcctcggcttcctaaagtgctggaattacaggcgtgagccactgtgcccagcctattatttcataattttaaattaaaaagtttagacaatatgtaatctaatagttttgaagatagttgcccagaaaggcttcgtgagttccacaagagtttggattgaattgctagtagttggcagcagctaagggatatggatggttgattgctctgtaggaggtttagtaagaaagaagccaagttctgggcaaggccttttgagctctgcttcccttttgcccccaaggtggctgaccaagcccagtgccctggattctaaataagatgtctttgaaaaagatgttgcattgtttaaagaaaaaaaaaattaaaaatcagtaatctattttagttccttctttttatccattatcagttaactggcagagccagaagtaaaactgaggaccattgtttttctgtttagagtttctattgggccatctcctttaaactttgtatttttaagaaaaattaattttgaattatttcaaacaagatacccattaaaaaataaggtagttcataacttatagtggtgataagctaaataagttaaatcacaggccgggcacagtggctcacgcttgtaatcccagcactttggtaggctgaggcgggcagatcacttgaggtcaggagttcgagaccagcctgggcaacatggcaaagccccatctgtactaaaaatatgaaaattacccaggcatggtggcat

SEQ ID NO: 12459 - DNA, 1043 bp, Homo sapiens
aattttgggatgaactcttggtgtttttgcaagacaagaaaccagtttggtccccagcttttcaaatatgtgagttagctttttgtctgatggccttattctttattttttaagtgatcttagctttccatgcaaagaaggaatgtcagttggccgggcgcagtggctcatgcctgtaatccctgcactttgggaggccggggcaggtggatcacgaggtcaggagctcaaggccagcctggccaacatggtgaaaccctgtctctactaaaaatacaaaaattagccgggcatggtggcaggcgcctgtaatcccagctactcaggaggctgaggcaggaggatcgcttgaacccaggaggcggaggttgcagtgagccagaaggcttttcaatggcagataagatcaggtgacaaaaatgaaagttggatttttgaggagaaagttaccttagctggttataaagggttctacgatatagtaacaactatcagtaaagtagatggtgatcttggtattgcacatttgaaaaggttacaatcaaataccttacaaatttgataggacacttttattttctatcacaagaaaattcataggtaagaaattcatagatgaggaatcaatttttaaaacgagaagtcactttcgatttaactgtaaatttgctggataaattattggaaatggataccagtcagtgaaggattgaaaacaaattttgaaaagcaaattttctacatttttgacaaaagtttttaaaaatgaatgtccgagcttgttgaaattgcattaaaatcactgctatttctgtcctttgagactgttttctctgattgctattaaaacaaaacacagaaatagtttagatatacattatcccttgttgagtagcattgtcctcggtccaacctagattaacaaatgtagtaactggctttcaagatagcccccagtgaaccctacctcctgatgtttgcactgtgtataatcctctcacacaacataccaagttgatatgtgtgaacaatagaataaggtc

SEQ ID NO: 12460 - DNA, 1036 bp, Homo sapiens
ctgaggtcaggagtttgagaccagcctggtcaacatggggaaaccccatctctactaaaaatacaaaaattagccgggcgtggtggcgggcgcctgtaatcccagctacttgggaggcggaggcaggagaatcacttgactgcaggctgaggttgcagtgagccaaaatagtggcattgcactccagcctgggcaacaggagcgaaactctgtctccaaaaaaaaaaaaaaaaaaaaaaaaaatagcataatgatgccgtttatgtattgacaagtctaagatggaaggttttaaaaattgttaataagttaaacttttttgaaatattgttttaaacatgttcatcaagcaaatacacgattactaacggacatccatatttctggatggtttgtttgtagctgtcagcattatagtttctacctaaaaagtcatggatggatgcagaaagttggacttctttttttttgtgaaaaatgggtcctttaaaatgcttctaatggtcttctataatatggtatggctttagtgataccttcctctgttgattttctttttaccactttgctggtatttcccagtcttatttgtagttgtttctttcctgtatctcttcttcatgtattggtattactcaattttttttgtttttgtttctttttacagggtttcaccatgtcacccaggctgagtgcagtggcgtaatcgctcactgcagcctcaacctcttgggctcaagcaatcctcctaccacagcctcccaagtcccaagtgcttgggactccaggaacatgccaccatgcctgactaattttttatttttttaattttatagagacagagtctcattatgttgtccagactggtcttgaactcctggacctaagcagtcctcctgccttggccccccaaagtgctgagattacaggtgagagccactgtgctcagcctactcagctgttaatcttagactttattctcttttcgttttgtgtatttgtggtagaaatttcattcactccgatgacttcactt

SEQ ID NO: 12461 - DNA, 1056 bp, Homo sapiens
ctcacttatatgtggaatccaaaaaagtcaaactcatagaagtagagagtagaatggtgattaccagaggctaaggtagatggagaaaggagaaacattggccaatgggtgcaaagttacagttagataggaggaataatttctgttttattgcacagtaaggtgattatagttcataataatgtatatttcaaaatagctaagagtattttaaatgttcttaccagaaagaagtgataagggcctggtgcagtggctcatgcctgtaatcccagcactctgggaggccgaagtgggtggaccacttgatgccagaagttcaagactagcctggccaacatgacaaaaccccatctcttctaaaaatacaacaattagctgagcatggtggtgttcacctgtaatcccagctactcaggaggctgaggcacaaaaattacttgaaccttggaggcggatgttgcagtcagctgagatcacaccactgcattccagcctgggtgacagcgagactgtgtctcaaaaaaagaaacaaaaaaaaaaagaagtgatgagtatttgaggtaattctgtataggttgttctttgcattgctataaagagacacctgagattggataatttataagaaaaataggttaaattgtctcacacttctacaggctacacaagcatggcatcaacatgtgctcagcttcttatgaggccctcagggagctactcatggaggaaagcaaagcggaagcaggcacatcacatgataggagcaggagcgagagagagagcgggggcaggtcccatactcttaaccagatctcattggtgctaaaccattcatgagaaatccactcccatgatccagtcacctcccaacaggccccgccttcaacactggagattacatttcaacatgagatttggaggggacatccaaaatatatcagacatatatgctaattactctaatttgatccttccataatatatacatgtattgaaataaaaatatcactttgtgccttatacatatgtctaatcattatttgtcaattaaaa

SEQ ID NO: 12462 - DNA, 1035 bp, Homo sapiens
ttttatttatgtgattatgcatttcctagatactagttctttctgttcaaggccatttactccagcacccaagtggatttcttgattgcaaatttattactataggatgtatttgtgtagaattatttcttcctattgtactggccttattcacacttctgtgctttaatacaatgaaaaattgttttgacattgaagttctgtattgagtcccacaagatattattcccttaaagcacttgtatggtaacttgcaaattgaacatttgaaatatcaaaatgaaagcacgcagtataaaggtctgcctttgaaggataatggcatgcatgtggggtactgttaaaaagaagattaactacattagcagcaccttgattttagcacagggatcagcaaattagtggttgtaggccaagtccggcccactgcctgtctttgtaagtaccttttttttttttttttttttttaataacctttaagctctgttgaacttgagtaaggaaagttttactggaacacagccacacctgttcatatattgtctgtgaccgatagattttggtctacaacaacagagacctatggtccacaaagcctataatatttactatctgtttttacagagaaaacatttgccaactcctggtttagtagatcaaagatcctttgatgtattttagtaagttttgcccaatatactgagatgtttatatggaatatgaatcctcatgtacagtcctttggcaatatacagatgagtctgaaggtccaatatttgagcatgcacccattgggaataaaaaaccaaaaatttaataactagcagttttgttgataacaaggtacagtgtcaatgtagcgtgtagccttcctttgcagctcagcagatattgcaagaattctaacaaaatttgcttaaaatgtgtcataaaatgaaatgctttaaatatactttaattgtgaagtagccaatacattatagatctaacctcattgttttaaatggttgcacactacattatcttatggatat

SEQ ID NO: 12463 - DNA, 1073 bp, Homo sapiens
agcactttagggctggcaaggaaagcctctatatggagcaaggtatttagttgagatccaaactttggaaggagccagttaggtaaaaatcaggggaaggagctggggtaaaaatgttctaggtaggagaatcggaagagattgtggggagaaagaaaacaaaacaaaagttctaggtggagggaacagacattacagaggttttgaggcaggaaacttcaagtattcaacttaaagcaaaagttgggtaggtgagaagagataaagaccaggtcatggtagagtttggagtttaagtgcagttgggagctgcttgttggttgaagcagaggaagtacttgatctaatttttgtttcagaaagatcagtttaggttgtaggtaaagaatgggctctgtgtacgggaaggagagggcagaccactacagcaatacaggagagagtgaccaggtgggaggtaggggccatggagagacgggattgcgtatggaatatgttttagaggtagagctgacagcactttctgtgagaagcagagcaatcaaaatgataattaggttttcctttagagcaattgggtggatgctgatgccattaactaacaatacttttcactgctattcgtgcagtaaaatgatgtcatgcagaagtatagctttttaatatttttatttttagagatagggtcttgctatgttgcccacgctggctttgagctcctgggctcaagtgatcctcttgcctcagcctcccaagtaactaggactacaggtgcacaactgtgcctggctgtgtcctttttgtagaaattatgattgagcctctttataaataatcttaacattttgagtatatgctaggcattgttctaagttcattacatgtataagcttatttaattatcataaaaagttaaatgaactatttgtctttatatccctcgtatcgaggaaactaaacaattaacatggtaaacacatcaacaagctaaagaagaaaaatctcatattaatagatggagaaaaagtatttgacaagatccaatacccattcacagtaaaacttcttggtaa

SEQ ID NO: 12464 - DNA, 1029 bp, Homo sapiens
tttttagaacagctctagatgggtcactgctattattattattatttctattttacaggtgaggaaagcaaagcattgagaagttcagatttctgatttgagaaattagttgctaactttgcacttgcctccattcttgattttttttttttcctctgtttccaacttcataatgcgatcagggtcacttctttctcctgtgcttccagcttcacaatggggtcagtgtcaccttttaaatactagcctgagcaaaacaaatatattaagcttgctgttattattttttttctttccaacttttattttagattcagggggtacatttgcagatttgctgcatgggtaaatttcatgtcgtgggggtttggtgtacagataattttgttacccaggtaatcagcatagtacccataatatccttacccttctcccaccctccactgttaagtaggcccagtgactattgtttccttctttgcgtccatgtgtacttaatatttagctccgtcttataactgaaaacatgcagtatttggttttctgttcctgcattaatgtgcttaggataatggcctctagctccatctatattgctgcaaaggacatgaccttgttcttttttatggctgtgtaggattccatggtgtttatgtaccacattttctttatccaatcaactgttgatggggatctgggttgattacttatctttgctattgtgaatagtgctgcgatgaatatatgcatgcttgtgtcttcatggtagaatgatttattttatttttatttttatatttgagagacagagtcttgctttgtcacccaggttggggtgcagtggcgtgatcctagcttactgcaacctccaccttccaggctcaagtgatcctccccacctcagcctcccgagtagctgcgaacacaagtgcggcaccacgcccagctaaaattttttgtatttttagtagagacagggttttgccatgttgcccaggctggtcttgaactcctgagcccaagcgatcc

SEQ ID NO: 12465 - DNA, 1032 bp, Homo sapiens
tgttggattttaatgccatgccaaagaattcagactttattctgctgttcagtattgttgactgggtacttccttcctctgtccatatctgtttatgcaacaactctcacaggttttggaaagaaaacagttttgtctgcctaatttgaaatcattaaaaggattgtcttgttcggaggcagatattcaagagtagtaaacaacacaaaatactgtgaaaataacatatagtagaataaatcaaaatttccatatgcattaaaaagaaactagaggataggatctaaacaaagttgtaccaagtgatttcttttgatgacaaaaataattatataatgaataaatttgagtgtttgggggtagagggcagatggagtggaggtggggaactccagtgatactaaattgctagagtttgattctagtgtaatcatggagaagtttatagcttaacgttatccctgagtttgtactttgccctgcactttaatataaaaccagtttattgcattctgattctctagttcattctgtaatacagatggtaggaatacaggtgcttaaggatgggaattgcctttgaatttttctccatgtattacttgtttaacttctacaagtgttttctccctccatacttccctccttcctggtagtatcttcgaggaactcaagggcatctccaaaccatgttttaggaatagtattcagaaaatttgaaataaaatagcaaatctaggattgtgcaaaaatcagctatagaatattacttataaatttaacaaattttcttccatttttatttttatacattgggattatattctatgtacattcttataacctgcctttaaacttgacattgtcttattatttcattttaagctttttttaaaaggagaaatgttattacttttttttgttgtttcataaacacttttgtttcataatcattttcattggacagtgattctgactatccagtgatactagtactttatatttttggaatacaattatttgaagccaccc

SEQ ID NO: 12466 - DNA, 1063 bp, Homo sapiens
cctgcagtgagccgtgactgctcaactgcactacagcctgggtgacaaagtgagaccctggctcagaaaaactcaaacaaaacaaaactctagggggactaagagaataggataaataaacataataatatacagtttgaaatacagaactgaaacagatgaaattaacttaaaaagacatctttcagactaagcttatctatggtcatgtaagcaaactacttaatattttagaatttgcaggttacataaagtatcaattgattttctattattttggagttttttccagaatatttttagtagtatttaaaaagaatgtaaatctcagaacagagttaacattcagaagatggtgcttgaggaataggaataaaaagtacgattgtattagctgaaataatcaaagaagttacttttaggtttcaaattcttgaaagacttctccatatcctataatgtaagcaaaagttgatgcaaatcaaatttatgtaatcctaatttttttctgctagtagaagtaatgtgttaaaaaaaaggcagtgtgttcactgtagttctctcatggaaataaatccaaggaaaggtagaaaaacctgttatcttatacatattaatatttgtgtttctattcttatttttttgaatctacttgagaaatggaaccacactattgatttgtgtgtatacttaaccactcatcatgagtatttttatgatgttattctataacttcaaaaataggggtggatgtgtatgtatcttttgttgtatgttttttagagacagggatcttgcttgttccccaggctgcagtactatggtgtgatgactcagcctcaaactcctgggctcaagtgatcctcttgcctcagcctaccaagcagctgagagtacaggcatgagccaccatgtccagttggatgcatgtgttttgtgctgtttgatattaaaatacttaaccattacttcattgggaaaggaccttactgcttatctgccttattatgtggctttttgattagcccataaatagtcttagataaatagccctttcctttcc

SEQ ID NO: 12467 - DNA, 1057 bp, Homo sapiens
gaatggggtagatatagtgtaaacactgagactgtttagtgtaaaacctgggctattagcccagctttcctaaatgtttgagctcactggtaaagtaaattgaaattttaatattatcaggatttgtactgagttgtctgagctgggatgtcatttctcataaaaataataattacataattaaagtagatgacatttatggtgtgcttattaagtgccaggcactgttctaagcacttgacatacattagtgcatttaattctcaccacagccctatgggaaaatggggaagagaaggtatgttacttgcttcaggtcatacatgtagtgagaagtagattagagatagtttgcactcacagtcttgtgcgtaataaaccatcttactacacttcagtgtattacatactgtatacctagtttaagaaatacaaagaatattttagtgttaaattgttagtatatgactatggaatttaaaaatagccctatttatagaacatagatgaagtgagactttaatggaaaattttgagaacaaatgaatatataaacactggcattaaaattcttatttaaaatcattatcaagctagtggcctgtttatactattttctttgtttttttctttctttcttttttttttgaggtggagtcttgctctgttgcccaggctggagtacagtggcatgtggtgtgatctcagctcactgcagcctccacctcccgggttcaagcaattctcctgcgtcagtctcccaagtagctgggactgcaggtgtgcaccaccatgcctggctaatttttgtatttttagtagagatggtgtttcgccatgttggccaggctgctctcaaacttccagcctcaagtgatctacccgcctcagcctcccaaagtgcttggattacaggtgggagctaccgtaccaagcctatctatgctatttattatttctgcattttttttttagcacctatgatgtgtgccagaaaataattatgccatttaatagcaaggttgatataatgttttataagtataaaattattggc

SEQ ID NO: 12468 - DNA, 1657 bp, Homo sapiens
aaatgaccaatctctttatattcaaaagtagactttattttatctaatgtcgagtaagactcttattttcagacatgattcccaaccaagtctgtattagtagattaacatgtagttcatatgtagagatctggttttaatggtggataaacattaagttccttcaaggaagtacttatgaaacatctgtgtgatacatttattgtgactttcattacctcactttactagttatagagtgtatatataatactgttataaaggtatctgacagcagctaaagataccagaattgactagaagatagttataggcaaggaaccaggtcaaaaaccgaaactagctatttgggaggtaggaaactgggtggttactgcatgtgatggctgaagtcgatctatccagagcttctttaatgagataaaatttactaagagttttaagaaaaatatccttttttctaaatttttacattttctattttttggtagtaattcacctgaactgggtaatttggacgtggcatacttcttgccagtaatttttgtgtgtgtttatcagatcagtcaaatgtgtattacatacctgttaaagacactatccttaagcagtggagaaaataagaacacggcagtgtatattctcaaggagcaaggctataatctaggaagaaggataaggcataattacatgaaaaaatttaagtactgagttaacagtttaaaagccatcttaatgaagcatgtaactatttattggaaatagtgtgtgtttaaaagggggagatgattgggctgggagaagctattgaggatgagaatcttgacctgagtcttaaacttttcagtacttgtatatttttacatatgttctcacatatgtacatgtatacataattgtttgtatagtatattaagtaccgacatgcagtggttcttaacttgagcagcacattgatagcatgttaggatctttaaaaaaatgtttgctcatgctaattcaattccgtgccctctttgtcccttcaccccaccctgtaatattgaatgggtctgggatggatcccaggcattaatatttttataagttccccatttgattcaaatgtgagtcagtgataacaactgttggactgcagtctgggtatagaaatgaataggacataagccttgcccacgaggtgctctcaggtaatataaggaaatgtgaaaagtagagtagtaagtatagcttagtgcctgagcagggtacctaacccagggaggaggagtgatagttgaagaaagcttcctagacagttacatacttgtttccagggggtttgtgaagttactgccattgagtagggttgtgtgaatgggttaatggagatgggtgccatagaaaatgtaatctttgaataggtagaggtggcactgaagttttggtttaagtataaaagttaacatatacagtatttaaaacttctgttttaaaatagtggttggctaaagtggtttagctttagtggttggctaaagtgctttatgtactgaagttcacagcaatctcatgtggtagttacactgtttatcactatttccagaggagaaaatgaagacttagagcttaaatgattcaagatcacatagaaagtaactgatagagcaatatttta

SEQ ID NO: 12469 - DNA, 1032 bp, Homo sapiens
gcgggcggcccccggcccgcggcggtcggaggacgagcccccagccgcctctgcctcggctgcaccgccgccccagcgtgacgaggaggagccggacggcgtcccagagaagggcaagagctcgggccccagtgccaggaaaggcaaggggcagatcgagaagaggaagctgcgggagaagcggcgctccaccggcgtggtcaacatccctgccgcagaggtgagccgggcgggggccgcagccggaccgggccggggcgggcagctgcctcccggtgtcttcctcctgggagctacccggggcgcagagtttacctcccctggctcgtacttgtcccttcaccgagttaggcaggcagggggtgatggagttttactctgaacaaatgcttcctgggaagttccccaaactcagagtaggacacgtgcttttcaggcttcctggccaggtctcagatccaggatccttttttaccgtggtagaaagacaacttatggctccaggacttgcccacctggacttggctgacttggccacctggacttggctgtttatgcttgatcagttagaaaaattgattaatggtgacgacattctctagggtctcacgtgcccatgtgaagttaccagtttatttctcctttcttaccaatgtttaataacatctgtaaagaaaatgttgccttagcaatatccaagacagctttatcttacagtgagctcaagatgagtatatccaaatgaatacgtgcactattttatatataaatcagctgtttataagttgtgctcctaaacacacagtgtttttctgagtgatacttaggacaatagggatgatttagtaacccacaattctgttcgctaagacgatctctttttgagtactgtgtctgaaaaacatgtggtagggtttttgtttgttttgggttgtttgcagtttggagcattttcgaaacgttacaggtagcagcatcttccattagagtgactggtaaaacatttttactaagtgtataatcacacctccc

SEQ ID NO: 12470 - DNA, 1033 bp, Homo sapiens
agaacataaaatgagagctctggttaccattctatttctaaacattcattgcactctttattattttaatacaaatcctgttttctctttgctttactcacgaacctgtgttttactccacttgaatattgtgatttaatacctattaaaagagaattactgtggtcacccctgaacttttttgcacttatctcttttataatttcttactttgttgcagagacaagaaagatttgctgatagatcactgttggaaatggaaaaaagggtaagtgtcccacttattaaataattatttttttctttcttgttttaggtaaacaatggtaggttttttgtttttattttgttattatggatgacagttttaattagtttaaatatttattgagttaatgtattttgcagcaacttctttatagaattctatggggtttctctaggtatgaaatgaccttgttaaataaaatttaatttaccacataattcttttaatgaatttaaaaaaactgtcttgccttgattctgaaatgtactatacacattttgatagtgaatttgatatttttgaaatgccgtttatctcttatggcctgtacctaaaacgttttaatcataaatacatttattttaattctttataaacctaaaatactttcgttcttgaaataaagtttctaaatctggaacatcaaattttcaaattctttttaaagttaatttaataattttttaaaattttgagtttaaatatttaacttaagtaggctattttaaacaaaaaaaagattacaagaaaatccttatgccacttgatgtctttctgcaagtttttattgattgtaatacattcacttgtatttctcttcacttattgttgctcaaaggtctaggagtagtcataggaataactgtacaagtttagcctcatcagttgaaaatgtataaatgatccaaaagttaaaggaaaagtgcccaaagattgtttgtagtgtagctgagcagtagctagacttggtagggtttcgaccag

SEQ ID NO: 12471 - DNA, 1034 bp, Homo sapiens
aaatgtatttgattaagtattcagaatcttctcttgtagccctgctttagacaaaagagaaccagtgaagacacttttaaaaaagtgtcatctagctcaacccttaatcctagcacttggggaggctgaggcaggagcatcacttgagtccaggagttgaagaccagcatggacaacatcaagactccatctctaccaaaaaaaaaaaaaatttcttaattatccaggcataactgtatgctcctctatttctagctgctggggaggctgagtcagaaggatcacttgagctcccaggagctcaaggttatagtgagctatggttgtgccactgcactcctcactggatacagtgagaccctgtgtctttaaaaaaaaaaaaaaaaagtgtcacctaattcaaaattatccatcttttcagagaacctccactatatccttgattttgatctccattccatttctcttatcattgttaaccacagccctgtaagaccagtaataaatttctgtctactgatgattctattgaattgaaatgcagagccaatggcatctttcagaaaaggtaacctgaatttcagaaccagataataagagaattctcctttaccagtaagatatgtttttcctgcttaggacaaacccattacttgtcactttggatatactttatttcatcaaatctaagacattactcattttaaaacaccattgtgttacctactactgaaaaaaaggaaaggtgctaccaattaaactataatgcatcatcaattgtaagccattttctggttttggaaatattaaaatgtgggaggaagtgtacaatttaaaatattaatcattatatgaaaccagttttggcttttaaacatggaaattttgactctcttcctcaattaatggaaattagtagtattaaaaaaataggctgggtgcagtggctcattcctgtagtctcccagcactttgggaggctgaggcatgtgaattgcttgagcccaggagttcaagaccagcctgggcaacat

SEQ ID NO: 12472 - DNA, 1008 bp, Homo sapiens
ttttaaagcctaaatcttacagtattagtcatgataatatcagtagtaatgtagaataaacagcagaaaataaagttttttcccaatttccagctatatattttctcatgttgatcattgagatgtttcagttctttaaacttctatgtgtgaggcctgcattgtgtttgtaaaaatgttgaaccaacatttaaaattagagatactcacttcaaacttcagatttttgccatttcttgaaaagttggctgacctggcaacactggatctgaattctcacataccaacaattggctggagctaagtagtagcagctgcctaccttccatccccctagatagtcccctggcccattttacccattgtttttacaattaccttgcaaaatattgtcaagatatattgctatattgtggttcattgcaatccttaacagagggagaaaaaagagaagaggagaaagaaggagaagataaatcacaacctaaatcaatcagagaacgacgacgaccaagagagaaaagaagatctacaggagtttcattttggacacaagatgtgagaacctattaaaatacattatttgatagtattcttgatagtattcttaatgtgtccaaaaatacatactaataatttcttatatgccttagatttcatattccttaaatcatcactgtgttttctgagttgttaaataagaaaaattatttttaaggatagttaactacttagattgttggtactacttaaaaggagtggttctgacctaattatggaatagaaataataatgtctgaagctcagagtgcatgtattgattattttataataggtaaactgcttcttgtaaaaacatcttttaagaatttctaaggagtctatttaatttcattttcataaatatcattataagatctacattacagattacttccatctcaaagcatgctaaatagacacagtgctttgcttatcaaattacaacagtcttgtaaaaattagtgt

SEQ ID NO: 12473 - DNA, 1098 bp, Homo sapiens
ttagactgcttaaaatgtaaatttctctctttgacaactctgggtgagctttttggttcataatttaaggatgtctcaccttgcgttttaaaaaaatccatccctgtagtcatgtgttttcagctgctagaaagtgctttcattgtttagctgttttccttttctcttttttgtgttgctgcttatgatgctatagtacctcaaatcgtttgtgggctgaggatagtactgagaaagaaaaggacagtgttcctacggcagtgaccattcctgttgctccaactgttgtaaatgctgcagcttctaccacaaccctgactacaactactgctggcactgtctcctccacaacagaggtcagggagagacgcaggtgtgtaaaggtcataacagtactgctgatatatcttgcccagtgatgaaagttgttttttgttttaaaaaagatcttgtgaggttgatggccatctctccagtagactaataaatgaaataccctgtcagctcagaactatgtaaatttatacaactagcaattatttatatttaggctttgcgactcacctctgacagaattaatgtttttttgtttaaagtcagtgagcaagacagttgttttcttaaacattttagtttctaaggtggtttatttcaaaaaaaattttttgatgaagaactgaaaacaccacacacttagggaaaattagatgcaacatgacaaaaacaggttttatcattcttctcattgtttcctcccattattaagaaatttgaaggatgttgaactgttttgttcctgttgatttggagaatttcttctcttggtaaggaaagacttctgtgcataagtgtaagccaaataattttgagtatgttgaatacattcatttaattttatctctgatacatagaaagcacttattcagattttttcaaagagtctgaatttattttgtgtgcttaaatatttttaaaagattgctcacttctttctgttgctgcctactggcatggaatcatagatgtacaaaggagcttactaactatcttttgggatttccttgctttaccgaaggaaactgagacccagagataata

SEQ ID NO: 12474 - DNA, 1023 bp, Homo sapiens
ggattattctttatagaatattattctgacagcagtgtacagatttgaagatgagaggcttattgagaaaaggtttattagaaagtcattgaagttgcccacaatgataagaatatgaactagagaagtgactctgggcttataaaggagaggagatttagagacttgacctctaatttatggatggaggaaaatgacagagaaggtctaacataattgtgaagtttgaaacataggagattgaagagatatacttagtgccattaacagaattagggaactgaagaagagatggtttggaagtaaaggtgttttattttagacatactgagtttcaagttttcagttatagttctagattgtccactctagaatagtgtggtagaattttacctagaatagacaggtaaaattaggactggaaatttaggagactggactggagaataacacatttgagaataagctgactacaattaatatttagcctgaggaagtaaagaccctcctcctaaccccccaggagaagaaagtagaaagagaatatgagagatccaagagcaggctctggaagggctagcacaaggaaagttgtacacacacacacacacaaacacacacagcctgtataaggaacgttacacacacacacacacacacacacacacacgcacacacagagtcagtcaagaaaaggaatggtcagagtaaaaagaaaaagaaggtgaagatagtgtccagtaaaaaaagccaaagaagagagtttaatggaggaggaggtatagttaagtatttcaggaagggtttatttatatatcaagtaaaattaaaaggtgcttttagacatataaagcagtacttaaatccaagttcatgttgggcagagtggaggtatatcagccattacagtgtaacaaatgcccatttcaaaattgatagatagtactgcctcgtttttctcaactctaaaataacagtaatagtagtatttcattgggtaattataaggttgaaacaggataa

SEQ ID NO: 12475 - DNA, 1033 bp, Homo sapiens
aatgataattgcatctaaagagaggaggatcctgtataaattatatgttgtgtacctacattttaactttgatctgtcacataaggtcaggtgtggaattttccacttgtggcatcatgttggtgctcaaaaatttttggatttgggagtatttttggggattcagattagtgatgctcaacctgtaatataaaaatgtaggtttctccttgattgttatttttggtagaattagttaaaaatgactttctgaggtaaacagcatggaaacaggaaattgtttttaaaaaggagtgagtttaatatatacacctatgtacctgtaaaaattgaaattaaaaaaatttttttttgaagtttgaaaggccaatatccatttaaaaaatctctttgaaaactggtaacttgtctatgaggtaaatgtttgttgaactgaatctcatttaattttaaaataaaaatatcactttttttcaatttgaggtgtcaaagatttcaagactctagcataaaattgctagaaaaattggaccaatttattgtggggattagatgaaatactgtatgtataaaataatatataaaacgcagtactaatgaaagggcttaagaagaaatgtcatattttcaggttaagcatcggtactgatattattagtaacacttgaggcttagaggaaatggtgttgtttgttagaaacacttactatagatttgatactgaaatctgctttggaattctacatctctcttaaaataattggagatatatgaagtagttgacactctttaagttgaaccaagctgttagggaataagatctcaaatctttaacaagacttatctggatctgctgacttttgtagtctcttctcttgttaatctgtattctagctacacttcccttcagacccttaaatatcctgagcccattcatatctccagctcttatattttccctttgcatagaacagtctttccatcccttatcctcaccttctcttaactcctattcgttctttaagttttgtaa

SEQ ID NO: 12476 - DNA, 1028 bp, Homo sapiens
atactaagcaggaaagtaatagctatagtaaaacatgaatagaattagtgaagaaaggtattttaataacatagcagctggaagaaagattaaccaagccatgcatgaattgattacaatataaagtgttaaaatagattttcagacacgaatttcactattttaggttttagaaatgtttttgtatttatatttgaatttacctttgtgtggttttggtattcttttccgagtgaacatgcttcagtgtgttttgaataattgaacaacagttcttttcccctcttggtctccactttacttctacaccacacacaccttcactgagaatagatcaccttttggcctttgtaagcaccagtcacctagtgctgttgcctttcagagttgaatatggagcaagtgaaatctgcagatgctttcacgtatattaagcagccaattgcttaataaaacattatattgtagggtgttataggttcaaagaaatagagagcaagtgaaaaatgtagagggaagaacttgtaccactggaatgagctactttatgctgtttatataagagtcttttcctcttcagagcttgttaaatgataataatattctgcagcaaggttttcgtcataaggatgaaatgagagggatatgtgaaagtacctagcacagcctttcccattatagggaaaagggaggtaatatttgagtaaccactccattcaaaatgttttgttaggtagtggggcacatacagaaagtgtctgcctttgagtttccagtctgttcggggatacagaatgaatggatctgaaatgactttagtcatttagaacatttttttctgtttaattaagcaccacatataagtgccatcattttattccggtcaagcagaattgggagaaaaaagggatacactcctttttttttttggagacagagtcttactctgtcacccaggctggagtgcagtggtatgatctcagctcaccacaacctccacctcccgggttcaagcgattctcctgctt

SEQ ID NO: 12477 - DNA, 1031 bp, Homo sapiens
tattattcatggtaaacaaatcacatcagtagcaaacacagggtgggaactcaatcttatgttatagcttactcttaagaagaatatgtgaagccaggaacatggttaaaggtacagaccagaaaatttctgacatgtgataaatatttcagtgacttttcagatttatttcttgttagccgctgtgtctatttggtgctacaaaaactgaaagaaacaaaatccctgatgtaagggcttataataaatacacagtttggagatgaactaaggatattttacatttacgggaaaggattggacaatagtatcattttctcaccatttgcatgtacatcatgtctttccaattgttttcattatttttctgaaagagctgcaaaattgtgcagtggttcaacctgaccaaagtggtattatgctgctgggaagtaaaagtattagacaccaaactggaagtattgttttcattatcaaatgactttaagttcttttaaagcatggatgtaaaagaatttttagatactgaagacacctcaatattgggatgctaagtttcttgggtttctccattcttgaccacacagtggtgtcattctattgagggcttagattctgtaaaggaaaagacaaattttttttttttttgctttctagtctcaaactcaacatagaacacttctgtgaccaaatgtaaaggtttccccacccccccaccccatcaattttccaagcaggtaccaaatggatgtcctataattcaattcaattctgaaactatttacttgaagatggtgtagattccacagattgagggctcagtctcacaacacttagcctacttaagatgccaattgcaagtagtaggttgtcacctgtcctttgactggctggagactgagattctcacaagcccttctttgggttcagctgggacagctcacaaaactgaggaaaacacctacttagtttactggtttattataaaatgaatcataaagggaatttttacccagttcaaattatatggt

SEQ ID NO: 12478 - DNA, 1053 bp, Homo sapiens
cataaaaattaccacaaatatagtagcttaaaataacacaaatttattgtttcctataatgctgtagaattcaatgctcttactatcaaaattccaatgtcatttttcacagaagtaggaaaaaaaaatcccaaaatttgcatggaaccacaaaagacatcaaatagccaaatcaactttgagcataaagaaccagactgaaggcctcacactacctgacctcagggtctattacaaagctatggtaatcaaaacaacatgctgttgacataaagacagacacatagaccaatggaacaagctagagaacccagaaataaatccacatatttacagttaattgatttttgacaaaggtatcaaaaacatgcaatggataaaggacaatctcttcaatcaatggtgttgggaaaactggatatccaaagcagaagaatgaaattggacccttatctcaccccataacaaaaccaacttaaaatgattggaaacttaactgtaagacttgaaactgtgaaactactagacgaaaatgaaagaaacgctccacaacattggtttgggcaaagatttattggataccttcccaaaatcacaggcaacaaaagtaaaaatagacatacaggattctacccaactaaacagcttcttcacagcaaaggaaacaacagattgaagaaataacccatggattagaagaaaatatttgcaaaccatacatctgataaaggactaatatccaaaatatgtatggaacttaaacaactcaatagcaagaaaacaaataacccaatcaaaaatggggaaatgacttaatagacatttctcaaaagaagcctaaggtatagctaacagatgcatgaaaaatgctcattgtcactaataatcagggtaatgcaaattaaaaccacagtgaggtttcacctcacacctgttagaatggctgttatcaaaaaaagacaaagccagatgtggtagcaagcacctgtagtcccggctacacaggaggaggagggtgaggcaggaggattgcctgagtccaggaatttgagt

SEQ ID NO: 12479 - DNA, 1035 bp, Homo sapiens
cttttcattttttttaacagtgtttttcaaagagtttcttttttttttaactattattttaggctatctttttggtttgtaggccctcatattaacaaatttgcactaatttctgatggacaaaattataagtttcagaattggaaggaacagaagaaaagagaccctaaagatagcatagttctatataacatttacttgagaaatatagcaatcaggaacttttttggctgaaagtagcagaaagtccagctgtagtggcttaaacaagaatgcttttcttcgttataacaaattcagagataggcaggtgttttgcatgcacttagaagttccatgtaatcagaactgacatctgtacacttccttggtccttctctctgaagttgaaggttgccactacagctgataatatccacacacaagacaagaagtagaagacagggaaaagacagcacttgcaccacgagagtaacgctttcccagcagcttctcacctgcttccgattgaattgtcattggacagaactgggtcatatggtcagacaatactgggagaaggggattgaaactggggattgtgtgagatgagtctgtctagtgtctgcctcagcagaaagttttaaataacatcaaaatacaaaaggcaataaacctctactataaaagtagaagagagaacaaccaaaatctagctttaaattcaaagttttttcaaacttgctgctggctaagcaactaaattctaaaggcacttttccaattgcatcttgtgtatatatatataatagtaataatagaaataatagcagctattagaataaaagcataataagaataatgggttatggtttgtgaagtcacatactttatcttctttgattgcctctttgaatataggcttttacataatagacaactaaggtacacagatagtaggttacttgaagtcatgtagaaaagagatccagaatgagaaactcacaataaaggcttgtcatcccttacctagctttctgtaccaattagggtttt

SEQ ID NO: 12480 - DNA, 1032 bp, Homo sapiens
gcagttacattaagtctctggaaaggaaagttgtagacagtgcaaaattagtagccactcaagatagaaaacctttacaactgagaaatagggtgaaaaaccagatacagacatccttctctaaatgtgagcacctgaacatatttgcggatcatgagcaagaggcagttctctcaaggttagttgatgaagagaagaatattcaaaagaaacttaatgcaaagatagcattttcagatgacatttccacaatcaaagatctactaaaggaggtggcagaaaagagtgtcatgtcagaaatgaaagtgctgctgggcatcaagagtatctgcaacaggcatgaacgcctgaaaacttcagctctctattcactcctgtgcagtttatccagttgctctgggttccagaatgatgtagtttatcctgttgttctgggttctgaagactttgattcctgccagcattactgagaggctgaagtggtccattcaccaccctgaattaactcttgagggctgtaaagactccctcttcaggaaaggaaagtgatctctatcagaacagacagatgctggacaacggagctacagaatggtaactctgttgcttgaagcactattttagtcatccttctgctaaaggaaaaggccagagtagttggcatctatctggactatgagtttggcaacattttgtgttgcaatttgaatgacttgtctcacatccattctttcattgatgtcaatttttctgaaatactaagctttatttcagtattgaacatgattctaaacttcttgcagtctgtgcggtaacagatgcaataattattattggcacacactggggtgccaaaactctaccaaaggggtaatataccaatatctatcaacactggaaatgcatatacttttgactcagtaatctacttcaatgaatttatcataaagagatgttctcacacttacaaaacacagatattcaaggttatttcttgctgtacagattgtaagaaaaaaaagcacctcatca

SEQ ID NO: 12481 - DNA, 1035 bp, Homo sapiens
cataccatgtgcattgagatcctaggagaagccccactctattaggaattagggaagtttccagagccttgcaactggcaagttttttctccttaagttaaatataccatatctttcttttaactttcctcgtatgtcatggtttccaatcctttaaaacatctggctagctttctctccatgatctccaaaattcatgagaaattcttcttggaagtatctgactctataattttatattttgtatgataggtttccatgcaacactgttagggtaagtcatgttcagttacccagttgttgagccagagttgagagcattcaagtgttgccttctcttaaactaaaaagaagactatttgcaaaaaaagaaaaaaaaaaaaaccattggcgtaatgtggttgagttatgcttttagtagttatatagacatttaaatctctgacaatacctatactatttttggacatctatttcttagaatcctcaaaaatacatgttattccatgaaatgattcccaacagtttttaaattaagtatatgtctattctgaggtctcctgaggtgtgataaaaagaagtcagagggtgccaatggccgtggttttctgcccacacttctgcagatctttgccaagcctctcctgtggtgctcagatggagtgcagtgccttctgcctgaagatgaatccgcccccagccaactaagcaatccaaccaggcagtttgagctggttagaagtgtgatagaacatgttcatgggtccacagaactccccacactacagaatcttctcaagtcagatagaaatgctatatgtttgtgtgaccagaaaacatatgcatcttaaactgtcaacatgagttcccacaaagcgttcacttgagctgcctagaattctgttcatttgtctcatgaactacaccacacaaccttttatgtatatgtatatatacacacataaatatatatatatatatatttatttatttatttattagatactttagtttaaagtgctacatgccaatgcc

SEQ ID NO: 12482 - DNA, 1051 bp, Homo sapiens
cttcagtgttgtcccaaatcccatgatcatttagtttttgataacaaatataaagttgggtattttcaatagcatactgagtaaatttttaaaatttgaacacatttaacttgaaccagttcttctttgggtttgccaattagtctgcatttgaggaacgcagcaagttgttggcagattaaagcagagatgagggtcagatgagtaggacacatcgattgtcatgtctcattagtaacttctaaattgacagtttcctttcatatcgcagtgatagaagtacaaagcattatttaccatttattttatgttgttggtacacatgcactgtcgttgtattagatttttaaactgaacattatttggtaaaatttttagacacctcaaaaaactagtaataagtcagtagccagtgttatttatttaccaggacatcactgttactatcgcttgtcgccttgattgcagtgttccaccaacactggttttgtctgaccttccacatgtaggcttactccctcactttagcatctctgccctttctgtcctcctgtctggatgctccttctttggatctttacatggctgacatttccagtctcagtccaaaggtcattttccagacctttcccagattggcttccatgacgatcttaatcaaaagaccactataggttattccagtgtctctatagcatcaatattatcccggaaacctagaaaagcacctttaaagtcacctgctctcctggcagctagcttgtatttggttgaaagccatagataaccaaatagtgaagcatatattttttctcacagacaagaatcatgggtttggacagttcagggctagtacaacagctcagtgaggacattaggcctgtgtcctttccttcttcctactccaccatccttagcacatggcagttatcttcgtgatcacaaaatgggagttttacctccaaggcacttcaaggcattatatctgtcaaaagaaaggggaaagaggaagggtgcaaagatgaaaatgttgaaggcttatgccagcagt

SEQ ID NO: 12483 - DNA, 1049 bp, Homo sapiens
gcacccaccaccacgcctggctaattttttgtatttttggtagagacggggtttcaccgtgttagtcaggatggtctcgatctcctgacctcatgatccacccgcctcggcctcccaaagtgctgggactacaggcgtgagccaccacgccgggccgcctctacctttcttaatgttccacctgtgttatgttcaagagacaaacttattcatcaatgaatagaacggcacatatctgaaaagggttaaatgctgttcttccctggagagcttttacatatagagagccaagaataatccttggttttggttgaatgtgtgttgttcccattgtttcctgtactactggttgatttctaaagctttaaaaacctgaattactcagataatggcttcaaattttaaatccttttctttgagctaaaattagagtatttatctattcctaacagaaatttgacttcaaagtaaaaaagtaaaataaaatatgcataatatttacattggtgtagactactgcatttgtaacatggtgagctcattaaaacactttggactgagaagaaggtattgcttttaaatttaaagcagtgttattttttatcaataaaatgactgcaatgagatacaattatccaggaaactattaaacatattactagttggctatataaatattttgtatgccagtacaaattcttgtactttgtaatattactttattaactagtaaggtttatattatttttaatataattttaagttacagttgccattgccaaaatgacttggtgatgtattatttgcttcagttaggatgttttacaatattgaggaattaagaaaagctctagtaaggtgttcttaaaaatgcaaggcaggttttgtttagagtactcgtcaaccatgttggccaaatgaatattgtaagctctttttgaaaataacaaatattatagacattgagttttaaaacacagttttcatgtcatcatataaattgtcttctgttttctaatgatttttaatttttcagaggaaaataattt

SEQ ID NO: 12484 - DNA, 1072 bp, Homo sapiens
atattttatttaacctgatatagaaacaataatctcattttaacacatgatcacttaaaatttatgaattacatgtatttttctaccacgttttcaaaacctggtgtgtattttacacttacaatacatcatctgaattaggcacatttcaagagcttaatagtcacatgtagggagtgaataaaatattggtatagataaatagatatttctgaagttcacatagccatatgagcccactgatgcctagacaagaatgagacagactctcactggatttagataatcatccatagagtaaaataattagtaagctggtttggctaaggtcacccttaccagctagtttatcaagtatgtggaaagataaacattagatgagtgaagcagctaggtcaattctgtgaaaaaatgtcctccctcagaagtgttttaattgggctgaaaatatgcacttgctgggacttttctcctggttaagcgcactggcctgaatgtgttgcttaaaaatagctttacttacaatggccttacgtcccatttgtacttggcatttttgagtaggatgtagttccagttatctatcaaatgctttgaaaaaagatactagattttgcaatactccgagtatttctaagttcttcatgctttttattttatagttatgagaaaataaaatgtctagatttaactcacaaaatattcctagatttttctttgcttttatttcaagttttattatttaaaaatgtgatttttttctattaaaattttgggtatatgaataaatttaaatcataatttaaatgttcttatattgctcagaagaataaaagcctgattcatctagccacctggtggttgaaaatctttccttgtttattgaatatgtctgcctcatcaatctctatgtccctatatggaccattcaagaattttataacttttaagtgactcattcattttcatttacatttcaagaaaacatttttattattatttgaagactatgaataataatttattgatatacagtaaggcaaatatacagatgagagaaataaaatgaaaa

SEQ ID NO: 12485 - DNA, 1053 bp, Homo sapiens
gtcatgtcatttgcatacagattatttacttcttcctttccaattgtttgctttttattttctttccctgtctaattgctatggctaggacttcagtactatgtcaaaaagaagtagtaaaagtgggcatccttttcttgtgctggatcttagaaggaaagctttcagtttttctccacggattaagatgttagctatgtacttttcccgcatgatctttattgtgctgaggtaattttcttctataccaattttgttgagaatatttttcataaatagatgttgaactttttcatttgccttttctgtatctgttgagataattctgtttctaaaaaattttgctgatgtgttgtatcatattgattgatttgtgtatgttaaactatccttgcattccagagataaatctctcttggtcatgatatgtgatctatttaatgttctgttgcattgggtttgctagtattatattgaggatttttgcatgtttgttcatcagaaatattggcctgtaattttattctcttgtagtatctctgattttggaattaggggatcctgaccttttaagtgttactgcttcttctattttttggaagagcttaagatgagttggtatcaattcctctttcagtgtttggtagaattcatctgtgaaggcattggttcatggacatatttgggttggtttattactgattcaatccccttatttgttatttttctgttcggattatctatttctttttgattcagtattggcagattgtatgtttattggaatttacccattccttcttggctctgcagtttgctgggttataattgttcatagtagtctcttatgatcctttatattttttaggcattcgttgtaatgtctcctctttcatgtctgattttattaaatttattaattttgggaaccaggggcagaaagctatggcttgaatacatctcccaaaagttcataggtttgaaacttaatcccagtgcaacagttttgggaggtagagcctaatgagtggtgatatgatttggctgtgtccc

SEQ ID NO: 12486 - DNA, 1025 bp, Homo sapiens
gttttatttggtaggattaagttcaatcacatatgttaaaaatcacaaaatggcattgactgaaagaagttttgtttcccacataaagactgctggatacaggaagttcaagttcagttgcaagtgaggctggtgcagccatgtgtctggactgcttttcagtcttcccttcctcactccatctggctaacatctctttatccttcaaatctcagatccaaagtcattttctcaagacatctatgataggtactgctacctgcctccaaatatccattcttttcttctgctttattgaaggacaccccattcttaatcaggcacatttcacatgaccacaccagcttcccttcaattgtaagggaacttaaaactgaagggaagctggtgtggtcacgtgaaatgggatggctatggttggctgtatgactaagtgttcacctgctaatgtaagggaacaggttgcataaagctttccttctacttgctaactggaatgcaaacctgattgctggggctcaaccagccatctttgtttataaagtggaagcacatgcttaaaatggcagaaacaaaagagaaggagtatggacctttgtcaacttgcagcttctgtgcatgaccttggaacacctatattcagtagtcttttttataaaagagtagtaaacttctttctcatttctgtcactcttatttcgtgatacttacatatgcaactgaatctcatcatagctaatataacagcctttcctgaccaaatagatatgatcatgttcctctgttttataggtttataaccccatattttttctttcatacaggttatctcagtatataattatacatttatatatattgttttttctctttttgaatggaactttccagagagcagagcccatatatctttctgttcacctttatatcaccgatgtctatcatagtgctgatgacaaaataaatgtttcataaatacctgttaaatatggtgtgatcacattgccaatatttataatctaaga

SEQ ID NO: 12487 - DNA, 1618 bp, Homo sapiens
gaatactccatcagctaagagccttgttctgagaacaggctagtttctgttttagcatgttttactggaaaaagcaatggccaatttgttttaataaatcttaaacatcctatatttatttttaaatattcttctaggttatttgcatgacaagaaggaaaatatgtattttctctgatctttactgtatttattgatagaaggcagagaatgctgaagaaattgaaaagggtgaggttaagagctagcacataaaccttgtagtgactaatgcttcattttcttagaaaaaaaaaaggaaaagagaagatgggtaaagagacgtaataaaacttgatagaaagcattttgaaacaatttacatcaaatggctttatcctaatcactgtaccaaaagtaaatggcacaggaatgacgttgcatgcttcaggagagtgggaaatattggaaataatgtctttttgggggataatagatgttagcagcaatgagagtcaaggtgcaattggaagcatagatgtgtagctgtcttttaagtagatttctgtgattatctttctaaacagaattgaaatggaaatacgtattggcagatgccacgaaatattaaggaggcaaggaattcaaggtttcaatgagtaatgttgaactgactgaatatgggttattctttaggtaatgaacataggaagtgatatttttattgaaaatatatttcacttctcaaaaaaatagaaaaactccccggaaaattgtactttgcttaatgttattatagtaccatgttacagacataaattccaagaaaatgtattttattcaatgatgattcccaggacatttcatcatatgtgacactccaaaaatatatgtgaagtgaatagatgttatttggtaatacaaatttgaagatttttttttaccttgtaaaatattgtaactgaaataaagttaatatattttgcactattaagtaatccccaaatttaacttttacatatatctaataagaaagaataagtagcagtatgaaacatgcattgaaggacgtgtgagcacatcaaccattgtagataatgatgagagggacagtcatagtgttttttataagctaaacgaaaggtaggagaatttgtgcttttgtagagaagggtcaaatacactcacaggcctagaaaattagccttatttttaatattgcgttaatctaattttattaatatagccagttagtatattacattttcaaaaaatatagagaaatatttaatatgaaatgctgccaatataatttactaagtgaaaaatagatcttaagaagaaaggatgaagaaaatcacaggcattatgtagtctgaggaaaagaacatggaagagaaactcaattccatctattcaaaagcaagactctttgatttgaatacattattattgttcaccatgtctggtgagaaacctgtgggaatacataaaagtgaatgtaaacaagatgtttcaattggatataaatatgaatcaataagtattggagtaaaataatcattaaaaatggaatcttagtcaaatctcgatattggggattttctagatgaggcggactacaaaatgcaaggagcag

SEQ ID NO: 12488 - DNA, 1046 bp, Homo sapiens
gatcttgaaatcaacctggatttaggttgggccctaaatctaatgactggtgcaggagaatgccatctgaaatggagacagagattggagtgatacctctacaatctatggaatgccaaggattgctaacaaccaccagaatctgggagggaggcatggaagagatcctcttttggagcttttagaaggaaacaaatctactgacaacttggttttggatgtctgggatccatttgtggtaatttgctacagcaccactaagatactaagacaaggaacaaaggatctaactgtgacagaaatgtagtgagctaaaggcaaagtggcataaaatggtattggagtgagaggcaacagctaatcatgctaggtcctgtaggagtctggattttattccaagtactatggaaaatgatggaagtggaagtactatggaattacatgacaagatttatgttttaaaaatattatgctggttgctcttaaaattaagtgaaatagaacaaggactgaaccaaaaagaatctggtaaagggctaggctaatacaggagttcaggtaagtggtgggagtttggtttagggtcatagcagtagggaagtgaattgggttgagatatattatgaagttagaattggggacttgctgatgggttggattcgtatattgaggaaaattaaagatggctcctaagtctggggaactactggatagatgctcatgacatttaccaaaacagagaacataagaaagatttgggtggggttgggagtgggaagaaaagggcaatgttctttagtttggcgtaggtgaattcttcatatggattgagatgtaaatttcagggataacagtatgtaaataatatataatgatatgggaatagtgagaccatctacaaagagcaagtagaaagatgggaggaaagaaatctaagaccaaaccaacaatgaagcaaattagaggaaaaatgtgcagtaaaggacactaaataactagctgtcaggaagaaaatgtatgaatcttatattacagaaggaaagacg

SEQ ID NO: 12489 - DNA, 1026 bp, Homo sapiens
tccctttcccctctctgggtctccagaagattggcggcagcattaaccttcccaggggagctatgtctctgtgttaaggagcactcatctggaaggaaaataacttgttctagcttttcttctgtaactagacagtcttttcaagtgcttacagtcagggaaacattaatcagcaaaacgtgaaatttatgcatttttttcacttaacattaattataaccactacaggcactttaaaaatggatctgattgtatattcataataaattaaagttgagattctgcagaattattacttacaattaaaatctatgttgattccagaataccacataataggaatatgccctaaagattttatgatcggctattaaattatttttcaaagaggtattttaatctattaaagtacatttagaagatttataagtattataggaagaggagttaaaattatatatatttaatatttaatattttaccaaaagagttcaccaaagttctctgaaagtaactaaatcatttatataataaattctctggatattcttatattttactcatagacataatttatattttgattgaagcatggtgagaacttttatagaaaatcctatttttaaaaatttttctttcctttatcacagattacaatggctaatctacatgaatgactatttttcttctattgacaactccttctgcaaaattatttttatttattttcttgagttatagatttagggggtacaaatgcagctttgttacatggacatattgtgcatggcgaagtctggagaaatcttccgcatacacctattcagaaacactagatttcacctaatttaaatcaccattctctaacaggtcaagaatttaaataaaaactgattacaaccaacatcatcattctaacttttaaacaaaagcatgtaagaaattgcattaaatataagtagaaaaatggtcaattcaagataaaattcaagaatgtttttgaaaccatgtatttacaaaaaaatt

SEQ ID NO: 12490 - DNA, 1052 bp, Homo sapiens
atggaatgaatctaagtgcccatcaatagatgactgggtaaacaaaaatgtggtatatatacatatcatgggatactgcttagtcataaaaaaaggatgaaatcatgtcttttgcagcaacaaggatagaactggaggccattgtcttaaattaggtgaaataactcaaaaaagaaagtcgaatgttctcaattataattgggagctaaataatgcatacatgtggacataagagagtgaaataataaacactggagactcagaaaggtgagagagtgggagggggttgagggatgaaaagttacctaatgggtacaatgtgcattatttgggttgtggttacactaaaagcacagacttcaccatgaaacaatgtattcatgtaagaaaactgcatttgtaccccctaaatttataaaaatgataaataaataaatagaaggctcaaaattacataagcaatttaataacatcttgtcattgcttataattatagagcttttacattatcagtcaggcataacacaatgttatttggaaactttatgtagaacgattaacaatcactattaacaatgtcaaatatggccttttaaaagaagatatcctataaatcctctaacattgtttcttaagattattcacatttagagatagagcattgtaaccaagccaaaagatgattgggaatattctcttatgaaacagtcacctttccctgtttcacttttcttatatttgtagatagcttgattatttgaaatgagtgaagtaataatattttgaaatatcccaaaatgtacttcaatctcaaacattttagctgataatttagataaaattaacagataataccatttacaatttattttatttacagtcatgaaggaaaaatgtatcttaattttaccctctgatttatgctttcagatataaagcaacttaaaggggaattatcccattataatatgcagagttttctcagtgagcttgctttgtagacagaaattctagagtgtctttatattctctaatttgcattacaatagttg

SEQ ID NO: 12491 - DNA, 1055 bp, Homo sapiens
gctgaggaaatgaatggaattccaagtagttggattagccttgacaaaaaggacatcttcagagaggtgagaagtagttaaagatagaacagttcaaaatggtatctagatccaaggtatggtgattcatgactaggtaggtaaaatggaatagagaggaggggctcagaaaacttcgagattaaagttcatatatacacataattttcttaacatccttaaacaacaagtttaattcttttttcagtctggcatttctatcattcatatactggtttcattacttttaaaagtttttttttttaacattttaggatttttcatagctttctatattttttcctagttgaaatatttctctaagaatccccatttgtgccttttatttaatatatactcttaaaagctacaactgtgtttttaatacctttttggacattttactaataaagtcctgtttcctcatcccccaattaaaagctcctttacaattccaaagaaaaataaaaagaaaacatcaaatcaaaaagcacaagaagaatatgaacagatacaagccaaacgtgctgctaagaaacaagtaagttctactttgaaaatatttagtatagtttttcttatttatcctaaatatatatactatacctgttgtgcttcttggtgctgggcacacagtattctctctgtaaatatttgttgaatgaatgagtagtctgagcaaaggtagaggattgcatcttattccaagtccttgcttgtattatgtcaagcaatactagtaggtcaaaaataggattttgaacacattgtttataggtcaatattgtgaacatctgggacaaagtttcactgagtttggtccaggaacttgcacttgttaacaagcacctcaaaagatttttatgtatgataaaacttgagaaccactgacctaagaaaaatatagatgattttcataacattacattgaagaaagtaaaagcaaaggggaggtgttagaataaaatacttttttactataaagaggtgttcttgcctgtttaaaaaaaaaaaac

SEQ ID NO: 12492 - DNA, 1066 bp, Homo sapiens
ttacataaccttcctaagaatcagttaatagtggcaacaacttcgtgggttgttgtgagtactaaatgagttaaaccatataaaatgcttaccggtgtgtatgccgctatagctcatctatgttatcggttactgagcatttttagagtgtggtaggcaccgtggtaagtggtacacttcttattattctgatctttctgaagaagctgaaactcagagaggacacgccatttgccattgtttgcactattttaaaattactaaatggcagaatcagaatctgaaactctctgtagaattcgtgttcttagtcatgtttgacattgctctcaataaaggcaatttgattgtaatggcaaaaagagataaaatgccaatttaaacgctattattactgaaatcaaaaggaactgtttattaagatctgggccacacttggctgatctgaattgtttcatttaagttttgattatatacagtgataattatctaagacataaagcacaactacatgaaatatctgttcaatatttaatatctgttcaatgtcagaactttggatctgaaagagtatcttatagacaatataggtgaatttcttcaattttcaaagaaaaatcttttagcagacttttgaatgaatgaagaatacatatgtgaatatgcaaagtacaaatagttcaactctgcgaagtttataattgttttctgcttcgaccattagattaacagcagaaaacacaaaacatggagtgttagtgaagcaactattaacttttattggtaattgacctgttttgctatggaaagaaaaaaagacataatgggaaatgattgaggataattaatttttcttcatattctcatttcatatttcctttgatattcttaaaatatttaaaaaccaccatgtaagtagaaaatccccatgtacttaaaatctccatgtaaaggactgatcaactttcttactcataattatttgtttcctaaaaatagatgtttatgcttaagaacatattatttcccgatttaaataaactttggatgcataaatatcattgta

SEQ ID NO: 12493 - DNA, 1049 bp, Homo sapiens
gcaggcactctagggtaagactttgcaggccagagggtggaatcagcacttcactccaacgacattagaaattcctggagtgttttaagcagggtatgacataaaccaaggggcagccagcaattcagttaggagaatattatggatagtccagaaccatttctagatgtttggctttactaatgggatggagggtggggccattttctgaaatagagatgggtgggaatagctttgagggaaattcagaagtttccctctggacctgaaatattttagagacctattaggcctccagaggaagatgtcaaggaggcagtgaatgtctgagtagcacacttccttttctattataaatatttgctgaactgtttaacagtgaaaattgctgaagcggaaagtaaaatctttacacgtttgattgtttgggttctggaagatacagcataggaacaatactgcattgaaagctttacagaatcacaatgaaaatttggttaaaagaaaaagaaataggactttattttgctacttagaacaacaacaaaaaagtaggaattcattaggtagttagtgcctgttcatttctgtcttaaatatttcttgttttatgaactataaggaatcaacactattgaagctacaccatagctgatggattttttcaaaggagatagtgtgttttaaatgtaaattgtatctcaaataaaatcttaaggctgaatcacgactcataaaccattcttaaaaaatggctttagaagttattaatagttttattaatcctgtcatgaaacagtgactgtcaaagtacagaaactaacatataaaatcttatctataaaaaaatggtcattgtatctcacttatttttatttttatttctttgcagatcatatattttagttctctgtttccatatgtggtacttatttgcttcctcatcagagcattccttttaaatggttcaattgatggcattcgccacatgtttacccctaaggtatgtaccatatttctatttaaggcttatgatcatgaaagcatta

SEQ ID NO: 12494 - DNA, 1050 bp, Homo sapiens
tattcaattagtcctaatgtttcagttctctaattaccaattagttaaattatggaaattggggaaagtggtaaaatgagtaattcattcattttgtttgtttgatatcatttgtttctctctgctgtaggtgttctaaggaatagctgcataagacattttgaaataatgtaatgtgaagtgtttcttaaagctctgaacatcattaagtagttaataataattccaacaaggaattcagagtaatgtaaaagactaaatatcattccttctaaggcaaattgaaaattagaatggttgtggtttaaaaagacattaagtgaattctaggtagcttgtttgttattatttttaaaggacgctctaggaaagtaattgctattcactattttgctttcgtattactttttttttttttttttcattatcacagccattgttctaaagctctccacatctcttggctggatcatagcaagaatttactgttggctcttctctctgccgtttaactgtccagctgtgctattttccttttcaaagtataactgatttcaggctaacttattaccactcatcatcatatactagcaggaatggcaatagtagtagtagtagcagcagcaatagtagaagtagtcataataacaataataataaatgatgataaagatgtttctgacaagaattagggtaagaacagtaattgaagccaattatttattacaaatgtattttgctttgggtactgtgataactactttttatactttatcccatttaattataaaaaccactcttgagaagtaatttttattttcagaaccattttacagatttaaaataaacaggtttgaggaattagtttaacttatccaaagtttcgtggctattaagttctagtatttggagtcaaatgcaagtctgtctaaatctagagcccatgttctttaactgcaacactataatgtctcaccccgtcctagtcccaccaattagtcaactcttttagggcagaagtctgtctaattcatctttgcttcctgttac

SEQ ID NO: 12495 - DNA, 1035 bp, Homo sapiens
aaaattcttatacttacgggaatattaagctctgaaatgctaaagacagttacatgttttatactctgtagaaagggtttctatcataaaaataaaaaagaataattctgtatttaaattttttcatcattaaatatgatcacatttcaacttataattttacaggtacctacagaatactggacatacggattcagaatccataaggctttatcaccttgaatcaaggatttatttgatatcatcctcggtctttacttcctatcaagtaacattgttttgaaaaatagagttaacacatttgccataagggagtttttttttttttttttaaatacttcgcatactctccaatgcccaaaaatagcaaggtggtaaaaagagaattagatgatgatgttactgagtctgtcaaagaccttctttccaatgaagacgcagctgatgatgcttttaagacaagtgaactaattgttgatggccaggaagagaaagatacagatgttgaagaaggatctgaagtcgaagatgaaagaccagcttggaacagtaaactacaatacatcctggcccaagttggattttctgtaggtttaggaaatgtgtggcgatttccatacctatgtcagaagaatgggggcggtaagtaatctttttaagtgataaattactgtagtaaattgcaattgggtttctcaaatagctcctattattgctgtttctcattatttttgaaactttcaatttcattgtaaagctagagaaacccacttctttgtgggaagtgagcccagatatgttttcagattacgtttccacaggagcagatgggcttgctgtgaatgctcagggattgcttaagggtaacacattctcaacttctttctccggaagcttattaaacaactctgaataactgagtgaaacttttcttgcatcgtttgtgcttgtaaattattccctttgaagaataacctaaagcttctgatatatgacaatactggtgaaggaaaacagagaattttctctccgtga

SEQ ID NO: 12496 - DNA, 1025 bp, Homo sapiens
tttaaacctttcggttcattcattcaacagacaagtttaaacattggtaatatgggggtgagtaagataaacaatgtcattctcaaggcaataacttattttctcccagacttacatgttattgtgaatattttaatgttaattacaattcttcccctatcttcctacaaccaccccagacagaccaagaagtgggacagggtaagaaaaatagtaagaaaagagagcttagataattttatttataatatcattaaggattcattatagttttttgctcatatgagaaaaggagcttttaatgcatgcaaatacccacttcaactccctttttaataagtattttattttataaagtttggctagagttgttatacgatatctgtagtatatatttatttatattcaaagtgtttatgatataatattacatttaaaatttgtttacattagatactgattttttaaaatagaaaatatgaccttcaggtagtttgatcagaatatttgagtgtaaactttgccaaaggataacttatgtaaattggtgaggattattcacttggtgtgtaaaaaacatgcagtagtagccaaaggtattaccttttattttgatttttgtgtgtgtattttttgtccaaagaatataaatgtatagaagagatatagtattttccgtaaaaatttgggggagattcatggttcacactatttaaaattttttttctttgtaaaatgttgagtgtttttactataatagtatctctaagcttggatacactccttacttttctgtctgtatggaaaaagcaaaaggaataagaaaccaaagtttattgtgggaactgaggttaagagaggcataactatcagcatttacacaattaataagttatagtgctaggacacaactccaaatttgtcagactaaaatccatgctcttatccatatatcacttgctactatgccaacacattttatcttcagataatttaataaatgtaaatcttttttctggataatt

SEQ ID NO: 12497 - DNA, 1032 bp, Homo sapiens
ttttttttttacaaaatacagatggtgggttgtatttggtccatgagcaatattttatgggcatggatacatgccaatacaatcttttttacaaaatacagatggtgggttgtatttggcccatgagcaatattttgttgactcctgctctattgtacagttgtagacaggaggctcttaccaaataatgatgaggacaagtattacaactcttcggtgcagatgaagtgcagtgagtgatagcttgttccttagttgattgtctatcacaagaatggatgctgctaagttggcagagattgtgctgttacttgatactgattccactactgtccatatgacctatcgagcactgatactttatcactctatctctcttcctggacatttctcttcatttcttcttctattctcagatgtaacaattgtaatacatttttggcaattgccaacctctcttttgattttcttttttgtctatgtttatggactacatttatggactaagtttttaggcgggcttttagaatttataaaaatggttatccttcaagaaagttactcttaaaaatgtgaaattgatctggcttctaaattattgttgctatacttagttttaataaatctcttcagaaactaaatttatctatttacttttggctgtatgaaaactgtgcacaagaagtcaattcttatgttcagtgggtgcatggtcttaaagtaaaaatacaaacaaactggtcatggtggctcacgcttgtaatcctagcactttgggaggccgaggtgggtggatcacgaggtcaggagttcaagaccagcctgaccaagaaggtgaaacctcgtctctactaaaaatacaaaaattagccgggcatggggacgggtgcctgtaatcccagctacccaagaggctgaggcagagaattgcttgaactcgggaggcagaggttgtggtgagccgagatcatgccactgcactccagcctgggggacagagtgagactccatctcaaaaaaaaaaaaaaaaaa

SEQ ID NO: 12498 - DNA, 1055 bp, Homo sapiens
tatgttaattctttattactacatacatatgcatgataggatatattagtatattcttatgcagctgtgcagagtagattttgaaatggtttctcagcagatagtattaataaaaatctacaggcatagttggatgcatgaacaacattcaaggttacatagcaggaatcattagatttatttctactttgcttatcataccactcttctggctgtctttactaaacaatttttgatgtatttatctgcttaaatattaactttgaccagtaatgatcatctctttttctgtgaacaacaagccctaaaaataaactgggatatagggcaatttcaaatgcagagtatcacttgacacagggcagagctgtaagttgtgttcagccttgaaggtcactttatttccttgtgattaatgtgctaaggtatcttttcacataagatgaattgacttttatttttaaatagaatgcatactttgggaactttttcacctatcagattggcaaagatcaaagagattatttgttatacagaagacagtagaagaaagcgggcactctcatgcattgctggtggtagtgcaaatggacacaatttttatcaagggctatttggtaatatttatcaaaattataaaagctcataccttttgatcaagctgttccagttctaggaatttattctacagatatggagatgcaagatatacaaaataatttgttggaacattgtagtagcaaattatcagtgatgatctaaatatatggtataccataccaaggaatatcatacagtagttttttaaatgaagctattacattgagatcaagagttttgaagaatttattagagtgaaaaactaagaggtagaattatgcacatagtaatagttgtgtaaaaagaagcagattgggggctggtggggagaaaacacatattagcttgaatatatatagagtgtttaagtgtgtatacacacatatatatatgcttgaatatacagaaaatatttattgaagattttggttacttattgggaggtacagatggta

SEQ ID NO: 12499 - DNA, 1166 bp, Homo sapiens
ttctcactgagacaaaagtcagcggctggtaactggtgtccattctttcgcttgagtgggttggagaaagacggcatggctggaggaatttgttttgttttgctttggagcgggcttcctcagttgcatcctgcatcgggcgggcacagccccgggctctgggaagacgccgctcggcagccgcagtggccgctgcatcaatgggttttggggcagggaggtgcggagcccagcctgcgctcctggctacccctccgcgccccgccgccgcccacagcctacccttctcctctgcagccggtaggcggccgtaacacgggcgggccgagcacgtgggcgcctccgtcacaccctcacacatacacacacgcgcgcgcgcacacacacatacgcatgtacacgcgcacccgcacccgcgcgcctgtatcccgtgctgtttccctggcagacacacaggcgctcacgagtctctccttgccagcctgcagggcggcgacccccaaaacccagctccgggtcccaacctaggcaagaagctgcttctctgccaacagctcctcttcggcctccgtcacagccacctggaccctaccctttcgcgactgctgctgctgctgcccggacgtggaagcagcaagaggcgcttggtcaagacacactgacggtaatggcaagcgcctacgctaagggcacaactgggggtgaggtggggctcgccattagccacccaggagcctgggcaccagcaccgggaacgaattgatggatggatgccgggaaggactcgctgcgtcctggggtgggaggagggagggcagctcaaaagccctgggagggagaagctgggctgggcgggcaaccgtctaactctgcatctctgtacaatcagggtggggggcgacaggctgcacatgtaaggggaagcacatgggttgaaacgtgccgccatcctttcttcccgtcgtggaaattgcccacagcatccccagagacctactcgtttccaagccaagtcggggttggttgaagggtggggtccaacacgggaaagtccaagaggaaagttgggagggttggggcagagagagacgcgaggtgaattggaagctaaacctcgtgcaggtgggcgatggggcggggagagcagagagctttattcctcattc

SEQ ID NO: 12500 - DNA, 1035 bp, Homo sapiens
aatgatatgaaaacaaaaacaattatgactaagaaaacaaaattatgggtggctgttaacagctcagctgtggggtccccactgcctgtgccatgtgctgcttttactctcagagtgctacttcctgttgggcagtgaaagtaccgaaattacaccttttatgttcaagcaatggtttgtgtagcaggtattctgcagaatttatagactgcacaacaaatgtcctctgtgtctatgggaagctagtcacttttgactgtacagtgaaaccttctgttgcctgtgttgattaggagttaaaatcccaaagtaactttctcatcaacatgacttgattttgatggaagcctccagaaacagaatatgaatgtttcaattctaccagctgcatgaggtcctgtcctcaacggcattatgctgccaaatacatgataaacacattcatgacttgggtaactacttttttcaaaatgctgcactgaaattgggctggaggctataagtggtctattgctctggctctaagcatcacccttggtggctttggagcagaccatttccacctcaaccagtggcaagaaggccttggcaagctcttcagcttcagtggcctggaaatatagacactaatagacatcttgctaattggagttggctacattggaccagcagatggctcttgatacatttagcttgtgattatgtgctttgaagaggagtaatgtttagtaaaagcccttttgcctgtaggagttgatgtggtgtgagtgatgtatttgtatatttttaatgtgcagcacttgtactttgattgtcttgatgaagtaaaaaagagaaatgaaacattgaaaaaattagaagaagaaacagaatattctaaatattggaagaaacacacctacacaatatttatagtatatacagtaataatctcactttaatacagcagtttcttgatgctttacagaaacctcaaagtatatttcattcatgacattggccaaccatcataactcatatgaaagaaagttaaaa

SEQ ID NO: 12501 - DNA, 1030 bp, Homo sapiens
aatgatttaaactcagtgagtgacctcagcatgtcagttattaattgatatgaacacatttgccttttggggatgtgactttgggattggtgctagcttgaacttgggttcattgtttataatacctgcatttgtgctttaaaaaaggatctagaaatttcacatatggtgacatgtcaaatatgtcacagtaggtatggtattggtaccctatggttggaaggcactagtgtgaggctgattagtctatccaacaggtacctcttctttgagacctttctgtatccttctctctcctataagcctgagtcctttggccatagctaaatgatttcattcttttcaaatcatctaggttgagccaatcaggctttgtcttactaattttatatgttgaaaatagatatcaagactgagtgattatctgctaagtctccttaatgccatttttttttctggggtggggaggggaaattgtatattgtatttaaaataccacctgttaaattttcctgagcgactctcttctctttgcctaagaaatgtgtttgctgatttggttctgcattttgtaaaatactcgtgttcttacaataaaagttgtttgatggagaaagataaaataaaatagagaaatattagagagaatctttaagataatttaattatgtaaattaagttggcatatggattcaaatttttcaatctgcagttaattgctgatttcaagtcaaagtaaagatgtcacatatatgtttaagtgatatttggtcatcagtgactatccacaattagaatggggcagaattagatcatgtttgaaactatgctcttttttgtttgttatcattgtttgtttttaaagaacatatgcttatgtgtatatctacagagaacctgaaagactgtgctcccaagacttgctaaatgctgattactcacaaaagtctcattcagaataatgagagaattttaaaatacaagtactaaactgttctcaataaactttgggaattgcctacaatgtatc

SEQ ID NO: 12502 - DNA, 1050 bp, Homo sapiens
tataatttaatcattgcagaaactaaaagagaaagaatctgctttaaggttagcagaacaaaatatactgtcaagagacaaagtaatcaatgaactgaggcttcgattgcctgccactgcagaaagagaaaagctcatagctgagctaggcagaaaagagatggaaccaaaatctcaccacacattgaaaattgctcatcaaaccattgcaaacatgcaagcaaggttaaatcaaaaagaagaagtattaaagaagtatcaacgtcttctagaaaaagccagagaggtattttattatattatgagttatgctgttatccattagtttttttaagcaaatgctaaatattattttaccctaaagtggtatttcttttcttgctttcaaatgattctatttaagaattgttacttgcatgtgattggattacacctctgtcagtaaaactggaagtttgtgtacatgtatctttctattatacactgactaaaccacgagtagctatcatggtgaaatcatatgattttgaaaaatattttaattgagtttataggtgaggattgaggcaatagggtggaatgaaatatatcacaccggtaatcagtagaaatcagatttgttagaacttcgtgggggaaagctaacatttaattttttctagaagtaagttaaaagatgatagatacatgtcattctaatgttaagaataaattatgaactgaggctgggcttgtcaacttgaacattgtctgaggggacatgcataccagtctagatacatacatatatggagatactgtttcttcctcatctcaaaggaattttagaagattgaagagaaaatatataaggtcttcaaaatgtgaatttgttttaatcacaatttaagatatagtttcgattttctgtaaaacaggagcaaagagaaattgtgaagaaacatgaggaagaccttcatattcttcatcacagattagaactacaggctgatagttcactaaataaattcaaacaaacggcttgggtaagattctaagaactttgttcca

SEQ ID NO: 12503 - DNA, 1044 bp, Homo sapiens
tatacaacagtaaatcctactatccagattcctaaatagagattaattaacttaatttttctccaaagtgcttgtaaccttctgacgtattacatacttactggtttattattgactgtctttccttcgccagaatgcaagttccgtggtgacacggacttggttttgtttactgccatgtttgtatttcctagaatgatgcttggcacataatatatgtcatcaaatatctttcgtatagctgaacggatggatggatggatggatggatggatggatagactgaaatccttacttcacatctgcctttgtgatcttacacaagttacttcacctctctgagtttgtatttttttccataaaaggaaaataattacagtttcttcaatgtgttgtgaggattagataagaaaatatatataaaatgcctgttatgtgcctgatgtcttcgtgtatgtgtctgacacaaattgtcctttttttagtttcatgaagaaagacaaatggcctgggatcaaagagaagttgacctggaacgccaactagacatttttgaccgtcagcaaaatgaaatactaaatgcggcacaaaaggtatgaatgattaatcttgtttgttactctgtagcatagtctagagtgttaactcacagaaatatttcctgtatcagatgtaattttaattgatgttatattgtatatttaaaatataagaggggtttaatctatgttttatcatacagctgtaaaaattaatagttactctcaatgctgcaactgcttttttaaaaaacatactatttcttaatagtttgaagaagctacaggatcaatccctgaccctagtttgccccttccaaatcaacttgagatcgctctaaggaaaattaaggagaacattcgaataattctagaaacacgggcaacttgcaaatcactagaagaggtaattagaagaatttgcattttgattagtgtattatttggtatgtttggggggctttctaaataatatttctttatgagggcaatgcatagaatgatg

SEQ ID NO: 12504 - DNA, 1070 bp, Homo sapiens
ctttaacatcagttatacacattgtactttttaaaatctaaaatgcagtacattgatatgaactcattgacttgtctaatttattaaatttttctttagaatgaaatcatagcacaggaattcttgatcaaagaagcagagtgtagaaatgcagatatagagcttgaacatcacagaagccaggcagaacaggtagtgtaaaggcagaacattaaaagagatgattgtggtactaaagacaaaaaccgttatatctttttgcctcttaccatggatgttgggagagggagaaagtgggattaagatcaccatctgctttactgtttagattttagtttatttttatgattgctgctatgtcttcatagctcgttttttttgttttgttttgttatacttaattgatcaaacttttcttaacttgaaaattatagacttgtgatattttgttgaaaaaaatcaattttattctctctgcttttttcagaatgaatttctttcaagagaactaattgaaaaagaaagagatttagaaaggagtaggacagtgatagccaaatttcagaataaatgtaagttacaattatcttttacttttctgttcttatttttcctatacttaaaatcatgggcctaaaagggcgttaacacattctctgttttctaatctgctttactcctaattacctctgtactgtatatacttcagtctgtcactatccagttgatttgccttgctgttttcattgtgagagaatgttactaatatgaattttttgtgagaatatataactcctttttcttgtgtgttcttcaatcaaaatgaagttagaacaccaaatttaaaatactttaatataaagcatagtttaagttaaggcagaagtatgccttatatacgtgtgtatatgcacgtgatataaataggtctgtcatttaactcaactattcacgttggatttatagttgaatttttttgtatgtttatttacatttggatttttccaatgatgtctttggtatatgtgaaatatttgtcatctgtatagcatagtgtaaattgtgaaaaa

SEQ ID NO: 12505 - DNA, 1026 bp, Homo sapiens
ttacagtttaaatatctggaaaattctttcacagaaagttacctcattcttcagtgatactggctaagtgaattataaccagttgcttgatggtatatgacatttttgcagcttatttgaatgtttttaagtttttaattatattgctttctattgtaggccttgaaccaaagacaatgattgatttaactgaatttagaaatagcaaacacttaaaacagcagcagtacagagctgaaaaccagattcttttgaaagaggcaagtgtggtagtcagttgattattttcttggctgaactatagagaaatactaataatttatactttgcagattgaaagtctagaggaagaacgacttgatctgaaaaaaaaaattcgtcaaatggctcaagaaagaggaaaaagaagtgcaacttcaggtatactcagttattctaaacctttaaaaagaattattgataagtgagttgtctggatatgaaattatttgtgtcttagctgtttttgctgttctattgtggatctgctacaaatttaataaatgacaataataacctgaaggagataagtgagtgtcagtgggttcagtcctgaatctgaaatagacaaaaacaaaacaaaacaaaataacaaaaaccaagcaaacaaaaaagaaaaaaaccttagaattatggaatttttgaaaagttttatagtatagtattttaatttctagacagcaccaatatgttgttattaataataataaaacttagtagtttttatgttaatatatgttactcaacattttccctttccttaaggactatgcattgaaaagcttttcttgtaagttattattattattattattattaatatttgagatggagtctgtcttgttctattgcccaggctggagtgcactggtgcgatcttgctcattgcaacctccgcctcccgggttctagtgattcttgtgcttcagcctcctgagtagttgagactacaggcgtgagccaccacgcctgacttatttttgtatt

SEQ ID NO: 12506 - DNA, 1023 bp, Homo sapiens
cccagcactttgggaggccgaggcaggcagatcacttgaggtcaggagttcaagaccagcctggccagtatggtgaaaccccatctctacaaaaacaaaacaaaacaaacaaaaattaactggtcatggtactgtatgcctgcagtcccagctacttgggaggctgaggcaggagaatgacttgaacccagaaggcagaggttgcagtgagctgagatcgcaccactggactctagccttagcaacaaaactagagtttgtctcaaaaaaaaaaaaaaaaaaaaaccggaacaagatcatgtcctttgcagggacatgggatggaggtggaagccattatcctcagcaaactcacacaggaacagaaaaccaaacactgcatgttctcacttataagtgggagctgaacaatgagaacacatggacacatggtggggaacaacacacactgggacccgtcaaggggtcggggtgggagaacatcaggaagaatagctaatggatgctgggcttaatatctaggttatgggttgatctgtgcagcaagccaccattgtacacatttacctaagtaacaaacctgcacatcttacacatgtaccccagaacttaaaagttgatgggaaaaagaaaaacaataaccacccacatacccttcatatagattcaccagttcttaatgttgtgccaactttgctttatctttttgtcagtatttttacacacacatgtatttctctgtctcttgtttgttcaatcacattttttgctgagtcatttaagagctaattgcagatatgatactttgcacttaaatatttcagcttgtctgtttgaaaaagaaagatgttctcctacaatgaacacaatataattgtcatgctcaggaattttaatattgattcaacaccattatctagtccataatgagatttcttctaatggcccaataatatccttcagtctccccacctccaatatccaaagttctgtcaaggatcacatactacatttggttcttta

SEQ ID NO: 12507 - DNA, 1035 bp, Homo sapiens
gacaactataattgtcacaatctggaagtgttcttatattttgcttgaaggttataaaatataaaacagttgcttttctgtttacttaggtggaagtaaatgagctaaaaagtgaaaagcaagaaaatgtgatacaccttttcagaattactcagtcactaatgaaggtttgtatgtagtaggttttaactataggtttggctattagtggaactataaaaatctgttcttatataaggtaatctttgtgaaaatacctggtaatatctacatcaccactaaaaaatgcaatatatttaaatgtgaattaagtattttagtgtataaaacattgctagtttctacttaaagtttctaaaagggtgtgtaggggaaatagaatgagtatgttgaaaagtaacataaggaaatatatcttgaggtccaaatgacaaatgcagacaatgactgctatagggatttgttaagaggggaaatgatttaagagatgtcagaagacttcacaaaggatcaatactgaggagtagtgttagataagtggaaggcaatgcagtggtaagatagtaagggaattctagagctgttggttaccataaataaatactgagaacaggaaatatgtttattctttatatttgaggaaacaaggtgcagcaagtttgtagcagactgtagagaaaacaaatcttgggtaagtactttgagataggttgttgagggccttaaaggtgtattttatgctatcagcaattgagaaggcagtaaaggttttcgaaacacaattgataggtacaaaaatacaccttaagaaggcaaaactgagtatattatgtaggacaaactgaaggaaattggagctttgtagacatcacattatagcggagtttaaacctgaaattatggattagaataatagcaattggaacagaaaaaaagtagtggaaagacattacaaagggagatgttgcattactggatataagacttgaggacttgaggtaaaaaggagaatcaaaaatgtttcatgctattaaa

SEQ ID NO: 12508 - DNA, 1050 bp, Homo sapiens
aaaaaaggaaagaaaattgtaaaaggttataagaggtttatggagatcttatcttatggtcaaattgattaaaattagatttatttacaagccctcattacaattagctttagcattattaatacacaatacagaggtaaattttttctcttatgaacaatgtttttgtgtaatattagtaagagataataaaatattttcgattaacttttgagtaaacttccaaaaaataaaagagcagagagagaaacagatttaattggccttatgctgtctttattaggttttttctcggggggaaactcagtctactctctatcaaagagtaatggtttttgtttttttgaaatctttgcgttatcattctggctaagtggattactattttatggtgacctgtaatgcgattttatgacattaagtgtttgaaacacttagataaaacttgaaacacttagataaaagttttgacatttgccaaactttccaatatcaaaattcaaaattctgaattccgtcttcttttaaatctcagactaactttttggacgctggggtcccttgggtccaaaactgcttaattttctttgggttatatttatataaatatataaatttccatatgtttgttagtatgtattctgaaattctatgagactcctaaaattctgatatatcatagtatatgtcatcaatagtaattatgagtgttatattaaactgttgtatgccacagaaataattaaattttcttgtcaattatatctttaaccatggctgtcctaagacttctgtcttccaaattattgttttactctgattcctcttaaaaagcagtttataatcagctgaagtccaaaacttgcttctttaggggagttcataaaaatgactcttgaatgcaggtttctgacaacttctgaagattgcgccattggactagagagaaaacttccaggactctcattgaagaggtgatgtattcaggagaattgctgatccaatattaagtaaaataggagttaattacatggactgaactaatatgga

SEQ ID NO: 12509 - DNA, 1035 bp, Homo sapiens
ttagccgggcatggtgacaggcttctgtagtcccagctactcgggaggctgaggcaggagaatggcgtgaacccgggaggcagagcttgcagtgagccgagatagcgccactgcactccagcctgggtgacagagcgagactctgtctcaaaaaaaaaaaaaaaaaaaaaaattgttcaatgtcattaaaccatatgactctgttgttaaagaaaacatctcctaaggcaacacattcaaaaattaagaaaaacagggatgatttttagatgtcattttcaacaattctttcatagacatttaagatatattttatttcctaacacaaataatgtgtttcattatttgtttgataatcagtttaatctttggcaacctccatttctgtaatttatgacatctggttaaaaaaaatccccaagcagccagggagcttagtcacagatgtcagcatgaagtggtagtgaaagcaaagcgttctgacttcaaagggttaggaaagacttgtaacaatgtaataaaaagaatagatgccacagacatcataagtgtcagaaagagccagaaactcagaaatgaaaatgtggagataaatcaacatatgctgggtttcagttttccaagttccctccatcttcagcaaccatccagacactaagatgtgttctcattctttatatctgtgacccaaattaactttatctccaacaaccccctactcatcccttcctcccactctactcaaaacttcctttcaatcagtcagaaaagacttttacaacttgagagttttatgagttgggttgtactttgtattaatattgttctcttccaaatttatccaggagtttagtataaaaaatgttatcaggcattttttaggtcagcctccattggtgttggccccattcacaggctctttttacaaaatagaccccggtacatacaggatggcaaaggcaaatggtgattgctctctcctctgcatccctagcagttcctggaaaaggattctggttggtcaaggttaggttt

SEQ ID NO: 12510 - DNA, 1047 bp, Homo sapiens
aaagcattaggaatactcagacaacttcctctgaattcttttcacctctagctataaaattttgaacaacattttatcatattttcactagatgtatgtaaaaactaattattattgactgttctttgcaaaatttctaaagcaatggactgtatatttggtaatactacttgcctctattatcttgatagccacaaatcttgtttctactctcttgtgttcaaattccctccaaagacagtctaaccaccaggtttgtgtatggatacagtgcaagcagacaagctcagaaacagccaccactgagaggtgttatgtgaaggagatattttattgcagtgacagaaaataaggtgtgagagtaacacaggtttgggtagaatgttggccccatgctttgtgcccttgcacaaaccttacaactacttagaacttcaatcattctatccatcaataggaaagcaatatataacttagagtggcctatgaggattaaatagaattatgattgtggagcccctggagcagtgtctgggatagtttcttcatatatagtggtggtggtgtctgtagcagcttcctttaagattctgcgagggtctatagggaatgtcaaggtgtaagtaagtcccactgctcaaaaggctcctggactagcagaggagataatcaccataaaaggaagatgcaggaagatgtttacgtctctaatactcagaaattgttccatggagttgttcataacagagccgaaactcaactgataacctgttgtctcatggacttcggtttttctagactgaatcaagagacagctgcagcttccagagataaccagggccacctcaatagctatggtacctcagggaccttccagatgtttccatatctctgcctgtgtttggtaacaagcagctccagtgtcacaggcagcagctcactgtggcaacaaggcactatggtggataccaattactttccaatacatcgtaattaatctgttgctagtaacagttaaagttaagtaaatgattaacttttctgctg

SEQ ID NO: 12511 - DNA, 1025 bp, Homo sapiens
ggtagaatgtcaggaggtatgaaagtcacagggtgaaatatttattgagtgtctattaagtgccagacattattataagagtggaggtacagcagtaaaagagatagagaagctccctgccctcatggagcttacattttaatgggaggacatagataataaacaaaaagtaagattgtttcagataatgtgttaccaaggagatcatagaaaatgactgatcactgcatctaagaaaatatttatgaagttcttttctgctatataagtgaagcatacattgcaaatttgttactcattctgtggtcatatatgatttcggctattgagatttttaaaaaggcagaaggcagatacaccataatctctcttttcttccttcctttctaggctggtaacagttcatgtttgcttcataaatgaagcagctttaaacaaattcatattctgtctggagtgacagaccacatctttatctgttcttgctacccatgactttatatggatgattcagaaattggaacagaatgttttactgtgaaactggcactgaattaatcatctataaagaagaacttgcatggagcaggactctattttaaggactgcgggacttgggtctcatttagaacttgcagctgatgttggaagagaaagcacgtgtctcagactgcatgtaccatttgcatggctccagaaatgtctaaatgctgaaaaaacacctagctttattcttcagatacaaactgcagcctgtagttatcctggtctctgcaagtagatttcagcttggatagtgagggtaacaatttttctcaaagggatctggaaaaaatgtttaaaactcagtagtgtcagccactgtacagtgtagaaagcagtgggaactgtgattggatttggcaacatgtcagctttatagttgccgattagtgatatgggtctgatttcgatctcttcctgatgtaaaccatgctcacccatatcccactatacaaatgcaaatggttgcctggttccattta

SEQ ID NO: 12512 - DNA, 1049 bp, Homo sapiens
aaggcctcccacacagctttgttggaagccccttccttagatgctatccttctgcctgagaaaggttttaggtagcaaattccagaatatctcactctttagtaagctgctttttgcttttgagtctggtctttcctttggtctgagtggtgaatttcaagacttaggtttggtctttgtatagaacaagaagaacatggtgtttggctaccttgattacagggcatctggctgacccaacgtagataatggagttctccatagcatcttcctagcttgttagagttttccattggattttaaggacaaaatcttaattaatttatttgttctctctgtgtacattgattatggcctcttaaggaggttacctagtaaatctattgtaattacataccagcaatcccaatagataatgggggccacagcagattggccttcaaggagaaccaaaacagccaaatgatttatttacaaacagtattattaaaattcctcaaatggtgcgaattgtttgtaaccctgaatccatttcatatagagagcacttttatagatagtagttaaatcccaaacgagtccacgtaatcttacataatccttaaaatagctctgttattgtaatgatagtactttaattataccaaatcccattttattactcagatttattttggtgagaaaattcacattgggctccaacttgagatggtaaaacatatctcccatggggctataggatgtggggtgggccaggaggaggaatcctaaggaggatattcatggttatgtgaatggaagaccctatttctgacaactccctacgtggggatcaccagcaccttattgttcatccctcactgtctcctcccccaacacacacacacacacacacacacacacgtgagcacacatccatacatcccatcattagagtctccttggaaacataccatttataggatgagggaatttcctgctctcagttcacatatggtagaggaatgggctgttcctgtcctcaccatagtagataaaatctatttctg

SEQ ID NO: 12513 - DNA, 1030 bp, Homo sapiens
caggtgtagtggtgcgtgcctgtaatcccagaggctgacacatgcgaggattccttaagcccaggaggtggaggttggagtgagccaggattgtgctactgcactccagcctgggtgacagagtgagactctgtaccaaaaaaagaaaaaaaaagcagcaatgattctaatattttatttagggtggtatgaagaaggttgatggtgaagattcacaagtggaaaatacccagaacaagtgcccagagggtgtagagtgtgaaaatatgtagtggagctaagagacaagggaggctcttctctccagggacctgagttctagtctagacttaacatgtgatggctgtgtgaccttagtcaaggcacttgaccccttctagcctcagtttcttcatctgttaaatagaggtaatatgtcagcgggatctgaggataaattgtaataatgcagcccaagcccatagtgagcacagtgcctagcacatagtaaatatttgatacgtgttagacactgttactattttatgattatgtgaacttagggaagaggaaccatactaagtgcctcagttcagagctgaaatgagtgtcaggtggcattactggaagtaggatggtagtaagcaccatgagatcagttactatcttagctcccatgtgactacttatgcccatgcctaaattcatttatcaataaattgttctcagattctagaagctattgacaagaccaagcagaatcatacagaaaatgttatggtaaacttgtgcgagatgacctagtctagcaaacatgcacatgatcttagctttctataaggaagataaagtttttagagacaaggtgaaggaaaaaataagtctacaaagcaagatagacccttgaagatgtaatggtgcaaaactactttttaatatatgttatcttaatacccaatggtctaagtcagttgttggctaaattattcatctgggaattttaatggtgacataagagaaggttgcggacagcaaagttggtacagtgtgt

SEQ ID NO: 12514 - DNA, 1081 bp, Homo sapiens
tcagaggactgaccttagcacatttgtcattctgctgtttgaaagatacattatcacagtataggagaatggctggtgctttctacttccaggtggtccaaagtgggaactaaacaaaatgaggggataataaagggattaggcaacattcatgaaaaattcagaggaaattattagcataatgtttttactatttggatgacattaattgtatgtagaaaagcactgaactacaaaatagggcttacataattcttccaatatctttgtaacaaattatatatatatatatatatatataataatgtatataatatatatataatgtacatatttatatttattcttagcccctgcccagaaaagtgtttttaaaactttacttcctgtttgtaatgtactgaagccacagtactctatgctttaataatactttaaaaataatgtacctttttttaaaatatgaaactagggtctttaagaaaaaaatgtatttaggcatttattaggcttgcttgatttatttcatatatagatacacatatgactgtagctaattttaatttaaaattataagtagcttctaataatactagcaaatccttatataatgctcacaatgtcaggacctgttctaagccgtttgcatttatttatttatatttttcaataatgagacttttaaatccaagactgatttgaccatttattgtttgcacttctgtacaaatgtcacacataatgattcaacttgaagagatgaaatttactgtactatgtgtcaagtgtttggcatttaaatgtgtagccattttaaatagcttctatcattatattataaaatcaaaccatcctgataatagatcatgccaaaatggcacttagtagaaaacagttccaagattaattaattcacagcacttttccgctgagaggtagttattatttttttaaaccccatttcacagataggaaaactaagacaaggtctttctcctgccaatcccaggtgtttattgcaaaagagactcagctggcattaaccacagcgcattagtgtggcttatttaatacctcaaag

SEQ ID NO: 12515 - DNA, 1024 bp, Homo sapiens
ctaagcccagaggtttagcaacttgcctaatgtaccagaagctggaagcagagtcaggatttgaactgagtcccatccaactccagtttgatgcaattcaacaaatacccaccaagcacctcctcatggacatggggacatggccataatcaccttcactggctattgttcaggatctcctttaaaagcatgattttagtggcagctttttggtctgttattgggaaaacgtcacaaagatcccattcattggtgtaaaacctttggcatcacttagcgacagacactgtctgtgatgctggataagatgcacagaggctccagttggaaaatccagaatcctcctgacttctgctgttctctgtctttctttctctttagcaactcatatgctcatgtttacctgtggccatttttgttgacctgttcatgaaggatgataacctgtgaaatgatgcaccagcaggagagagacgggcccagggtccgcaccctgtgctgtttgctttgtgaaattccagactgtttaatctgctctatctcatcctaataactccagattccacttttcttaatgactttcccctccttaagtgcttacagagttatctttgaagaaggagaaaaagaatagatgaatcatttgcaggaaacggggggagagacatgtggttggaatggcagatggctgagcatgtgggcacatagctgtctctgttgttccttccaccaccctgtgggaacgagtcctttggaagtgtacattcattccaaggtgggggctgtgcccactttcaggtactaacacgtaaatccacatccgctcggagtcatcttagacatccaaactccaggctcaaacccagactggactatttattatctccttgaagttttggcattagaccttctaaagataaagtgataaactactttcaattagtgacaacagaatttcttgtgctgtctcctttctcctgcaggatatgaagtatgtgaatattcttcatgtgccacagtgcaa

SEQ ID NO: 12516 - DNA, 1120 bp, Homo sapiens
tatgcagacgtatttaacccaagaatcagatgggttgtctgcttctgtattcatttgttttctgggaacacatccgtgttgaggagcacagtttgggaatctacactaagttattatcaggtatttacaccttcatgtgtgaaatagcaagacagaaaagatggtgggcgcaggacttgaaatgtgagagaaaaacaaggacaggaaacagaatttcctccttcccaggcccaacccagagctcctggaactgggagcagttgattcaaggttggtttgccatgctggctatgtaccacaataatccctggagcttctgggagctcacccagattcgaattcagcaagtctgtaggatcccagatgaatgatatacatatgcataggtaagatataaataaataggccagacatggtgggtcatttttataatcctagagctttgggaggctgaagcaggagaatcacttgaggccaggagtttatgaccagcctaggcagcacagtgagaccctatctcttaaaaaaatttgtttttaattagccaggtgtgggggaacgcacctgtagtcccagctacttgggaggttgagacaggaggattgcttgagctcaggagttcaaggctacagtgagctatgatcgcagcactgcactccagcctgggttacagagcaagattctgtctcaaaaaataattatttgtttatatcttataatatgtatgtgtatgtctatctatagatatactgtatttgcaatttgttttatggagatagcatattcattttaatagtaatggtaaataagtaacctaatgacaattgcttcatgatgcacttcaacagttcttattttaacttttttattttgaaaaaaatttcaaatttacagaaaagatgaagtaataacacaaggaattgccatacaccttttacccaggttccccagttgttaacattttgctgctttatcattagctatctgtcttacctattttctgaaacaattgaaaattggagacatgatactccagttccactaggaatgtcagtgtgaatttcctaaaagacaaggccaaaggccaggcacggtgacttacgcctgtaatcccagcact

SEQ ID NO: 12517 - DNA, 1030 bp, Homo sapiens
gcagtgctataggtacggtttgccatggattggattgtgacagaatgagtagtgatgacatttcagtggcatctggctggcatgtggaatttcgcaccccctccccttctccactaagtgtgtagcttatggcaccacttagaacgctgtgtggcctcttccctggttttggtgctttagaagatcaggcataagaggtctgatcttccactgctttttttctcaaacacatcagtttgggttttttctttttcttttcttttctccaactgcttgataatgccttgccctatggttgggcccagaagcacagcaagttctggggctcatttttgagccaacttcttggtagaagggtgggcatcccagttcttaaaaggatttcctatgcagagattgtcattgtcatcctcaccaccagaggaccaggcattgattattttatcctcctttttgcagactgtttcaatcttggagcagcgactgactttgacagaggataagctgaaagactgccttgaaaatcagcaaaagcttttcagtgctgtccaacagaaaagctgaataaaaaattcattttcatttgttgggcagaggcccaataaatgaacaaatgtacatacactcaggaaggtagtacaagatactccatacaacacaaccatgtgctatttatcatggcatttcttaaaagggtgagcaacagaacaaaaggcagaaaaggcatacctaaggactaatttaaacacatatcaatgtgaaggactaatttaaattactatcatttatgattgcagtaataaagtgataagcattcaagcaactctgtattttccccatattattttaaatgtccattttcatttataggccaaatcctgccaggaaagtaaccagatctctggatttcactgttaagtcatttcagattgaccatattcagacagtcatggggtgaaataattcacttacctccaaaatagcatcctatatgccaataatgagttattgatctgactagttgtatgtc

SEQ ID NO: 12518 - DNA, 1090 bp, Homo sapiens
catgggctaaggaatgtggacagcctctagaagctggaaaggcaaggaatggattctctcctagagccttcagaaggaatgcagcttactgacaccttgtttttagccccgttaatcctgttttggacttgcaatctccaaaactataagataataaatctatgttgttttaaaccactaagtttgtggtaatttgttacagcagcagtaggaaatgaacacagtcctgtatctctggcacctggaattttgcctggcacataggtgctaaataaaataattttgcttgaacaattggcatatattcattatcttagatcttatgtagagattattgaagtttccaatccctactctaaattttatcattgaaaataaatgatatagtctttctttgaaaaatatttgcttttatttttgtccaaggcaaaaggctttttttgttgttattctagtctatttcaggcagacgttttatacatacgtgtgtgtgtgcatgtgcgtgtgtgtgtgtgtgtgtgtgtagtgatttaaaaatctcagaacatcaggaataaaaagggctttaaaaggcattcaattgaatttcctgatttgatgtttgtatatctttcacaatatctctgacaaatgaccttcccaagtctattttagaaccttcaataatgggaaacactttggcttagatattttctgccttttatctgttttcttctctacttacagaattaaaccaagagtagaaatgttagttgtaaaccaaaactaacttattttaaccaactgattgaatgtatatctaaagttcaagtcactgattatctttacatgtgaaatgcctacttttgcactcacatttgttagaaaaatccatctgttattcagccagaagctatcaagtatgcctttaggggataaaaatctaccagtgatttgaagttagataatatatgcttacattgcttcctcactgtacctctgagaaggcatttaagattgtaatttttaatagaaaatggcattagtttaactttggggggtaatatttctcttcaaatactatcaaattgctaatatttaattttttgtg

SEQ ID NO: 12519 - DNA, 1033 bp, Homo sapiens
atgaaaatcttttatcccttttaaaactacatctgaaaatatcttatttttttctttggggtttgttgaacagtgtgaaagataactatagatctttgccttattcacttagcatgttgtgtaaaagattcttgttgaatttgttatggaacagataatgaggatggatcccttactctgaatgcccttcaaagtgtaatggcacagttcacaaaagaagtaatggctacttgttttcccttttgagtttgcaggaaattttatgcagaaagttggtgttatgttcatttggagtatcattaattaagatccatctggtgcagtgcacttttagatcagcatacagcattaggaagtagatcctcctttgaggaattaatggtttgtgttttcttaatcatataagaagtgaaacatagaaggaaatttttatacagattccatttgtcctagctgtatactacccattaatggcttcaaaattaataggtttctctagagattataataaagattaaagacaaagacagacagtagacttgtagcctcagctgtcttttccgaggtgactgaattaatcatttggatatttcagttgatagctacatggtatatttttcaagtcttctgataaaaatgcaatttccaatttgctctcaagaagaaaaagcaaagtcctctataaaatcttatccccaaagctgaaggttctttctttgagaaaaagatgtatgttttctcctgagggacaaacaagtcttaattcagcaaatttagtttggaggacaaaatttcacatgacattttttgattatatcctagtcatacttttaagtcaatcagacttgatcagatgagtatgttcctacaaggatacataatccactgttcagaagacagaaaattgtcattttttccttcaggatcaacagcctatgttttcaagaatgttaagaattgaaaatgaattctttgttgtggtcctgtgacagccccatctgggtgagtctgcagttcctttttctgtttccct

SEQ ID NO: 12520 - DNA, 1050 bp, Homo sapiens
tggctgcctgtaatcccagctacttgagaaactaaagcaggagaattgcttgaaccctagaggcataggttgcagtgagccaagatcgtgccactgcactccagcccaggcgacagtgcaagactccatctcaaaaaaaaaaaaagaagaagatttacctcttgccatgtgctacaaatatgttttccttttttctcatttctccttgaatttagtttctgatttttgataggtttagctgcattaccttttttaaaactattttttgttgttgtttggattctatgcaaagaaattccctcatcaatccccaaacatcttagctactcttcttgaggttttatttttaatgataaaaccttaaaatccatatgtattaatttaggtatgaggtacagatttatagttaacaaagtaccctcaatttgtattgtttcactgatttgaataaccttctttaaacattaaattcatatgaacttgtgtctctttggagactttctcttctgtcttattgctctgttcttgatctatttgttcttgatccattatctgtttgttcttgatccattatcatacctttttaatcattgtagatttagaatatttctttaaaatattatataatgtacagttttttccttcaaaactttcctggatgttcttgcctattacttatccatatgaattttaaaattattctgtttcaaaaaaccatcccattggaatgtcgattgccattgcactagatttataaaataatttgagaattgccaacttgccaatttgagttgcttgtctaggaatgtagtattatatttagggaattgtttccccttttttctttcatttatttattgtttaattgacataaaattgtatgtatttcttatgtataacatgatgttttaaagtatatatacatgtggaatggttaaatgtaactaatttacaaatgtgttacctcagtgtttcagtaaatcaatttaggagcattctcatttacatgcctgtggttcccataaaaatagccaccatttttcacatact

SEQ ID NO: 12521 - DNA, 1116 bp, Homo sapiens
ctattaaaatttgggataccacaaataagcaatgtgttaataacttctcagattccgttgggtaagtacactttctttgtgcatttatgtgggttagttttctaaggagacgtttgattataacaatttaaataaataaatgagtaaagaaattgaaatatggccgggtgcagtggctcacgcctgtaatgccagcacttcgggaggctgaggcaggcggatcacctgaggtcaggagtttgagaccagcctgaccaacatagtgaaaccctgtctccactaaaaatacaaaaattacctgggcatggtgatatgtgcctgtaattccagctactcgggaggctgaggtggaagaatcacttgaacccaggaggcggaggttgcggtgagctgacattgcgccactgcactccagcctgggtgacaagagtgagattccgtctcaaaaaaaaaaaaaaaagaaattgaaatattaggtcatcttattctttcctcctagatttgcaaattttgtggactttaaccctagtggtacatgcatagcttcagcaggttctgatcaaactgtgaaagtctgggatgtaagagtgaacaaattactacagcattaccaaggtaacaattttcctaacaaaaaattcagttaccgaatggactccttttggaaggactgattctccttgttggtgtggtttggctgtcttacttggggtcatgggctgccttggaacaggctagagaatagtataattagctcccatcaacagcagggtctcagaagctcaaggacagcaggaagtgaagagaccttaaaaatgatgtgagggctggtttaaagaaaaaaaaagaagttgctatgagattttcaaattctggttatcagcattgtgtgagaagtcaggatagaaatgactgaattctgaatcacagggagttacgtgagcacaaataggtgttataactggtagaaaacaactacctactatgcctatgtattgatattgaactaaaagagaagtgaattttcttggtttatattggatttatattaaatcgaaatgattattaaacatagtagcttttccagtgtttactatgtagcagacactgtgccaa

SEQ ID NO: 12522 - DNA, 1054 bp, Homo sapiens
caaattccaagttgacacagtacaacactgacatcaataaccaaatacattttattatcatggtattagggtttggtaggacagttctttcctaagaaagaaggttaaggaagtaaagagggaaattcaatgttggttttcatagttttttttttttttttttttttttttgagacagggccttgctctgtctggagcaggctggagtgcagtggcgcaatcgtggctcagtacagcctctatctcccacctcagcctcccccacccccacagagtagctgggaatacaggtgcaggtcaccatgcccagctaatttttttgttattttttgtagagacggggtttcgagacgttgcccagctggtctcagacttctgggctgaagtgatctgctgccttgggggtcgtaatatgttatataatatgtattaactccctcctattttcttctgactccatgcctttctggctttgatcccactttcttgaggaagaaaacacatggacaaattctgatgttaggaatattttaagtatatatcttcaatattatttatccaggaccaaagtaagtcctgatgcaggaaatgagtgagtttcacagctttctgagcccctactcgacccaggaagccccgctggaacctcctctctcttgggcccagggccagctttgtgggcatacctcctgtacagttgcacagggccccatgcttagtttaatgctatgaaattcttaattattttcctataagagcttcacatttacgttttgcactaggccctgcaaattatgtagcaggtcctgatcaggcctgattttactaaacctcatttgacacacttgtcaccctcttggaatgctccttctcttcctggacaccacaatgtccttgttcctctcctacttcgtttgtggctccttcctttgctcttccttatctgaacgttaagtgtcctcaacctcttctttatctgtactgatttcctcagtgatcccatctagtttacagtctttagtactttctctaagttactactaacagagaaaac

SEQ ID NO: 12523 - DNA, 1515 bp, Homo sapiens
ttatttttgtttttaattaagggagtagtggggtagatgtgagttcattgtggcattcagcttatatttgcttggctttttcatggtcggtgacaccctaattcctagcatgataaatagtaaccctttgtgcttgattttgtttaacttatttgagttgttttcaaaatacattctttttaatttaaaaaatcagctaagcttgtgtatggttaagtttttgttttgttttgtgtttgatttgttcttttagggaaaaaatcctataaaatggctattaaatttttagccaatgacaatgagattttcttaatattactttgaattctttacctcttaattcttagagtatgtggttttgttgttctgtagtgtcttactaaaatattcatttttttacagtgtattgcaagttccactgcattacatgcaaatatgattcactcatacctagctgtttgtggattcaaactcataaatgaaccatttttaagttgttaatagtgtactgacatatttctgtattttctgatatttacagattcgagtggtgaatgcatttcgtagttctttatatgaagggttagaaaaaccggaatcaagaagttcgattcacaactttatgacacatcctgagtttaggatagaagattcagagcctcatatcccccttattgatgacactgatgccgaagatgatgctcctacaaaacgtaactccagtcctccaccctctcccaacaaaaataacaatgctgttgacagtggaattcaccttacaatagaaatgaacaagtctgctacctcttcatccccaggaagcccactacatagtttggaaacatcactctgattgtaagctgaatgttaacacactagctgcattgtaaagaaacaaattgaaactgggtcttttcacatattgtgatggacaagctagtattcttgtctttggacttcaacagaagacacacttgtacgaatgtagatttatttttttaaaaaaaaaaaagcaaagctttctgccagactgagggtgctttttggggggtgggagaaatgaactgacagataaacagtaactcagcgtaagtgacctgtggatcatcagtagtacccaagcatggtcctgaacagtgtattagcagagctttagtttatctcagtcctggatgggagagagagggaggagtaaaactgggcaagacaaagagccctggatcgttgaattgatagtttaatttctgctgttggctgttaataatttggattatttatgtttataaatgatacagatctgtttacaaggtttgtagatactttttttgttcctgttcatagatgggaagcttccttataactgatgcagagaaaaattagtccttcaaatactgctgtattttcaggaaaaaaaaaaaaaggggtgtttctattgaaactgtactaaatttttgcctacaatttaccttgttaaatattgtagataaattgctaatactaatagccaaatagata

SEQ ID NO: 12524 - DNA, 1032 bp, Homo sapiens
ataagagagctgaaagaagaggtacaggtgactcttaggtttctgctagacaggtaaaggaaacatggtttcacttttagacacctgaatcgatacccactttacaggtggaactatgactctcctcttacagtgaggtaggggcaggatgtggattctaaagtcattagaatatgatggaattagatggaaattgaaggtatgggaataggtaaggtaacacttaaaagatatggattgtgagccacccttaaccctaaacaaaagaataccaacattttactcatgtaatctgggtagtaaaaccagaagggtagaaagccaaccagaaaagaattgcctaatggttgcctggggaaatggtgctttaaaaagccttctgtaaataaatactgcaaacaaattagtagatgacaactgaaaacgaagcctgagctaagtctggcagtggaattggaaagagattattgaaaatagtgcaagaaatgttgagtattggaaatgaaatcaatcattattaagtcattgtatcattgtcatcatttgggggactataaattaatgcagtcgtgtgcagtgaaatatttttccttctaaaaataccaaattaactttgtaatttttttttttaatgtaaaccaggtgccagatgcaattaaaaagtgtcagagggctggaattactgtgcggatggtcactggtgataatattaatactgctcgggccattgctaccaaatgtggtattttacatcctggggaagattttctgtgcctagaaggtaaagattttaacagaagaatacgaaatgaaaaaggagaggtaaagatttattattattttgtttttggttgacagatgtttaatatattaggaatttaactcaacaaacacatattgaatatgcactgtgttaggcaccatgcatgaaataaatgcagtctataccttaggaagcaaaatactagtgttctaagggataaaagagagaagtaataaattggtactaaagggagtaagcatttcttgcta

SEQ ID NO: 12525 - DNA, 1049 bp, Homo sapiens
ttgcaaaaaccgttggagacatatattcagtattatttgtgtacggatgtaggtacctgaattgattcactaggttatgttatgcagcaataaaatgattgaaaccccagaaagctctggtactgtgtttagcttattttaataggtcaaatatgctaaaaaaaaaaaaatttcagtattacattggtactttatacattgtatttatagaaagctgggagttttctaattttaaaacaatttataatcattttaatgtaatgaggtgattggttttatatgcagcttaactagttttttttttttggtcactgtagaaaatgatgaaagataataacttagtaaggcatctggatgcttgtgaaaccatgggaaatgctacagctatttgttcagataaaacaggaactttgacaatgaacagaatgacagtcgttcaagcttacataaatgaaaaacattataaaaaggttcctgaaccagaagctattccaccaaatattttgtcctatcttgtaacaggaatttctgtgaattgtgcttatacatcaaaaatattggtaaggtttttgaaataatttatgaaaattaatttttaaatctataatgatcagactatatgtaagtcttcagaccaccattactgtatgtaaactgaactgttaagtttttaaaaggcatatatttatttatataatggtttttaaatttgtgttatgagtgaggtctgctgatcaacataaacattgtttgcttacatttttctcctatattttgaatttcctgtgttcagaaactctccagccttataaccagagcatgtatttaattttaaattcttgttaagctcatttttgagaaagatcaaactgtcttactataggaggtcagctctcaacttacagaaaatttttaagccgatttcaacttaaaataacatgttttatatatggttgccatgtgttctgtttggtttctcagtagttcctacctaaaaggtggtccttagacctttttagaactaatgcagtaaagtaattctagacttg

SEQ ID NO: 12526 - DNA, 1027 bp, Homo sapiens
acacagaattaagaggaggatgaggactgataaaaagcctgagatcattaatagatgatggctaatagaagcattaatagaagatggctcttcatagagagccatcttagtagtgtgtggacagaagaatggattcagtttgtcagggtcaaggtgagagtgggccattaggaggaagcattgtgaatagatctttttaaaaagtgggataaaaggagggggagaaaaagaatagcctgatgggttatcaaaatccaggagagacatgttttttgttttttttgtttttgtttgtttgttttttgtggcagggaggtgggtggagaaaaatggtcttttatgtagtagaatgtatctgaatattggctagtctgaggaaaccaagagaaaggggatggaagtggtggtagcttgcagtggcaatcaaggaagcaaggtcttggagcagacttgaggaccctggaaagagctggagtaatttaagaaggtcttggaattgaaagaggaacatgacaggaagttagagatatgtccgtggatcatatatgactgagaaaaaattctgatggaactaagaactcagtttttaaacttttaccaacattgctcagccagatggtatgtctattcaggggtagctaattaaccagatgggtggtaggaggataaagagcaagtgagacataagagcaaaactggagtcgctgaccattgagaagtaagcatttttagggaggcaagtgttgatcagaaaggatcttgactacctttgaacttgaaggtcagaatgtttacacaagactcagtagaagtgaagagaaataaagtgagataagttgttcactggagagcaaattttgaaaatagaacaattccaagggatgataagtttaccttgtggccctccgcttgaatagcaggtagagaatacagatcaaagtcttagaatgaaggtcaagagtgtgtgaaaccagagagtttgaaggatcaccaacatgttgtgatggagtgggctacagttcaacac

SEQ ID NO: 12527 - DNA, 1047 bp, Homo sapiens
taaacaaaaattagggattcaaattcccatagactcaacatggaaaaaggggtggactttcctgttttgtgggctaagaatgctgggaagtggaaagaatgattatttgagtcggaaatatggctcttaagtttatctgtttgcaaatctgtctccctagatagactcagttctttgttgggacctagcatagtatgtgacatgtattataagtcttaacaaactgagtaataatcctgagtgatcactttctggttaattatgtttgacttttacaaattatctaggataaattatgtggtacattgacagaagatttttgtgtaaagtatttaataaaggtttgtctttataatgacaagttttagcttatggcaaatatcttataacccaattctggtgaataaataagtgtttttgacatggagaagagtttgagtatcatactaataacagtcacagacttcaaaccattgctttccttaaagaaaatggagttggcttatagactttaatatttgaggtcataaggataaagaatctgattttcttttttagttagaagaggactgattgtatcagaagcatgttgcatgtaacagttggtatcatttaatccatataatagccctctaaataggatgatgatttttttttccctgtagacagagaaatgaatcagtttacatgcccaaatgctgaatggcagaaaggcatgtgggcccagctgtctaactctagtccactgctctttctgctgtacacagttgagcctctcacatgttactagaagtttgaaataatgtcaaaaactagatcgtttttcctttttggaattaaaatgttcttggatgattcttaaagtgcttgcctaatttacccaaagattgatggaaaatgtacaagaggctagggatttggtttattcttattgattctaaatattgactgcaaaaaagccagatttaaatccagttctccttaggttgtgggaatattgtgccactcacttaaagtgacaagcagtgaagatttgatattatcctg

SEQ ID NO: 12528 - DNA, 1055 bp, Homo sapiens
cacaagggagaagagaaacccacaccaaaattttagaaggcgttgacttagtagacttaaaaagctgatctctaagtaatagaaaagcccagaaacaagtcagtttatagaattccctgagagctcaaagctgggaaaacatgggacccatggtgaagaggggacaggggggcaaaacgggagaactggttgaaattttaggaatttgatacccagatatctttccctctgtctgtactctgtgatctcttttccttcatccttgcagaaggctggaagcttgctttctggagaaggctatgcacactgggaatacagttgaaaaccagggtaccacactcaaaaccgagtgtttacctatttatgttaagatcaccagtcttcttccctcacccagctttcagaattctggccagaatagaagtgtcttatctaacctgaccagctcaaggtaaaagacctcaagaatcggacattggctgtgtctgtgtctccaaagaaaatgtcccagtcagctcaccctactgtgaaacccatattgaatccagaacttctatttagtttgtgtcctttttttctcataaacaaatttgttatagtcttactaagatataattggcatagaataaactttacacttaaagtgaaaaacttgagttctgaggcatgtatatatttccacagtcgccaccacagtcaggtaatcattcccctaaattttttgtgcctccttatcttccttcccttcccctaccccagctcctcctttcctcaggcagccccgatctgctttctgtcgctatagaataatttgacttttctggaattttatgtacatggaatcatacagtatgtgttcttttttggtctgacattcactcaccataattgagtttcatccatgttgtgtatattagtagttcttgttattgctgatgaggattcactgtatagatacaccacaatttgtccgttcgcctgttgatggacattttggttccagtaacatacagtctcttcctattatcgagttgtaatttctttatatgttcttg

SEQ ID NO: 12529 - DNA, 1053 bp, Homo sapiens
taattttctcactgggaatgactcatttgagggggaacaatggcctggcatatcaatgtgttggctggtgcttatggcctcttctctgaagaatataatgtttatccttgtacatgttatagaccgtttgtgtccttctgaaatttatatgttgaagccctaattcccagtgtaatgatatttggatatgcaagcctttaggtaattagatttaggagccttgagggtggagctctcatggtggaattagtgtccttataagtagaggaaaaaaacatcagagtgctcgctctctccttctctctcccctgtgccctgcctccagacctctgactatgtgaagatacggtgggaagatgactgaccgcaagacaggaagagagccctcaccgaggaaccaaattggccagtatcttgattttggatttctcaacctcaagaaccatgagaaatgaatgtctgctgttcaagccacccagtcaatggtattttgttatggcagccccagctgaccaagagagcgcatatgaatttaatgagcattgagaaaagctaatgtttttcattttttcccttagaagcatctatcgatcttcatttgaaattatgtgtcagaaactgcaataatagaagtaaagagaatgggctaggtaatgtaagaatagggctaaggttatgtaagtgagggagagtttcgagagaggaatttcagtagcctttaaaattttaaataaaatacgctctataaaccaaatgcattagttaaggagctgtgggcatcagtttctccttataaagattgcatataccttttagttaacatcttggacaagtcaggaatgattcctttcctccagggtgtcctgtggaatgtctaccttgtctccctcaacatagaggaactatcgaccattttccattaaatagcctagaattaggtgtgtttcagaatcacgtgtatatatgtacatggtggttggatgtgggtggattcggaaggacttgttaagatgcccatgcctgaattcctcccagatccactaaatcagaatt

SEQ ID NO: 12530 - DNA, 1052 bp, Homo sapiens
gagtgtaggtatgttttttatataatgatgttttccctttgggtagataccaaatagtgaaattgctggattgaatgaaagtactaattttacttatttgagaaattgctataatgtttttcatgaaggttgtactcatttacattcccaccaatagtatgtaagcattccctgaaagtgtaactttttaagagttttattctgccctttgaattatctcttttccctccgagttatattatttatttatttatttatttatttatgtctttgcttttcatcttggtggcgtactttaatacctggtaatctttggttgactcttcacaataagaatgatactgtaaatagctgatcaaatgctctgtgtatgaggctgagtcttattgactgctgagttttctagtaactaactcattaattgggggcccccaaggctgatatggcataggtatcattcattcagagaggtaccaggactctcagaacgcactggtcataaacaaatcattcaagaagactgtgtgtacagactgaattcaaactcaacagtagttctgtctcttagacaggatggtttcctcagagaggacttctctagtctcctgtcttgggtgaaataggaataataatcccaccgtcaaatttggagggttctgggaggccatttttttttttatgtgtccatggatctgttgcctaggctggaatgcagtggtatgaacatggctcactgcagcctcaaccttttgggctcaagcaatactgccacctcagcctcccaagtagctgagactacagatacacaccatcatacttggccgtttttttttttttaattttaatttttagtagagatggggtctcactatgttgcccagactcatctctaactcctgggctcaagacatcttcccgtctcagcctcccaaagtgttgagattacaggcctgagccaccatgcccggctagcgggagttctttccataggatttcatttaatctattagctgtgcttcctgttcctggagctcagagcttctcagatttaa

SEQ ID NO: 12531 - DNA, 1031 bp, Homo sapiens
tgctgtagattttggtctacaagaattcatgaattatatttttagatttcataatatgcctctttttcctgcttaatgatattgatcttgaattcttatctgattttgattttgacatttctgctttctgtttgcatatatttacgtggtgtaattttccatgtgcctttattttaaaacttcctttgtcatttggttttaggcatgtttcttgaatatagtaataagctggtgtatccattaggataatttgggttgcaaataatgcacaagggtttaaaaaatgaagtgagatatgtttgcttttataaagttctaggacagatctagtccaggcatggtttgtgtgttgtgacttgatttctctctattatttcagctttcatttcctggtgtgttgtgcagcttctctcgtggcagcaaaatggccacagaggtttgattccaggcctttcatgtgtttacaccttacagtccagcagaagaaagagctcctcttctgaaaaccttgaaagctcttgaatcttatgtctaatcccccaacaaatcactatgatggcatgccataccacactgagtctgggtctgtgctacttatccttgaaccaatcactttggtgaggggatcggtattatgataaatggttagtttatgtaaattaaggctgaagcctaaaattgaagcttgagattcattcccactcaagttaatgtgctattattcgaaggaacagagtaagtactataaatattggaaagaagttagcacatttctcactgctggaaaaccatacaattccatatcttcaaaagccaaatggatcaactcataaagtatatcagaaataatcagaaataagtaagattatttttacaagattaataatggaaaaaattcaatcatttttatataaaaataaccaattagaaaatataattaaaggaactatttcatttattagatataaaatatactgaaataaatttattaagaaacatgcactatttatatgaaaatacatgcagtttca

SEQ ID NO: 12532 - DNA, 1912 bp, Homo sapiens
gttgcacaatagcacattaattatattaaatattctctttgtgaagttatgcacagaactgtaacactttcctctgcctttttctcttatatgtgggttcatggttcagttgcattgttatgttatgaatttactacttgggtgttctaaatacagtttatcttaaaatatgtagtaatatgaattcaaaaatggtttttgttttaacaatattaattaaattttcttgggtggattttataaaaacctctgtaaaatcaatttgtttacttatagttatctggggttgtattgcaaagaatagggttaatttttctttttgtctttttctgtctctttcttaaactcccacgcattgtccatttagaatcttagaaagcttcttaccctcgctgtcagttggaggatgaataataaacattgtataatgttcttattctcggtttcttgtaagtgggaagtcttttgagatcagccttcatatcatacccttattttgtctctctagcatcttcaggaacctgagtttgctttttacatagatctgattttttcctttatttggtttaacattttcaagcatagatcagcttcatgtatttgttttataattttgcatcttaaagctagtaactaatattgctgtggtcttattggtgaaaacaaaatataaaatgataagaagacattaaatattttactttctatttcttaccctattgggaagaatttttaaaagttgtaaaattgacttaaagttaaaatggttctgaatttggtgttccatgtcaactgttcccagttttaattttaactttgcaaaaataatgttgtgaaattccctttaagtaactaacacctagaaatagagtatcaccaaaaacaaatgtatttaggaatcccagttacaataaaaactgaaacagcatggctaagcatcttaaggataattaagaaattagcttatttgtatgctgaacaatggaatcgaactttaatttagcatagtcttattaatttggaaaattgtaaaacatctcaagagagaagttattaatattggtttattaatctttctagagaagaagtgtagttatacattcattcagtgcaatcattttataacagtagttaatatttcatttataatagttcttaatatacatttgctttcaaatattctgaaatgaaattatattcatgctatacctacagtgtatgtaaactaaagagatcactacatatttgtttaattatttaaaaaaaaatttaagtaaaccctgttgtcattagctattaagaacattgattaagtccctggacttggataaacatatatccttgaacatatataatgaagaaatacagtggctctttattaaaaataatagttggataatataaactgaactatttatgcatttttatatacttataaatccttccaaatagttttaattctatccttttacatataaataacttaataagtgtgctggaaaaacacagatattcacagcaccactgttttttttttttttttgagataataaattccatgagaaatctgggtttgaatatttgtttactttgtctcctaattgaacaccactccaggccttctgtctgtctcccctttacccccaaaatactcacaaaaaaattttaagacaacaagtaaccatatataggtgtttgaatgattttctcatttttatctaatttcatttcataagtcccgagtaatttacctaccataggctactatactgataatataaatgaaaccgaacattttttgctactaactctccccaatttaatgtgttttcgaaataaaaatttaaatttttttccttttaattaaaaagtcatctttgaagtccttattggctgtacattttacatgttt

SEQ ID NO: 12533 - DNA, 1024 bp, Homo sapiens
agaaaactaattgtctattatttgctttgtaaaatactaatttcttaaaaaaaggttagattctttcttgagagcactcataatgtcctttatgtctgtaagcatactttcattttggtttataattaattatctctttatgttcctctgtcctctagaatgtgacttccttaaatcagggaatgtgtataattcatctttatgttatatccccagaacgtaactcagtgtgtgataactaaatgatgaccagtaaatgttaagtgaggaaagggaaaatagagagtacagtttgtttttttttctccacataatcaaaacgtatacatttttgtcacctggatttaaatgattgttgagcaagacatactataatcttgtatctttttaaccaattctttaaaatactgaactttaagaatttcataagtgggtaaaacctatatttgatctattgtgataaattgcataaattttagccaaattttgaaatatttactatgaaggatgatttatttttggccctactttttcaacaggagataacaaatcttaaagatgctaaacagcttctaattcagcagaaattagaacttcaaggaaaagcggactccctgaaggcagctgttgaacaggagaagagaaatcagcagatactaaaagaccaggtgaaaaaggaagaagaggagctgaagaaagaatttattgagaaagaagctaagttggtcagtgagttaatcgggggaagtgtgttttgcagtagagctttaaatcaatccagtgagaggactgttctacttataagatctgattgaaatgctttcctaacattttagtttttgattaaggaaggagatctgatttatttacatagctgacatgtggttggaaatattttaccctgtaaccataattctgtttttataagtgaacattgaaatgaaataaaattaaaaaattttttttgttttttaagtgtcagaagctaaacaaccccacaactacgtagatctggtaaatggtg

SEQ ID NO: 12534 - DNA, 1042 bp, Homo sapiens
catactatttattaatatttttagcatgtcaagggacatcatagaacctaccaaatgtatatgtatgcataatgaagcatttaattatatctcttttaagattgttttctttcacactgccttatgactttaaccatatatatgttctctgagtgtatctgatatggtccctacttatttggtattctttcatatcaactagccaatattgaagatgtgatcaacattcagcaaatactttaaatatttatttagtaaatagattatttttggaggctttggaattgcttccattttactaaatattttatattataaatgttttctataagcaagagagttaatattttagaattctttctcttttacctgtcttactgaagggtataatatgctatctttttatagtttattgctttctacaatgtttatattaactatgtttctgttgaatttactaaaaacatggcatataataatttgggaaaattgtttttgtaagtctgtagaagagaagctttctctagcacaggaggacttgatttcaaacagaaatcaaattggaaatcaaaataaattgattcaagaactgaagactgccaaggctacattggagcaggattcagcaaagaaagaacagcaattgcaggagcgatgtaaagcactacaagacattcagaaagaaaaggtattgcatgtttctgacctaaatctacaatcttagagttacagttgtcttagagatcatccagtcaaacctcttatttagtacaggcatcatccttattttcaacagctctctcagagggacctctagtttctgacacttttgatcattgggattttaatgctaggaagtacttcttaatggcctccttgttatttctacccttttttcttactgctctttagttttacaaacaagtcaatttttcacaccatagacccttggttattgcagaaaagataatatagttcctcaactatttctcatataacgtattatcctttagatgtgtgaatgagataataaaagatctag

SEQ ID NO: 12535 - DNA, 1022 bp, Homo sapiens
cagtcactaatgacttcaacagcaattttattgaaggtagtatattttgaaagtcaaatacctatttttcatactatgcatatgtatatgttttaactatgtcataatttgtgcatatctcctgaatcttcttgaagactaaagacaagtttagagtttagaggagctttaaaactttgtgagattttctttttctgccttgatattaattaagatgacctgtagaaatttcctaagttattcttgaatttccaagagtagaaactatatattaatacttcaacaaagtaatggcttcttactttctttcatgtacaagtttcccttagttccaccttaaattacgtcagctgaggcatctagcactgcatgctccctcagaatgtagttgttactctttctcccgagacctgatagtacttcccagtgaaatgcctttttaaaaaaaaaaaaaaattaattacttttgtattttatgttctttaaattgagacttgttagattttgtaattctttgactttataagtaatttaccctattgaggtagaaatttggggcataagtacagttcatcttattgtttggaattttcttctagttgtctggattttactttatatttgtaattggtttttggaatgcatactgttttaaataactattgtatgtttcagacagagcttgagaataaactacagcagcagttaacacaggcagcccaggaacttgcagcagagaaagagaaaatatcagtattacaaaacaactatgaaaaaagtcaggaaactttcaaacagcttcaatctgatttctatgggagggaatctgaacttctagccaccaggcaagatcttaaggtatagtaaactatactgtaccataaagtctcagtaagttttatagacatttattaaatgatctatttgaatccaaatgggcaaggaaatgttagtatttgtggaatagtgtgctgttttctattaaattgttattttgtattagcatgctttaaaaaattgtt

SEQ ID NO: 12536 - DNA, 1034 bp, Homo sapiens
gagtgtccctttaactatacaaatgaggcttttaagctgtttctcagtttaaagttccataatacaccttttgatctctacttccacggtacttccttgtgtgcatgatcaggacagcatcaaggtacattattatgcacatgtatgagggcacttcactgcttttactgttttaagggctttaatgcaaaagttgcaacaattgtagccttgtagtaattggtacttagtcattgcctataaaaagggcaaacagaggggctggctatatgaatagccacatttccccccccgccccccatcagaagcctttctaaaataaggcaaactagtggagcaattacttaatttcccccaaactttctttatatgctacatgattttggaatatacatatattacattagttgaagcatgctgtataaaaaagatcatgagtgattatcatatgttaaaatatttcatgagtttttggttcctcagatagatgaaatgccgtatgtaaataaagctgacttctgcaaaaatatatttgtagtctatgctatatattcatcagtatagatttactatgtgttgtttaaagggaagatttctttagttttcacctttaaatcaatgtaaatgtatataccttgatgtaactattatttctgtgaaaattaagtattttgatattgagaaaaaattatttgaatttttccttcagcttgtaattatccatacaatgtaaatcttagatttcttatgttcattgatcctctcttcaaccagctaaaagaatgcaccccccatttttactgttttctcaaaatatgttaattttaaatacatgtttttacatatatattttcttttttgcttttctttctttctttctttttttctgagacagagtcttgctctgtcgccaggctggagtgcagtggcgcgatctcagctcactgcagcctccacctcccaggttcaagtgattcttctgcctcagcctcctgagtagctgtgactacaggtgcatgccaccatgcccagct

SEQ ID NO: 12537 - DNA, 1046 bp, Homo sapiens
aaagtttgcatagtatattgttactcaaaataatttgttggtagaatggtagtttcagtttttaactcaagtggaagaatataaatatgtcacataacctaaaaaatccagtagattttattttttttttatgtcaacatttgcttggcaattcttaagttgtattagtagattttagttaagtggaccaatagtgaaatcacaagttagtatgtaatgatttaattcttgactagaacattgtcactgttttatattttaatattgactaaaatgtataataggagacagtactgctccaaagattgtttgagtaattggagtaattaaaaatattagaaaaggaaataaattgttaaattgatattttagaccttgacagaaaacttgctgaaaaaagaacaagactatactaagttagaggagaaacataatgaagaatctgtgagtaaaaagaatattcaggcaacccttcatcaaaaagacctagattgtcaacagcttcagtcaagattgtctgcatctgaaacctcactgcatagaatacatgtagaactaagtgaaaaaggagaagctactcaaaagctcaaagaagaattatctgaggtagagaccaagtaccagcatctaaaggcggagtttaagcagctacaacaacagagagaagaaaaggagcagcatgggttacaactccaaagtgaaattaatcaagtaagagctgttaattttatttattgtaattctccctctggtttcttcttcgtgtacttgatggttatttgatcataatatagttcatgttgaaaaaatattgtcattttaaaagattaactcttaacttttatatcctgtagtgttgtcagatctcatttcttttaatttcagtttcccttaaaaaaattataatatccatcttacagctttgtggggaaatgtttatgaattgatactataaattgcttaggatggtacctggggcgtgtaggtactcactagattttagctattataattaatttgaattgttgaccattctttcatttgaa

SEQ ID NO: 12538 - DNA, 1105 bp, Homo sapiens
gcgacagagcgagactccatctcaaaaaaaaaaaaaaaaaaaaaaaaaaaaaggagtgaaactatctcaagggtgtatatagaaaggtgggattagttggttactttctaagtaagtctgtggggaagaagactctaactcattatatgccttaatttttgtagcatattttaaaaggtatgttccatccaagttctcagtgtatgtgaacatggttgcatttatgaaattcagtaacttagaattctctttacaaaagatgatttatagctggccaggcgcggtggctcaggcctataatcccagcactttgggaggccgaggtgggcggatcatgaggtcaggagatcgagaccatcctggctaacatggtgaaaccccgtctctactaaaaatacaagaaaattagctgggcatggtggcgggagcctgtaatcccagctgctggggaggctgaggcaggagaatggcgtgaaccccgagaggcggagcttggagttagctgagatcgcgccactgcactccagtctgggcgacagagtgagactgtctcaaaaaagaaaaagaaaaaaaaaagatgatttatagattaatgaataatttgcttacaaattctaaaacaaatgttttcctaaacaaaacaaatgtagaattatgtcaagaaaaatttggaattacaaagaaatgtttataaaaagataatttttctaacatagttgaatcagaagtattatttttgttctgtgattttcttggctctatgtctttttttctgtttttgttgcttagtcaaagcacacatcttgtagctaattttgctgtaaacttaatggttgctcttcttacttttaagtctgtctgtcatcctctcttataagtactctttttttttttttttttttttttagtgacagggtcttgcccttgttgcccaggctggagtgcagtggcgtgatcttagttcactgcagccttaaactcttgggcccaagcatgcctcctgctttagcctctcgggtagctaggtctataggtgcataccgccatgcctggctaatttgtttttcttttggtagagatagagtcttgctatattgcccaggct

SEQ ID NO: 12539 - DNA, 1075 bp, Homo sapiens
ataaatcttatgcattagtacaagaatttctctatgttagatactcgaagtgaaattcctgtcctgtagggcagacacgtgctcagatttactagatgacctccagctattttccaaagtaattataccagtttaccattgcccctttccccatcaactcttggtgttgattgatgtttaaaatataatctttcatagctgtgcttttccctagtaaacctctagatccttgcgccccttttatatcctgtcaaactacacgtagaaaacttctacataatttagttttgcctttgtccctctgtttgatttttaatttctttgaacccagagcttaccttctatctcttggaagctgaccaggatatgtagagtagcagtttgcaagcagtgagtgttgatgatcagtgttattatgtgtttctcaaacattaagctattaataaaggacatgatttgatattgatagctgaaatgtacagtcaaatactctagcacacattttgtgtgtgttgtgtgtatgtatattcacacgtgcacattattgaaagaagtcctgtggctattttatgattaatacatagaatcaagattattttattgtgttagaattggaacatttcttattagggaataataagaccttctactaatcttaataatgccttacataaatttaacactttgcagttttgttttgtttttcccaaagggtttctctgtttgggatttggtcaccagtcagtgcaagcccacagttgcatctgccttttcttattatcctcactatctacttctctcacccctccttaccccatgtctttggtaaaccataattattgacagtggtgattttcaagtgctttgaatttggaatctctttacttggtcatttgaaggctattacatgaaatgtcctgggcagcttttgtgggtcacaggtagtatcaacgtggataggtaacattgtaatatataatggatggaaaagataattgcttttgtgttaatgtcaaggttttcaggtttaaaccagtgttttataattactagccttgaaaacttaaaaacataa

SEQ ID NO: 12540 - DNA, 1080 bp, Homo sapiens
tctacatcctcaccaacacttactttctttttcttttttgagagtagccatcttaatgggtatagggtggtggtatctcattgtggctttgatttgcatgcccctaatgactacgttgttgaacattttttaatgtgcttgctggccatatgcaacaaaactgggtttcattgttgttattgagttgtaggagttctttatatattctggatattaaccccttatcagatatgtgatttgcaaatattttatcccattctgtaggaatgttaaattttgatgtagtctaatttatctactttcatttttgttaaggtctatttggtgtcatatccaaaaaatcattgctaaacctagtgtcatgaagcttttcttttgttttcttataagagttttctaatttttaggtcttatgtttaggtttttgatccattttgatttaattttgtatatagtataaggtaagggtctaattttattcttttatacatggatatccatttttcccagcaacatttgtagaaaagactgtcctttccccgttgaataatcttggcacccttgtcagaaattatttgaccattgtcttagtctgtttgggctcctataataagatactataaactgggtagcttataaacaatagaaatttattttttactattttggaggctgagaagttcaaaatcaaggcactagcagatttggtgtctggtgaaacattgctttctggttcatagatggtgccttctcactgtgtcccacatggtgaaaagaacaagagacctcactggggcctcttttgtaattccattcatgagaactcaaccctgaggacctaattacctctgaaatgccccatctcctaataccatctccttgagggttagagtttcagtatatgaattttggggggacacagacattcagaccatagcaacaatatatgcaaaggtttatttctggctctctattctattccattggactctatgtccatctttatgctagtaccacactgttttgattactgtagctttgtaataagttttaaaatcaggaagataagccttcaacttt

SEQ ID NO: 12541 - DNA, 1042 bp, Homo sapiens
aattttatgttttaaggcaatcttagagctttgaagacatgctcatttttgttttgctaatcatgcatagcttcaaccattttaaaatgattatttacttatagttgtagcatattaaaacaataattttaattctaatgcaccagcaggatgtttgcttgaaatatctttccttattttgtaaagttttttagtaaaaattcagtattgaattcaataacatttcagaaaaccaaggaagtgcaaactttttataggatctaatatattgtttccttggaaataaatatctattatctctttggaggtataattactcattcctttagtgagtctttttgggtcttccaagtgtcagggactactttaggtgtggggattaaaatactgaataagacagaatgcttgctcccataaggcttaatcctttgtggaaatcaaacaacagactgtacaagtacactgaatcatgatagaaagctaggtaataataagggctgcgaggaagaaaaataaagtgcatatgggcggtagtggaagtgggaatactttagaacagttttagagttgtcggggaagatctcatggaggatatgtgtgagaagaatgaaataagcaagagtcagagttaagcagtgggagctaggattcccaggagaaggttaaagtccaaggcacatacaatcttggcctattagagaagaaggtcagtatgaatagagatctttgaacttcacccatagtgatatctgaagagggattgtatttactttttgtcttttgtaattattgtctgtctttaatctttattttttccccaaatataaacataatatgtgattattgtaaaagattaatgattcataatgtgcaatagaaaaggggaagcctttccagaattcactctcctcactcctcttcttcataactaaagttggcctctggatgtataagtcttcccaaatctttccttattgtccccttgagtaaattttaaagtttcaagtgctggaatttatctatataaaaattttagttttca

SEQ ID NO: 12542 - DNA, 1044 bp, Homo sapiens
ggtatggcatacctcagtgtgatcattagctttctggcacacttaggtatctggagcccaaacctgaaagtggagccaatagtcaaaaagccacagttgtgaagattaaatcgtgtaatagggatgtagcttctccgaggaacactttttcatttgctttctagttattagcagaagttgagacacaaaagagaaatgacaggctaaacattatatgggtacatgtactgttgcactaaaggcatatctactagtgttgtacaacagtgggtaggagatctaagaatgccaacagatggttttgaagaaaaggagaataacagcagctagactaacatcctgactgggagcattcattcattcagaagacaatgttgagtaccatatctctggagcctaatggcattactgtattctgatgtccagaggcacatcctcaatactaccgtttgctcatttcaggagtttcataggagattattgcatttatcacctgttgtgcccctgcccttcattctggctctgtgatcagaacacacctagaagccttctgtttcctaaatgtaacatgactattcatagtgtttcctgcacctttgtttatgctcctccatttgcttagaatgcttttctctctgccaggtaaactcctatttattctttcgtactgaattccagtgactgtgtctctctctctctctcacacacacatacactatgcagctgcaatgaggatggagatgagacacatatataatatgtatgtgtatatgtatttttgtaaagtattaactgctgccacaggtggagttggatacttctcctgtgttcctgtaattctttatatataattgtattatatagcattgtatggtaatatttgtctacatatcagtatccccaataaacagtgagccttgattctgccacataatgtgcacaaataataaatgaggatgtacattttttggcatcagcattcaaggagcagtttttttatttatttatttttagtttttacgtgctcagagtacttattgctta

SEQ ID NO: 12543 - DNA, 1073 bp, Homo sapiens
atgtatttttgggggaccttttcatttggtcatgagggatatcagtctgtaattttcttttttgaaatgtttgtatcaggttttggtatctgggttttcctggcctcataaattagggaggtataccttgaatgtttgctagaattcactagtaaaaccatctgggcttggagctttctttttgggaagtgtattgattattactcagattctctgtttctttttgagtcagttttggtgaattgtgtttttaaggaatctgttgtttcatctaatgtgttgaatttattggcataaatgtctatagcatctgtagtgatatcccatgattttggtaagagataaaatattttatccttttctttctttcctaattattcctattagtttatccatttattaatttttaaggtagccaacttttgactttgttaattttctctgtgttttgctttcctcttttattggtttctgcttttatatttaatttcctccatctacttactttggatttagtttgctcatcttttttctagattcttaaggtggaagcttaggactttaatatgcattttaaatttaatatttgtcctaaatttattgtttaagctaaattcttgccctccagtctttcctaccccaacattcaacttgctattcttttagctgtctcagaaagctgaaaattgtagaaaatctcagatattgaagctcaggatttcagagtaaacttgattcttccttttcctcatccaccatattcagtacatgataagtcctattcattttagcccccagatatatcttcagtccgttcccccaccttttttgttttttgtttttgttttttccaaaggtagctgtatggaaatttaatttttaattttcttgtagcgaggggtcttgctatgttgccccagctggtctcaagctcctggcttcaagcaatcctcccaccttggcctcctgaagtgttaggattacaagtgtgagccactgtgcctggtcttatcttcttctttctgtttctgctggtcacctagatgatcataagggtgtattatccttatcat

SEQ ID NO: 12544 - DNA, 1017 bp, Homo sapiens
actattctttaagtggaaggtcataaaggtcttcatttttgtctttatgttgagtaggatgaggaggaggaggaggaagaaatggagttggtcttgctgtctcagaggaggcagaggtggaagaaaatccacgtgtaagtggacccacactgttcaaacttgcggtgttcgagggtcagctgtaataacatatataatatatgtaatacataatgtaataagtgatattttatatcatttcattgttttcatcaggacagttcagactgtttagtacaccatattgctagaagtaaatgtctttgtttattgtttatcctattccaagctggcttccatcctcagtttttccactgaaactactcactaatggcctgtcttttactaattctcatctgtacttctttgtcctcatcttactttacttcttagacgcatttagtccagtcgactcttgctgtctaataacgcagtctttcttgtgcttctctgatacctctcttctggtgtttttcctacctcttcaactgacctccagatgttgtagtatctcagtactgcatcgcctttctttccctttcttccttttcctttccttccctccgttccttctttccctcccctcctcctctccatctcactctgttgcccaggctgattgtggtggtgtgatcactgctcgatctcccgggctcaagtgatcttcctaccactgcctcccgagtagagtaggtagctggggaccataggcacacatcaccatggccctgataatttttgttctttttttttcatagagatggggtcttgccatgttgcccaggccagtcttgaattcctgggctcaaacagtccacccgcctcggcttcccaaagtgctgggattacaggcatgatctactacactgagcccgttttctaaaaagccagtcagatttagcagtgggaggactacctcatccctgatcatgtgcctagagagagcaggcttttcttgttagcatagtctggtgtttc

SEQ ID NO: 12545 - DNA, 1043 bp, Homo sapiens
tgacaagccggactaattaaagagcctctgcacagtgaaagaaactatcgacagagttaagagatagcctgcagaatgggagaaaatatttgcaaactgtgcagccaagtttgcagatatcaaaggtctaatatccagaatctgtaagaaacttaaacaattgaacaagcaaaaagccccattaaaaaatggtcaaaagacacgaacagacacttctcagaagacatacaaatggccaagaaacgtgacaaaatggtccatatctctaatcatcagagaaatgcaaatcaaaaccgcaatgagataccatctcacaccagttagaatggctgttattaaaatattaaaaaacaaatgttggtgaggctgcagagaaaagagaatgcttatacattgctggtgggaatgtaaattagttcagccactgtggaaagcagtttcgagatttaaagaacttaaaacaggactaccattcaacccagtaatccattactgagtatatatctgaacaaaacaaactgttctaccaaaaagacatgcgcatttgtatgttcattacagcactattcacaatagcaaataaatggaatcggactatgtgcccatcaatggtggattggataaaaaaaagaaatggtacatatataccacagaataccacacaggcataaaaataacaaaatcatattctttgtaggaatactgatgcagctagaggctattatcccaagcaaattaacacaggaacagaaaaccagatactgcttgttctcacttataaatgggagctaaacattgggtactcatggacataaagatggcaacaacagaaactggagactactagaatgagaagggaagggggtgggcagtggttgaaaatccgactgttgggtactatacttagtacctgggtgacaagatcatttgtaccccaaagctcagcatcatgcaatatacccaggtaacaaacctgcacatacaccctctgaatctaaaataaaagtggaaaaaaaaaaaaagatgccaggtacggtgactca

SEQ ID NO: 12546 - DNA, 1034 bp, Homo sapiens
attggtcttttttgcaccacttgaatcactgtagttttagtttgtgtagaaaagagactattgccggctgggcgctgtggctcatgcctgtaatcacagcactttgggaggccaaggtggggggatcacttgaggtcaggagttcgagaacagcctggccaacatggtgaaaccccgtttccactaaaaatacaaaaaaaatttagctgcacatggtggcatgtgcctgtagtcccagctactcaaaaaaaaattagctggacatggtggcatgtgcctgtagtcccagctactcaggagtctgaggcaggagaattgcttgaacccaggaggtggagattgcaatgagccaagatcgtgccactatgctccagcctggatgacagagtgagaccagcctggatgacagagcaagactcttgtttcaaaaaaaaaaagaaaagagaaagcattgtcaaaggaatcagaagatctgcattttagttctgcatcttctgattttttttgctttaacttggatcttgagaactttctgattttttttcttcttccttgaacttgcatcttgaggactttctgatttttgctgacagtacaatggtggactgagcgttatggctcacacctgtaaccccagcactttgggaggcggaggtgggcagatcgtttgagctcaggagtttgagaccatcttgggcaacatggtgaaacttcgtctctaccaaaaatacaacaaattagctgggtgtggtggtgtgcacctgtggtcccagctacttgggtagctgagataggaggatcgcttgagcctgggaggtggaggttgcagtgagccaagattgtaccactgcactccagcctgggtgacagagcaagaccccaactcaaaaaacaaccaaaacaaaagagtacaatggtgaacaagtcacttcctgctttaaatctgttttcttctctacagagataacatccatcttacctgtcttaagagatgtcattttgattaaatatgatgttttgtgaaggtgacttga

SEQ ID NO: 12547 - DNA, 1032 bp, Homo sapiens
tttaactgaagttcttgataaatgaggatattattgactaagctggagaacatagtgaggaaagtaaactttttcctaggatggtaaagtgttgagatgaatgaagagtttggtttggttacaatgctttgagaaatccattgcttgatttcttagtaaacaactacaaatgtggatgtagaggtatagagtgctatattaggtctcttttatcgtccaggtgagagatgattgcaacatgaattaaggtagtggccaaggagatggagaaagggggatagattcaaaatttaagtgggcagttgaattaacttggtgattggatgtgaaggttaaggaatagagacaagtaagagtgatgccttggatttaggcaaaatgagtgtgtgatggttctataatctgagatggagaatgtagatgggtgaaagctttgagcaaagataaatgaatttggttttgaataagctgactttgtggtgctctcaaggcattcaattagatatatttggcaggacaggaaaatatgaattggaaactcagcaaaggtctggattaaagttagtgttttattattttcagcaatggtgttaatgaaaattaagggagtaaatgaatttacctaaagagtatgtgataagctaagaggtcaagtatgaaaactccctgggaacccctcaattactttacatgaattttttttcatgaaatagtatttgttatttgcaaagataacttctcgctttatctatatgttacgtttttagctcttaatagtagaaaagggttagtgagagccctttgtctatccatttagtataaggcttgcataatgtatttaaagcattgttcttaaggtctgcatatagtaaatggcttttcaaactttttgtgaaaatctttctaatttgtttttatggtgggatgcagatgaaatagagtaacaaaatcagtgttgaaagttacattttatttaattttttttttattttgagacagagtctagctctgtcacccaggctggagtgcagt

SEQ ID NO: 12548 - DNA, 1022 bp, Homo sapiens
atgataactgatccatgttcacaataatggcaatccattcatgagggtggaactcccatgacctagtcaccttttaaaggcctcacttctcaataccattacatttgcaattaaatttcaacatgagttttggtggggacattcaagcgataacagctatcttttctcattttattgcctttgttccattgtcaaagattagttgactaactcatggatttttatattatgaactcacggatttacatatgtttagcatgtttcagtcaattacagtcaatgtgttttgctgatgtgaaaatgatctcagctttagctactgggagtaccttcaaggtgacgtttgtcattttgacaggaccttatttgtgttcaaaaagcttccttgctttttggcacaataatatgtttcagatttatcttgtaaattccctctcccatgtctggaatcagccatttctctagaaaattctggttcctttgagtggggagtgatggttagagaccatagtataagcacgtagggtgcgctttgcttttgggttgtctttgcttttaagcttttgaatgataagaattattgttaagaaacagggctgggcgcggtggctcatgcctgtaatcccagcactttgggaggccgaggcaggcagatcacaagtcaggagttcaagaccatcctggctaacacggcgaaaccccatctttactaattagctgggtgtggtggtgcacgcctgtaatcctagctactcaggaggctgaggcaggagaattgctagaacttgggaggcggaggttgcagtgaactgagattgtaccactgcactccagcttgggtgagagagccagactctgtctcaggaaaaaaatgaaacaaaaacccaaatgataattcaaatttaagatataaaatggttttttacttatttgattctgtatttatatcattttttcttatactgaatatcttggttcttaacattagcaaatgttttttgctaaaatatacataaatagct

SEQ ID NO: 12549 - DNA, 1076 bp, Homo sapiens
ttctcctttggaccacagtggagggtggtgtggtgagccccggcctagcctgggcccaggcgtgggactgacactggcacagtcagccgagaaggaagatgttactcactgttggaaactttttttttaattaaaaatatgttttctgtgcaagccccactaccttattttagctatccaagaataaatccgcagtaagcttgatcaagtggtatatacacttagtttctgcctgtgctgtctctgaaatctggaaaaccttgaggatagaaagattagagcattagaaaactgtaggtgtatcatttaagaatcagttactagaataacataattcacatctcttttcctgtaagagttattgtacctgtcaacttaaatttgttttttttttttggtatagcttttttcttttctttttgaggctgatagggtgtaacaaaatgtaaatgattgaaaagtaggtgccgagcctattagttctttaccgagggagtaggataactagttcaaaggacaaaagaaattagtgaatttgtaggattcagccgaggaatgtgcggaagagagttgagtcatccagtagataggaagggagtgctcttgcttctgcctagctttctcctgaaagaatgaagtcatgtgaaacttggtcagttattagagggagaaatagttaacttctttatctgacaacctgtgttgacatttaattgtattttgcagtgttttgtgaattttgaaatcccggtaagcgatgattttggcagtaacaagggcatgtcctttactttccccatcacttccttagttcagcagtaaagacatctgtgcatgatttactttcaggctttaggagatttttcttttatcagacctggaggaactgattacctcatgtttcagattgtgtttctgtcatagttctgcaagtgaaaattagtttgcctgtggtttgctttgaagtttacaaataaaagtgtttactggtttaagggtagctcagctgtagttatagattggttttcagaaatatgggatgctttctagtaatcttggtttaaagttaaacatcg

SEQ ID NO: 12550 - DNA, 1027 bp, Homo sapiens
ctcacacctgtaattccagtactttgggaggccgaggcgggcagatcacgaggtcaatagatcaagaccatcctggccaacatggtgaaaccctgtctctgctaaaaacacaaaaattagctgggtgtggtggcaagcacttgtagtcccagatgcttgggaggctgaggcaggagaatcacttgaatccgggaggtggaggttgcagtgagccgagatcgtgccattgaactccagcctggcgacagagtgagactccatctaaaaaaaaaaaaatcagctgggtgtgatggtgagtctgtagtctcaagtatttgcaaagctgaggcaggagaattgcttgagcccaggcatttgaggttgcactgaactatgttcatgccactgtacttcagcctggccaatagagtgagaccttgcctaaaaaaaaaaaaaaaagcaaatcaactcgcttgtttaattgtttatggtctatgtccccctatctggatgtaaacatatgagggcagaattgtgttggctaactcttagtaggtgctctgtaggtacattttgaatggatgaatatgctgttaggtgcataggcacctgccttgctagagttcacagactttgtggagaagacaggtagtaagtaccttcgtgtaacaaatataataaatcaaacagcgcatgtggaaatattgtgacttcgctgggcatggtggctcacacctgtaatcccagcactttgggaggccgaggagggcagatcacttgaggtctggagttggagaccagcctgaccaacatggtgaaactctgtcgctactaaaaatacaacattagccaggcatggtggcacttgcctgtaatctcatctacttaggaggctggggcaggagaatcacttgaacctgggaggcggaggttgcagtgagccaagattgcaccattgcactccagcctgggcaacaagagtgaaacaccatctcaaaaaaaaagaaatatggtgacttataccaaagaagtgtaatttagactatgg

SEQ ID NO: 12551 - DNA, 1042 bp, Homo sapiens
tattgctcatggttatagctagtatcacatagtgatttacaaaccatgaaattccagatttaaatctgttgcactacaaaaatgtctaaatgatgtctgctaaatttgtgagttatagaagtacagaaataagtcattttcatttcaaatgcagtgaatttctaatttcatggtatcatatttttttcctttgcagttttggtaagactcccccattactttgctaagacttgctttctcaaccagtgggatgaaacgagtgccagtgtgttgactgagccttcttaggacttaaggggctctgggagaggccaaggcagcagttgaaaactgcagcttcacctggcctttgggcctgttttccctggcccacacagtgtggctggttaaaacattctgaatttgatgccaacatttttaaaaattgggagatttgcatgaaaatccagaattcgggtaacttttgaatgatctgaagatctggcaacagtagacctgacccacctttgtgcacgggacttaactgagaggatctgagtagcagacaccctaagagcatgtcattgtcttctcaccagttactctccagttggctagagtcccctccgagcacacctgctagtccttcccccttgtaagcctttgactttgtaatccctgggctaaaggaaacacattattcaacaaaagtgtttcatgtttgcccactagttgttggggatgattaggtggtgagtgaatggcatggggctttcctttggggaccatatactctaatggggaagggggacagacaaatagttgtaactctgtcatggaaaagagaagtaacttggacagacttttggattcaggccagatgaacatctccaggcagagggaacagcagcatctgcaaagtcctgggagagaagaaaagaatctgaacattaagtggcttcctgaaaatcgactgcccaggccgggcacagtggctcatgcctgtaatcccagcactttaggaggccaaggcaggaggatcacttgagtccaggagtttgtg

SEQ ID NO: 12552 - DNA, 1057 bp, Homo sapiens
cgcgggtgcagaatgaatgaaccgggagggtcaggccgggcggggccctgcgccccgggaagtggctctgggaggcccgcgcgtcctgccgcggtcagcacatgctcgcccctggttgccgcggctgcctgggtcccgggacgtgggggccccgcgccccgctgcccttgcttccgcgatctctctcttctgaatacgtttccgctcgtttatctctgcgaagtgattttactctggttggcaaactctttcagagctgttccgaggaaatagttttaacacaaggctgggggagggccgcagttatgggggattctctttctctctcctcttctctcctctcctctctttttcgtagatatgaggcctcgctatagtgcccaggcggcttccaaaactcctggcttcagagatcttcctaccttggcctctgtgggggatctcgtgaaatcttttgcccctcaattttgtgcgttttaattattaattggctgtttatgaatactgtgttttgacaagtatgtatggaaccatgacattttcgattctttgattttgtaaagtcttaaggaaatatcgacaagtcttcagacgtgagatattccttgtcatcacaacaactaaaccttaaatttttgtgtcggtttttatgaaggaaattagttgcacatttatgtgactaaatgcgccagttaaagtgactcaattgcagcatcattttgcttgatataacctggtgaacgtgtatgttaatcttgctcattcttgtgaaatctgtggggagatgcatactaagtggaagacctgttaggcttcgaggatgatgtactgtatactgcttcatccaattgcatttaaatatatctgagatgagggagatgtcactgacctaagggtgctgatgtagagaaataagacgtttttgtatggtagaaattcttagaaatgagagaagtagaacagattgtcagggagcactggagtctaataatgtgaatcttcatagtccgaaatttgttgtgtgtggatttatctaggattctgtccaaggagtttt

SEQ ID NO: 12553 - DNA, 1179 bp, Homo sapiens
agcctcgaccccacaggctctcccacctcagtctcccaggtagctgggaccacaggcatgccccatcatgcccagctaacttctttattatttgtagagttgaactcttgctatgttgtctaggctggtgtcaaactcctgggctcaagcaatcctcctggctcagcctcccaaagtgctgggattacaggcatgagccatcacacccagtcaattaagttctgaaagagtaattatctggattgtttttgttctacttgtctattttttacaagcccaaaagctcttctgtcccttgcctttggacatgtaatcacactcaaacaccaatagatacaagtccccaaaggttgtcatttcaacttccccaatccagaaaatttcactccagctccctaagattctagactcttacagaagtccaccggcagcctaggagttggggttgctgtccaggggagatcatgcttgccagtcacagcatgggcaacagagagatttatagtgaggggtaaaaagagaaatagaaggaaaccataagtgtccctttcatctcctgaccgttataccaaataggagtgacaagtagagtgtgatcacaaatagtttcatggatatgcttctttccacgactctgcagatctagtggagtagaattcatggagaaagtcctcaatgtcaaaggatgagcaggcagggaagggatgtggtagagaaaacttgatggaaaattagacagtgatactgtggaaagggccagaggagacaagggtgtgtgggctcaaccttggtggtgattctgttactgagatcttgtgtaatctcatagttattaagaatcatgtggacagacgcagtggctcacgcctgtaatcccagcactttgggaggctgaggcgggtggattacctgaagtcaggagttcgagaccagcctggccaacatggtgaaaccctgtctctactaaaaatacgaaaattaaccaggtgtggttgcacacgcctgtagtcccagctacttaggaagctgaggcaggagaatcacttgaactcgggaggcgaggtttcagtgagctgagatcgtgccactgcactccagcctgggtgacagagcaagactctgtctcaaaatactactactactactactaaaaaatcactttcctattcaatgtaccaa

SEQ ID NO: 12554 - DNA, 1033 bp, Homo sapiens
ctcggcctcccaacgtgctgggattacaggcgtgagccaccgcgcccggccgtcttttctatttttattacatatctctgctttccttctccaccacatcagtcattccaccaggggagcccatgtttacaaccttgtttgaattcttctatatttttgcccatgctcaaataatcatatagagacatatatacataaacatatacaggggcattttttgatcaatataagatcatgctaggaacacttttatgcatcttgctgtttttactcaacaaaacctcacagaaatccctccaggacaactggaattgctctgattatttctttttaatgctgatcccatagtgagtatgaggatgtactatcttttaattgttttgtggaaagaaataaagcttctgtgaacagaggttcttattatatggaggtttttctctgcctacaaagtgactagaatgttactaggcatatgataggcaggtagcaaatagcctttgaatagagctaataggtggaactgaacacaaccctagactgccgtctccataggtcagggtcaggtttatttaaacaaagacctgagattttcaggtaagccaaaggtggcaatagggtaggaaatattttgaaataatgtgatcaagagatagaatcagatggcttatcaacactattaaaataattagtccgaagttggtttcaaaggatagctttagtcaaattacgaacttcttatcttctttgagagtggtggtgagctggagagagtgaggcagtggctgtgtgggaagtctctgggaagattagggtaaaccacagtgggacttagggcgaggaagaaaacaccagtggtcgtttgggtggtaagcagttttgaaatgtaccagaccagatataaacagtgattaatttgtaatagtgagcccctagctaggtacggaagttgtataagcagcacttttaatttaatgaacaagctacttcctcccactacatttagctgaagtattatccttaaatttttataaat

SEQ ID NO: 12555 - DNA, 1027 bp, Homo sapiens
tttgttttgagcactggcagtatccctttacaatgcagaggtgcagtgtagcacaagtgctacatagctgtagttttcaaacaaaaccacttatatcattgtgcttaagtggagactgtagttacaatactgacattcgcttactggccttgtattctctgtaaacaaggaggctgtttgcaacaaccacttcaactctatttacagaagggttcccacggtatacacacaggcacaagggttggtatgctttctaaaagctgtgcatgtgccttggtctcttaaaaagacagtgcccaaagtggaacctatgtgcaaacaacaaattaacgacacagagtagctcaagcagccattttgctcccaagtcgtctgaagaactttgccagattaagccaggccccagagtgcttacatccacttgcatttcttcttttcatcaaataagacttttacatgcaagagttgtttctgagcttcttccagccctcgttctctttctagtttatttagaatctgttgacaattagaacagttattttagatattgtggttttagcgttacaattctgttttttgcatacctgatgctgtgagtggtaaaatctgtatgaaacagatgccaacattttcttccatcatttacatactcactttgcaagttgttttgctaagtccttatcacaggatcaacaataccttggcttaaaatagaagctcgcaagaaataccaactatttgcttacaaatatggggccaggcttcctaggccctgctttatgcattatgtcacagccattccaagcacagcaagcattcctgggcagccaacatgcaggcaagtatttctccttaaatgcagcaggcagggacatcctggtcagagacagatccttcccttccctcccatctgggcagtgtagtccctcctcgtgcttcccttctctcccctgacccctggaacgagggatgcttatcatgtttaagaactcattgcctctaccctaccttagagcttcacttcatc

SEQ ID NO: 12556 - DNA, 1043 bp, Homo sapiens
tctgggaatataggtggcttaacatgcaaaattgttcagtgtaattcaacaccctaacagaacaaagaaggaaaactattgtgatctctagtgtgaaacataatttgacaacattcagtacccattcatgataaaaacttttgccaaactgggaacagaagggaattttcaatcttataaatggtatctataaaaattctgcagctaacatcatacttactgattaaaaatattgactgcttccccttacttacccaaggtcaggaacagatgtctactatcaccattttgtttaatattttatcggaggttctagttagtgtaataaggcaagaaaaagaaatggagggggaggctggtcaagatggccaactagaagcagctggtgtgtgccactttcatggagagaaatagaaggagtaagtaaatacagcaccttcaactgaagcatccaggtacacgcattgggattcatcaagaaaacaacttgacccagaaagaatggagaagagcaatcaggacagtcatccacttgggagtgacacagagccagaggagcctcctcttcccagggaagtggtgagtgagtgagtgaccccagcgacccacgcttctcccttggatctttgcaacccacaggtcaggagatccccttgtgagcccactccaccagggtctgcagcctgttacacagaattatgtggagtctcagcaatgcagccgctcagatacacgtagagccctgggagctttagatacccaggtttcccatcaaaagcaactgcaactccagccaagcaggacgttagacccctgtacatacccctaggaaagaggctgtatacaggggatagagcagtgacagtctgcaggccccactaccatggcaccttgcaggataagacccactggcttggaactctagccagccactggtagcagtgttacacctctctgagatggagctcccagagggaggggtgggctgccatctttgctgttttgtagccttagctattgccttcattgcagccaccctatgg

SEQ ID NO: 12557 - DNA, 1063 bp, Homo sapiens
tgtccaaaaattcaattctgaaactatctacctggagttagagtcagatcccacaagttaaacggctcagtcccacaagactgccccaactgcagacaccagttgcaagtctgagtcacctatattctgactgactaacttaggggttcccatgaccccctcctccagtttgataatttgctagaatggctcacaaaattcaggaaaacactatatttaccagtttattgtaaaggataaaagtcaggaatagccaaatgggagaaatgcattgggcaaggtgttgggggtcggggattgtggtgcagagcctccatgccctctctgtgtgagccaccctcccagcaagtcaatgtggtcaccagcccggaagctctcaaaatctcattgttgaagagtttccagccccctccccttcttacgggtcaggggagtgaacctgaaagcattcaccatctaatcacttggtctttctggtgaccagcccccatccttaggctatctagggacctcaactctaagttacctcattaacatcaactcaggtatgattgaaggggacttgctaagaattatacaaaaaccactcctatcacttatacaattccataggtcttagcagctttgtaccaggatctgggtacaaagaccaaatatatttcttcttataccacagtcacattctgggtgcccatgaatttttgggagacattattcaacctaaaataagaactcataaagcctatgaattcttcctttatgatgcctctcaaattttcccccaccccatatttcttttcattcctattactaacatccttggtcagactgtcttccctacgaggtttatctgtattcatttatccaatttactcaacatatctgttaagcatctattatgtatcaggtacttactcattcactggaatacagaagtaaacaaagaccctgcaccatggagtttacattgtagtttgttaggagacatagaataaagaaagaaatactatcaggtggaggtgagtactaagaggaaaattgacaggagtaggctgggtgcggt

SEQ ID NO: 12558 - DNA, 1050 bp, Homo sapiens
cttgttttgtgggccaaattttaataaattaaacattttattttaatgggcgaattaagtacattcacatgcagtgagcccttgcctgcaaagatgtgcaggcgggaatgggagagatcacttgctgggatttggtattttttccttcattttacttagttactttgaggttttgggcattttctgtctgccagttatgctaagggtatggttttgtgtggctttatttgttctctttgctttttctgtattgtttttgcagaatatatggataacacagagctagacatctgctgttatcctcaacacttggaaatgctttatgtctgcttttcaaattctaatatcttagtgacgtctctaattatataaagtttgagtggcttttaaaaatcatgttcattaagtggtaggctatgttttgagacagagttcttgatctgcattacttaggaaagaattacttcaggcagaggtatacttattacttacttaggttttataactttatttaaattgttagtggctgtgattctaaaagcatgaatctgtaatagattttaagaaccaatcttgtctgtccttttgcttttagatgggtacattttttaggacatattcaagacaggtcgtttttaaatctctctttgacagtctccagaaagtaggggtagaccctccccaggcatcctactctaatgttttatcctatgataatcccacagtttggccagttagaatcttttctgttagaatttaagcctgtttctcctgctttgggtttctgttgccatagtgataaaatgttcagcattctgtcattacttgaacacaataatgaacttgacccttaggttttgttttgttttgttttttagttttttgctatataaaacagctttcattcctttagcttttcttaaatgtgaataattttctattctgttagtcacattgataatttttctttgattcctctggagtttcacttacaatgtgtaaatgacctcaacttattttaaaataaagacatagtaaccaacataaaat

SEQ ID NO: 12559 - DNA, 1052 bp, Homo sapiens
ttctgttgatcagtgccggctgcgggcattgcagttttcaatgcatctcatcgatttgctgagcatacttatcaaatgtaatggtttccctgggattcagaaagctgtagtagatcagaccggcagcagaccaccaaacagtgaccatgagcctttttggcacaagtttggcttcgggaagtgctctggagcttcttctccatccagccactgaggtggtcattgccggtagtcgtatgaaatccactttttgtcgcatgtcacaatctgcttgagaaatagtttgttgttgcatagaataagagaagactacacttcaaaatgacgatattttaaattttcactcagttcatgagacacccacttatctagctttttcacctttccgaattgcttcaaatgccaaatgaccataaaatggttgacattgagttctttggcagcttcttgtgtagttgtagaggatcagctccaatgattgctctcaactggtcattgtcaacttctgacggctggccactatgctcctccttttgaaaagtagacctcttttttttaaattttttttctgtttcaatgcttatttcccctttgttattttttgttctatacgtgtgctttctttctttcttggtcaagtcagccactgctttgtgtatatatatatattttttttgtggtaaaatatacataaaatttaccattttaactattttaaaacatacagttcagtacattcatttaaattaggattttggtttatttattagatcgactggtttcccattttctaactcattaatttctgcttttatcttctggttctttgcccttaaaaagtttctatagttttattgttatcatttaatgtacctaaaataaaattcatccattttgtatacagttgtacaatcctcaccataataaaaatatggaatagtttcatcaccccaaaagtttctttatgtctctttatagttgacctcctttcctgagtcccaacattaggcaacccgtgacttatccatgctctgagtgtatcagtagcccat

SEQ ID NO: 12560 - DNA, 1057 bp, Homo sapiens
tttgaggtgtcatgttttctttttcatgtttcttttttttttttttttgagacaaagtctcacactgtcacccaggttggagtgcagtggcacaatcttggctcactgcaacctctgcctcccaggtttaagcgattttcctgccacagcctcccaagtagctgggattgcaggcacccaccaccaagcccaggtaattttttgtatttttagtagagacggggtttcagtatgttggccaggctgttctcaaactcctgacctcgtgatctgcctgccttggcctcccaaagtgctggaattacaggcgtgaaccaccacgcccaacttttttcatgtttcttgtgtccctatgttatgggtgcatctggtagaatagttgtctctttctattttatggagtagcttttgtaaagaaggactttttcctgtatatttgtcctgcagtattgtttgggtagttgctttggctttgtttctatattagtacagtaatgtagtctccatatgatctttggctgtaattcgtgtcagcagtgtctgcaagtacctcagtggtctctgctgtgagtttttgtagaatgaatctcatgtctttggtgttgataggggcctctaggtggaacagttctcaggccttgggtgttgggtgctcattgggtatggtggctttgccagttgtggggtggaattgccagtggtggctgttgccatatgggcccatcattggtccctacaggtatgtggggtgcatttctgcttcaccagttatgggaatgggattgctggcagtggctggcagctagttcttaaaccctagggactgcatgcaccagtgcccttggtcttggaggtggcctccctgctgtgctagattgcttgttcctttaggtctactatatcagctcaggttctggagttttggctttactgctctgtgtagctgaggttgtggtgttggacccttttatttgattgtggcatgattacagtgggacccttcagatatggaaataccaggtctgttgaaccccatggcagcatgtatttcagcatt

SEQ ID NO: 12561 - DNA, 1049 bp, Homo sapiens
tttccctcatcttttctcatctatcctgccccatgtgagattaatctcattagtttctggtttagacttcctacattttttgtttgtttgtttttgttcctcacaaataccagatgtcattgtatttttccttctttcttatcagtgcaccctggaaactgcttcagattagttcatagggattagcctcattcttttttatggctgcatagcactccactatgtgtatctatcagtgtttagtgaaatagtctcctatgttcatttaatttccaatattttgtctttttttttttttttttttcaaacacagtcttgctctgttgcccaggctggagggcagtggggcgatcttggctcactgcagcctccgcctctgcctctgggattcaagtgattctcctgcctcctgagtagctgagattacaggtgtatgtcaccacaactggctaaattttgtatttttagtaggggtggggtttcaccatgttggccaggctgctgtcaaacttctggcttcgggtgatctgcccacctcggcctcccagagtactgggattataggtgttgagccactgcacctggcctccagtattttgtgattacaactaatcaataatgttgtacatgtaaatattttcattttctggaggtgtatcttcagggtgaattcctgaagtaaataggtgggtcaaaaggtaaatcatacgcagttttgttagatattgccaaatttccatccaagagaattatatcactttgcatcttagtgtagtttaatttgcatttctcatattacaaatgagattgaacaatgttccatgtgtttaagggccatttttatatcatttttgtatgtattgtttgttcttgtctttccctattatacttggtttttttggccttttttcccttgcttaaaaattttttttaaattaccttactttttaagagttctttatatattaggattatgctgcagatattttctgccagtgtgtgtcagcagtcctttgattttgcttccgttatttttttgccatgcaaaa

SEQ ID NO: 12562 - DNA, 1085 bp, Homo sapiens
tactgttaggaagcaggatgagaacactccagggaattgcatgtgttcctggttagtcagtagagatgatgctgcacgtattcttcaggttggtctgttgagttaaactatcattgtaatatttaattagatgttaaaatgctgtactaaatattacaataaccttacatctcttttgaatttgttttacttatactaaattatacatttaaaaaatctatattttgaaaggtgtgctacattcttacatgttattttatttaagtccagagatcaacactttcctcatactatacactttatcataatgagaaccagtgaagaaataagattaattgaatggtaatttactttttggatatcttttcaggaatgtactacttctgtatgtaggatacttgttatgaagacctttccaaattcatttgtatttctgttaaatttattttttacttttagagtggctatcattataatgtaatttaaaattatatttgtaaaagtgactattggagtgagtacgaattttgtttataaatctatgataaatgcattctccctttaggaggtagaaaagtatagagctgtatataataagcttcgctatgaacatacatttctcaagtcagaatttgaacaccagaaggaagagtatgcacgtattttagatgaaggaaaaataaaatatgaatcagaggtaagtgattgattatacgagtttctttgttattgttctggtcaacacaattttataattatatatttttaaaaatttcaaattagagtcgattgtatagttttattcattaatggtggagtattcatcatgattttcatcagcttcgtatcaacagtttttttgtgaaagttctgttttgggtgtagatcttttaaattctatttatcctttattttgtccagccaatggagatagacaactttggggagtttcattgtacaaagtcttttgtcttatgtagccacagagatggacttctctctgcaaatatagttagtgtgattccttacttagcattgttctttctgcttcttggaaccaaaccacatatgggaaagcactagct

SEQ ID NO: 12563 - DNA, 1055 bp, Homo sapiens
tttggaaacagttttatctttctgggtcttgcttttaagatttaagtgggagcagagtagtatttagtgtagtgctaattatttcccaccactgaggcaagactcttctgagtagtataacaatttctttatgaaacaaaggattttaatctgtttttggggaacagaaactattcttaggtctttgtgagctctgcgtattcatccttctaatcctttcaggtgtgtatttgcctagccttaggtagtttccttgcacacatgtgttaatcagtactctactgaatgagtcaagactttttgtaggtcttcatagttgtctttctgtgccctcttttctctgctaccctgtcttaggactctaaccaccccactgtccttggatgctcagtttcatctcctcaactcagggagtccctcatgactgcataggtatcctttccggtgccaggtcctgaaaactctcaaagcttatcttctatgttttgtgtctctcagggatctgccttttgctttcttatgtctagtgtcttgcaaactgtttaatttttgtctgttcttttgtttgtttcaggcaagagagcgaatctgggctcttattctatcttggctgaaagtggaaggctttttactttcagtttaacttttggttttggaaatctcaaacatgtaatgcattcccatgtacccatcatccagcattaataattattcattctgagccaggcttgttttatctactactttctcccacccacttccacttttttcctcaatgtttctggattattttgaatcaaataatattctttcaacaaataattgagtatatatctctataacaaatcagtgcagtctgtcttaaaagcataatcacaatacctttgccatatttaaaatacttattcattaataccttttaatatcccacctttgttcagattttcttaattttcccatggttttgcttgcctagttttgaagttagatcatttgaaacaggagccatgtaagctttacctattaatctcttccttttaattgctacctcatct

SEQ ID NO: 12564 - DNA, 1031 bp, Homo sapiens
tatgagtggaagctgtgaatgctgaacccaagatatttgagagattcttcaggtattgcaaatttaattattctgtttcatgagagtgacatctaaatgtgattatttgtaccaagcacatccagaaagtaagtaaagcacatccagaaggctggagtagttatattaattcagataaaagagacttccagacaaagagtatcactaaagataaaaaggatgtttataatgaaaaaaaagggacagttcttccagaagatgataacttcaacaagtaactatgtctctatgcctagttttctcatgtggtaaagcggataaaagtttctgcttaacaagagttgtgaggactaatgagataacatctacatttttactgccatactttccacatagtaaatattcatagattatgacatgtttatttgaattcaggctccatgaaggcaggaactttttttcagtgtgtcttcagtgtttaggataatgcctagtaaacatctatttgttgaatgaatgacgtgaaaaattgaaataaatgaatgaattgggattgttgttcatatattgcactgtctgtgtcaaacatacctacagcctcagcatcttagagttggtaatcatctagtttttctttgaatctattatgggttgagttgtatccccaaccaggatatgttgaagtcctaactcctagtacctcagaaggtgaccttatttggatgtaggttcattacagatgtaattagttaagctgatgaggtcatattggagtatgatgagcctttaactcaatattactggtgtccttaaaaaaagaggagaagagagatggagacagatggggtagagaggagcactatgtgatggtggaggcagagatttaagtgctccagaagctagaaagaggcaaggaaagtttcttccctgcagattttagggggagcaaggcctgtcaacacaccttgatttcagactaatagcctccaaaactgtgaaagaacaaacttctgttatttaaagctgcgtcg

SEQ ID NO: 12565 - DNA, 1035 bp, Homo sapiens
aattcaaacttgattatgtggatgtccatagtcaacaggaaaacaatcttggaaatttagaaatccacctgggcatgatggtgcactcctgtagcctcggttacttgggatgctgaggaagatcactggagccccggagttggaagccagcctgggcaacagagcaagaccttgtctctaaaagaaattaaaagaaagaagaaaatctagaaatctctaattagcaagacttggagtttcagttatctacaagtttcattcactcatctagaatacttcccttagtgtcaattaaatgagatgttactgaccgttcatggaacttcgtcttttattaaaacctattcttaaaggaaaaggaaggggaaaatgtaaccagtgcacatgtttgctatggtactttcagctttagcgcactgtcttaaacttttgatgttcctagatttagttattttaaagccctgtgaaaaccacaaggattgttctcagtatgcgaggtcttagggtaagttctgagtctgtgatctctgcaactaaaaaaccaatccctaatcttatacctttctgctaaggtcgtaatgattcacagaagttttgtagaaaggattttgaaggagagattagtagactcagcaatggaacattaaatcctttataggccaggaagtaaccacagaacgttcttcagaatgttagagccttccttaagtatgattaacaaacacagggacaagtggcttgtcttttttctaattataacacactgtttttcaaacaggattatggtcatgaaataaatttgatgagtaacaactatcactttatattcttatatggaaaagcagaaggaacatcacagcaaatactcatctaccttacccagattcaacaatttaaaatgttcttattttctttgtttgtgtttgtaacctgttaaaagtaagtgatatacagacaccaggtccctttcttttttcttctcttttttttttttttttttttttttttttgagaccaggtctcactctgtcaccc

SEQ ID NO: 12566 - DNA, 1035 bp, Homo sapiens
ttagctaccagaaggaatgaaacagaagtggggttttccttgactcgtcccttcacccccacatccaggtggtggcaagtcctctcattccacctccttcatagacctctcacgaccaccctacatccagccttcaccagctcttgccatagattgctgcagcaggctccaggctccagttggctccatggaaatgcattttccatcttgctttctcagaaggacttgtttaaaacaggatgtgatcatcctaatcctctatgcggctgccaagggacctacaggatgaaccccaaacacctctgtatgagttaagtgggaccctccgggtgtgacccatctgctgtcccagtcttcaactgcaccaagtcctccaaatctttacttctctgtctaactgattcaccttctgacaagcctttctgctttccattgactttttcccctccccctttcctcttatctcccccttagcagctccttccaagtgctcgcttagcaccaagtactctcctgacacttatcagtggctgtcattgtgtctctcccccggccactacgccaggaggcggctatgcccctttgcctccccagcacgcctcgctgcgcctgacactaggaggcacccagcaagtgtctgtctcatgaatgaatcaacagagagtctcctgactgctcactgtctttaagccacttcccttcccttggtgctggctggcccctttgctctgccttcatcacattggtgtttactgtgcccagtccactgctggcatttgctctgcctaacaaggtttgttgagccgagcccatttccttattggtaaagagagagtaccagactgaatgtcctcttgcaatcccagagtcggggtgattgatagcaggcgcccttctagtcgacctccctgcaaagatatagaatgtggatctcttctgctgactgcacaaagagcccatttgtacagcaatgtgttgaatacggtgcattattactgacatttgtattgggtacagtgcagggcgtggagtttc

SEQ ID NO: 12567 - DNA, 1027 bp, Homo sapiens
gcctcataccacctgcactgttatttgcttgatatttctaaatcagttatctccttaaaacttacatttattttcaaagtatcagtgtcattattctagctatatatcttctgagtttgaggcctcccagcagcagattaagaagtagattagcactgggtgtggtggctcacgcctgtattcccagcactgtgggaggccaaggtgggtggattgcttaagcccaggagtttgagaccagcctgagcaacatggccaaaccccatctctacaaaagatacaaaaattagctggacttggtgatgcatacatatgctctcagctactcaggaggctgaggtgggaggatcacctgagccctgggaggggtgaggtgggaggggtgaggctgcagtgagccttgattgcatcagtgcactccaacctgggtgatggcgagaccctgtctcaacaaaactagttagcaagtgttggagcaatgttagaaagtttttagcaccaaagacttttcctggactgaatcaactgaattggattgaggattgaaaaggaaataactcgctcactgtgattctatgttatttaatgcttttgtcttatgtcacctaaaataattcagaatcatctaggaaaaccctggtcttaatgtatcatctcctttcgttccttcatgaaatatttatctttagacccatggtctagaagatgcttagaaacatttttcccactcatgggttgtgaaaatttgagttagtgagtgttttccttttttattttggccaacaggaacccagatccaaatttcagcagaaccgagtgagatttttatagcctgcttctttttcttttcttcttcttttttttttttttttcttacctcttgattttggcttccttttctaatttatatttttttctggcctggtttcaatgtgtgtgtgtgtgtgtgtgtgtgtgtgtgtgtgtgtttacatatatgtgtttcctgtaatctatcttaaatccttgtataccaaatgaggtactc

SEQ ID NO: 12568 - DNA, 1029 bp, Homo sapiens
actctgtctttaaataaataaataaataaataaataaataaataaaacaattctactgacaatgttattgtacctgctgccttgtattgttagcatggagatacccgatttttaaataagctgtgtattaaaactgagttagacattatatgtgcggattatcgtaaattagcacattgggccagtcagatctagtgaagagaggaaatcagagaagggctagaacttcagcagaccgtaatcacaaattctactacagtgatgctggacttcttgaggtcccagttgaaacttctcagctatctgcttttaggttttttattgttgagacagcgaggaataggtagaactagtgaaatttttgtaaactcataataataacttttctcaagcagggttgatgtaatttcaagtctgtcctgaggctacaataagtctgttgtaatgaagggaaagcaacaattttactgtgcagaaagtattcatccatttaaatgatcgtagctcctgtattgtggaactcacttggatgcagctgtaaagatatgttttcctgacacccagaacgtatgtgatgcgagaggaagacatcgagtgctaatttcttgatgtcaccatctccttgggaggaaactagtataggatttaaaaagaacccttttatgaactcatttggtgaattagctcccctaaaaatgccaatgagaactagggggtcatgggaagagtcgactaatctttcagggatatggagtttctgcctagaagtgggcaaagactccatgagatgaagttcttagttactgaatggtcattttttaaattcaaaatcaatacctgttgagataacagggaaactacatggtctgtcttgctgggcttatttcagcctttgagactggaataataatgaggcagtgtactctttcaacattgcagaaatctatttttacatctaggtggactgacctagataacccctccccccttagtgaaaatgtaagtaatgaattctgtgattgttgctaa

SEQ ID NO: 12569 - DNA, 1023 bp, Homo sapiens
tacacacacacagagagagagagagcgagcgcatgacactgagtgataaacagtaaagccattcagaggaaagctgctggataaaatggaagcctgaaaacattcccacagtaaaatcctaccctgtgtttcgttaccattaaatatcctttcagagttatctctaagaagcccacttggagacatctagactttctaaaatttaataatgtctccaatggaaataacattacatgctaattaattgtcatggggtaacattattcaaattggtaactgtaactcccaaagattacattaagtttgatcagtgggcacagctgttctctgagaaataaattcagaaacttatttctgtctcttcttcttttgaccaaaggaaaaattaagtcagtgaccttggtaggtttcttattttgaacaatgtgtatgagattttgtgctgtcatttctaaaagctttttaattcaggttagccaaaaatctctggaagagggtaattttttcactggaaaattcgagtgtcatattattttcaaggttaccttgtattgagctgggttttttgtttttttttttaatgtctcagagcttcagtttctaaatctgtaacatggaaataataatggtacaacatcttagtggtagtagaagaattacatagtgtctggcatgcagcaagtgctcaattattgtaactctgtatgtttgcataataactccaggtgtatagcattatatacacaagttatcttggtttctcacctcctatttacaccatatttggcacatactaggcatcaattatttttttgcctaaagtcccctattttgtgggatcgaaaaatcaaatcaattgaactcatagacatagagagtaacaggatggttaccagaggctgggaagggtagtgagggttggcggggaggttgggattgttaatggatacaaaaaaaaatagaaggaatgagacctactatttgatagcacaatagggtgactatagtcgataataatttaat

SEQ ID NO: 12570 - DNA, 1022 bp, Homo sapiens
tgtcaattttatggttgcaatattatactatagttttgcaaaaacagttgagggaaacagtacaatgtacaagggatcactgtattatgttttacaactccatgcaaatctttaattatctcagcaaagttttcaattaaaaagacaaatgaattaaaaggacactgaaacactggataggtggaaagatgtgaagaaaacccagctgattacatcccacatgtaaaggaactgacctcaaagcaactgttagtactctttttttttttttttttaattttattttattttaaagacgaggcctcgccatgttgctcaggcgggtctcaaactcctggcctcacgccagcctcccacctctgccttaaagagtgctggagttacaggcatgagccaccacgcctggccctattagtaaatttggaaaggttatagagaataggagcgatcctaaaaaataggaaaatgcagggtgttgttccactttttcacaaatggtctttgacatttcatgtaaaccctgacaagtttataatagatcctcaaatatttgtcagcaattggagaagaataaagagatcaccaggaacccataagggttcgctaacaacactcattatggtaaccaggctcagggaacaatatctagatagtgaatctcagtttcagcaaagcagtcacaaaactcctcattaaaatattgaaaataagattgtatacttatttggagacagtcaagtggatgatttttgccagaaaatgttgattctgttggttttagaccaaactaaagtaatgcctgtaataaagagccatgttattagtaacttggataaaaacaaagaagactttatcaaaaaatttgcagctgggctgggcgtgatggctcacatctgtaatcccagcactttgggagactaaggtgggtggatcacttgagcccaggaattcgagaccagcctgggcaacatggtgaaatgctgtctctactaaaaatacaaaaatattaacctagcattgtg

SEQ ID NO: 12571 - DNA, 1050 bp, Homo sapiens
agcctcctgagtagctgggattacaggagtgtgccaccacacttggctaatttttgtatttttagtagagacgggttttgccatgttggccaggctggtcccaaagtcctgggctcaagcaatctgcccgcctcagcctcccaaagttctgggattacaggtgtgagccaccgagcccagccccagcactattattaatagcactctctttcactctcaaaaatgtcccgatttggaccatcaaagtatgtggcccacccttctcacagttagagaactgagaatttatccttagggaagtgggaagccattgaaaattttaaacaaatgcacattgtcaaaagttatttggcttgatttgggccacttgaccttgcgcaataaaaagatcttttgtttgactcggaccatcaagctcttggtctccaggatgactggaaaagatatcagaactgggaaaataaactcaagtgctggtcagcagcgtgacatttgctgccacaggacagcagtattatctgtgaacctctgtgtacacatatacctagaaacagagccagtgtctgatgatcctgtgaagtggaaacattctctttccttagctgaacttcgaagagttcctgtgttgtctggaacagttataggtctgtctcagaaaattcaggaagggtggtggcttttcctttcctttctccctgcacgtgtgagcgtccatacatgtgcgcgtgtgtgtatgtgcgtgtgtgcgtgcttccccatatgcaagcccgtgctcaactccctttcctgatttgactttctttccccagttgattttctttgctggtcagagcgagcagttggcagacacttatttatcggtctcatgctttcagccaaaaaaagacaggagaatttaggaaaacccaagactcatgttttacattttgtgtaggatgctttcattgcctcagagacacagattcgcccctttgggaattcctttactcttagttattatttctgtcccattttgagctctcctgtctgctgttgggtaggtggaaagat

SEQ ID NO: 12572 - DNA, 1033 bp, Homo sapiens
acacagcctttgtggtaaactgacctaagccagtttagtggttcacagctaataggttatgtatggttgataccaggagcctccagtgatgacagatctctactccacaacctctgtaagggtgaaaggagaaagcaagagcagttctcaaaccaatcctgctacggggacaaacatgcatgaccaagcaggcacacagcctgtgctgtaaactgcgctggagaggcccaagctcccagctttcagccgcttagacaaacaccttgcatgaaaggctctcctgtggcctgtgcagcagcagtgttgtagccatagcattgagctaactttacttagagtcacgcaggccacagaatcctccataacgtaagactggagggatggaggctgctggcgttgctgaattctcacaccctggtcataagaaggcggagtggcctgtacagcatttccagctgatccatatacagcaagtcctcaaatgatgtcatttcaatcggtgtcatttcatgatcaccttgatgagaaagtctgttcctggctggggcccctgtctgtgtggagtttgcacatcctcccacatctgcatgggttttctccaggtctcccaatttcctcctacatcgcagagatgtacatgtttggttaactggcatgtggtcccagcctgagtgagagagagagagcgtgtgtgtgtgtgtgtgtgtggcaggggtgtgtgtggtgggggtgtgggtctgagtgcaccctgctaggggatgtatcctgtccaggatgggtcccaatgttgcagcctcagctgccgggacaggctccagctacccttgaccctgaaacaggaataactgggcaaataattatcttccttgtgtttattaaccttacttaaatgtatgtatagctcacatgtatttcagtgtttaatattataaatgttttggtttttatttagaagttttgtgattttttttgtgatcagaaatatgccataagaacttagctcttgttgatctcaattagcctgtggcaaaat

SEQ ID NO: 12573 - DNA, 1029 bp, Homo sapiens
ctctagcagccaacctcggcccttactgtaatctgaaagtgccatgcccccgaaatccaagttgctatttggtgtgctgtaatgattaaatattcatttgtctaacggattgtgtgatttcacagtttagcgatactctctagatgaaataattggccaaaagcaatgttgggaggttttgtttttgaaaaatgtttattgaatgtttcatatgtgccagatgttattctaagtacttttcatctccttaactcagttaaatttcaccacagccctgtgaagtctgcactactgtcccctggatttttatctgttttgtatattcccatatcccagtgcttggcacataaaagacactcaatatttgttggacaaatgaatacataaatgaataaatctcatatggctagacattttggctttccagataacatcatgggagttggtcctgtggtagatcctgtgtcaacagcaaggacagaaagacacagatgttccaattctggtttagaaaaaagctttcagaactaactgcattattactctgatggaagacttcctttttaaagcaccaaaatatttcagatgttatacttggcctagatagatgttaagtggaaattgtctacatctggtaagaaatgggttaattgattagattctgaaattgagtaagtagtttttaaatttttttattgctacagccatagactttggtaggtcctcattggtgccacttagggtatctagatgattgtatgattatagtaaaagccagtatttattaggctttacctatatacctggagcgattttcagtgttttacaggcattaacattttaataacccatgaagtaggtactattattatttccattttacaaataaaataagtaagtgttgagagatggaccaacatcacatacctagtaagtgatagaaccaaattcaaacctggttaggctagcccagagtctgtttcttaactattatactctaatgcctttgatatacaaagtacttggaga

SEQ ID NO: 12574 - DNA, 1043 bp, Homo sapiens
agtaaggcgggcggatcacgaggtcaggagttcaagaccagcttggccaacaccgtgaaaccctgcctctattaaaaatacaaaaattagctgggcatggtggtgggcacctgtaatcccagctactcaggaggctgaggcaggagaatcacttgaatccaggaggcagaggttgcaatgagctgagattgcactactgtactccagcctgggcaacagagctagactccatctcaaataaaataaaataaaataaaataaaaggaacctgagaagtactatactatgtcagagatccatggagaaggtttgtgagtccctagagaatggctcaaacaacactgtctggaggtagaatcagggaagttttcacctaaggagttgcagctcagctgagtcaggggtacacatccaccagggcaagagaagggccaagcagacagagatccagcgtaagcacagacacagagagggtgccgagcgaggcaggaggaatctggtcactgctctttggaagagctggcagagtagggtgtggaatgacagcagatggaggccaaattgttaattaagctgttaagaagttgtgatgcccatcctggttaacacggtgaaaccccgtttctattaaaaatacaaaaaattagctgggcgtggtggtgggtgcctgtagtcccagctactcgggaggctgaggcaggagaatagcgtgaacctgggaggcagagcttgcagtgagccgagatcgcgccactgcacaccagcctgcacgacagtgcgagattcggtctcaaaaataaattaaaataaaataaaataagaagttgtgatgagccactgaatttttaaaaattcttaagagatagggtctcactgtgttgctcaggctggtcttgaactcctgggctccagcaatcctcctgcctcaggcttgagccactgtgccaggcttgaatcttttaatcaagggagaaacatgatcagatttgttttagaagggtccagtttgggggtaccactgtaaagggtagattttttttctt

SEQ ID NO: 12575 - DNA, 1065 bp, Homo sapiens
tgagtagtattccatggtgtatatataccacattttctttatccactcgttcactgatgggcatttaggttggttccttatttttgcaattacaaattgtgctgctataaacatgtgtatgcatgtgtctttttcatgtaatgacttctttttctttgggtacatacccagtagtgggattgctggatcgaatggtagttctgccttcagttctttaaggaatctccttactgttttccatagttgttgtactagttcacattcccaacagcagtgtaaaagtgttgtgttttcaccacatccacactaccatctattattttttgaatttttaattatggccattcttgcaggagtaaggtgctatctcattgtggttttaatttgcattttcctgataatcagtgatgttgagcatttttttcataggtttgttgactgtttgtatatcttcttttgagaattgtctgttcatgtcctttgcccacgttttgatgggattgtttttttcttactgatttgtgtgagttccttgtagtttctggatattagtcctttgtctaatgcatagtttgcaaatattttctcccactttgtgggttgtctgtttactctgctgattatttcttttgctgaacagaagctttttagtttaattaggtaccatttatttatttttgtttttgttacatttgggttcttagttatgacttcttgcctaagccaatgtctggaagagattttctgatgtgatgttctagaatttttatgttttcaggtcttagatttaactctttgatccatcttgagttgatttttgtataaggcaagagatgaagatccacttccattcttctacatgtggcttgctagtttttccaacaccatttgttgaatagggtgtcctttccccactttatgtttttgtttgctttgttgaagatcagttggctgtgagtatttggctttatttctgggctctctgttctgttccattggtctacctagctacttttataccggtagcatagtgttttggtaactgtagcctcgtagtataatttg

SEQ ID NO: 12576 - DNA, 1034 bp, Homo sapiens
gcctcagcacgatgggaaatgaaggcgggagtacaggcggcacggagctccagctcctgcccgtcccgtgggtccagaaaactacaattcccaatatgcctcgccgctcacgcccccttttcgagcccgcttattggagaagagagtgagcgtgtaagcgagagaggcgggagcgagctgaagctcgagccctccgattggaggaggctagggcttttgtctgccttttacggccgcgactagcagggggcgcccggagcactgctgatttttggagcccgagaagggcacgcgccagcggagccgaagagagcactgctcgtgcccgcgcctggctgtcagcctgccgctctgcggggcggtgctagtgctcgcccgcccgaccccggcggctcgcgcccgggagcgccgcagggtcgctagagtcggccgcgtcctttgtgtggcgctcaggctgcgccgcggggcggcgggacggaatgtgggcgctgcgggggcttttctctcctacccgaactgtgggaacaatggactgaaaggggaagatggattgaggggccgagcggggaagcgagctgcaccggggaatcatgacttctgcagccggtaagtgacggcgctcgcgctgccgcgggaaagtttgtggcgagcgctgctaggcttgggctcgcgagcaactttcttcgccggggtgggcgagttgtgtgccccgtacctttgccgagcacctcggcaagcgcggagctaatgggattcgctgccggctttctcgtcttttcctgcccagaggggctgtttggaaacccgggatttctcgggatctcccttccaagggggactgtgctgggggctctgcaccaggtgaaatgcgatgtgtgaagggcgttcgctcatctctccagcagtgcgaggacttcgcctttgcatgtgaaaatagtgtagattcccaagttaatagatcagttattataggtaaaggcagtgttctcagcgtgttcaatttggccactaagtgagtcgctttcaaccttgta

SEQ ID NO: 12577 - DNA, 1024 bp, Homo sapiens
gtacttctaaatactccagtccttttccatgcactggaggagaggtaagggcacctgtttaactctacactgtaagtaagatagaaaaatgttaccagcccgcatttttttttaaagcatgaagctatacttgtagcaacatgaatgaaattagaatttttcatgagatttatttgtcataaattatttcttacccttacatatgaatgtgtagtcattttcaagcagattgcccactggctgggtttaagtcagtattctaagattcaaatttttcacatataaaaaagagcagacacaaatcatcactctagaggctcctcattgcttcagttctcgggactacttactgtgcttctgaagggggaagagttactgagacagtctgttcctggagcccacacgggtatcttcctgatagtgttaatataaataggaagtaaataaaaacaaagccaagaaagaaaaaaaaatctgtttgacagaaggatacttttgtatgacagtagcaaacaaatgaaagtagtttcttttaacatacaaaggttcttctgggctcacagacacatgaatttcagcttaggccatcttaaactcattctgcaaaacagcctcattagctactgatccaatttctatgtggaatgttttctctttaatattcctttctcctaagggagaaacaggtctctttttagctcttcttaacttatgtggcaataccttgaaaggctccccccaaccctcaggtgtatgagaacagagaaaactgaataaaagcagattaagagaatataatacttcaataagtagatgaagaaatactgattcaggaaaaagagaggagagtataatcattctaattctggtccatgtcatgaatatacagactagataagtggctttcaactaggggtgatttttggctcctcttccctggggacattgggacacttggaaatatctggagacatttttgctagggggaggaacaccactggcatctagtgggtggaggccagag

SEQ ID NO: 12578 - DNA, 1025 bp, Homo sapiens
tgggtggtgacgcggcggggcccccaccccttccctcgctgcttctctaacccatctcgggactcgggggtgcaggggagccagggctgcgagcgcagagcgctgctcccgagggtgaaatgagtggccatgttccgcctcctttccccggggctccgcagtttcaaatactattgatttatttttacaactgggatacacatgcgcttggataaccagctatcctgggtgcgccctgccggggatactgcgaccggggtttctttcttggtttggcttgttaaaaaactgcttttccacttggtgagggaacaaaggacccagctcgccatcccccggcacttcatggcctaaggaatgatgaggaggggtggcccagcgaccctgggcgcgcgtgggctggggccggtctctggtagaagcccatcgctggtgtccctgacctggtgctgggtactagagaaccaggtaaggacacctggggcagggctgagcgccctctccccggagcagtgactggaacgcagtgggactcctggcttggacgataggtggtgatcaccccgggcttgcattgagctggctggccgcccctggggaattggtaccctggcagagactctgcgggaggtcggaggcgggtctgctccctggctcggtaactggacaaccggcgtcggcgtcggcagatgccctctccctcccactcccatcctggctttcttgggctgccctaggccaccggctcctggctcgtggtttctgtattcgggagccccttctgctcctctccctccctcttgcgggtcacctggtttccagttaggcgtaagcgcagccctgtaggtgagggggagagatgtgagggagtctgcagacatccagtctctcgtgcggatcttgactgcttcagaaaggggcgcctgggctagagggatgcgctggtggctacagaacattgtagcacgcatctcctcccttgggcttccactcttccctgagggccgctggcacccagcaaaatc

SEQ ID NO: 12579 - DNA, 1053 bp, Homo sapiens
ccaggctaattcttaacttagtacttttaattacactaataaggaagtttcaggacacgaagaaacagaccagctaaaggttttctactttgctattattttttaagaaatcaatgctaataatgttttggttgaaagcagtgtattctgatcagtcaaggacctctgatcccacctgttcttgaagacaaaatggcatgcctgcagtccacagcctgacacttcatgtaataaactggcagctgcttcgaggtgggagctgtgttgacctttttattgtctcccctagggaacaaacggagtcccagtcacaactctctttaagggagattcagtggtaacttctaatcaaaacttacttcatttaggctctaaggggcaggtgcctctctgttccctaatacaagcatttcagtacaagcaagcatgatttacggagaaagagggatgttttgcaagaattttgcacacactacatgttctttcccattgttgcaaaatatgatttctaagttgagaacacacaaatattggtataatttgcttaacaattaccatgtgttaatttcattttcttctaaaaaggaatgaaatcatcaggcaatggtatcgggctctctcaagggtctagcatctagaacggtgccaattatgtagcaggtgcttgcaggtttgttagatgattagatgtttggaacaaccaagtaaaatccatgacagcaaggacttgatgttgttcatcttgttgtcttgagtgcctagaactgttcctgccatgtactaaatatgctcaactgattccaactactttagcatatactactcgagcacatgacagtcttttgctgaggtgctttggcattctttctaaaagatagatgggtgtttcattaatgtggtatccatttgggtttgtgagttcttggatgatgccagtagtatgtaagttaggtaaaatatttcctattttcctcactttggagtttgttttccttatttaaaagggactttgaaatttaagtatgtactgtagctttaaaactgcatttctgc

SEQ ID NO: 12580 - DNA, 2458 bp, Homo sapiens
caagtaattgagtgcctcctttctgcacaaggatggtgagggatttagacaataagctattgtatcttccttcaaacttctgcaataaaaatattttataagtattatgttaattacaacactgttataagttattatccccatttcccaaggaggtaagttaggtttagctaggtaaagtgtcttgccctaggttgcacagctagtgagtagtaaaagttgagattcaaaccctggcagtcttattgcctccaatatactgctttcttccttctttttttttagaaacagggtctcactctgtggctcagcctggcgtgcagtgatgtgatcttagctcactgcaccctctgccttccaggctcaagtgatcctcctacctcagccttacaagtagctgggaccacagatgcgcactaccacacccggctgtttttgtacttttgctagaggcagggtttcaccatattgcccaggctggtctcgaactcctgagctcaaacaatccacctgcctttgtctcccagagtgttgggattacaggcgtgagccaccgtgcccggcctcaatatactgctttttatactgaaccccctccttcaatcggacctgaaccctggtctttcacgagttgtgtgaggacactgaccatggcatgttccatggcatgttctcttgttgcctttcttttggatcaccaaaattgcctaccagcttctcttacactaaacaggccagtttaattgatgttcagggagcagcaggagagaagctaagaaacaagatgaggcctggtcatgtttgtttgtaaagcactttaaacagccaggccgagaagtgtttggttgagaagttactgggagttctgagtatggaacaaatgtggtcagagcgccccactaactgggcagtcctggttatcataggctgtggtgggaaacaggagctcaggtagggaggggtgattacgatagaatgtttcgaattttgtgttggaaacaggtggcacaaatcatcagtaaacccttttaacgtctaaaaaaggtatcagcaaaaataatactttagatttttttcctagcacttcattaagaagtgccatacattatctcgttaatttttacaacagccttgctagagattatgaggacctgaagtcatacaaaggcagtggaaaagaaaggagtaactgagagaagagacgtttgggggctagaatctattggcaactgattggctgtggtgagaaaagaagaaattaaaaatgactgagcagagatgtaataaagattcagctcaatccagcacacatttattgtcaggcactaatatgatgaataaggaactcacagagcaaatatgtatgtatcaagtaattataatacaatgaaaagtattttttttaaaatattaagtgttgtgggtgaggaaactattaattttaatggtgatggatttggacatcgtcttggagatgacttacaaaggagaatacaagaagtaaactgtagaaccttagaggatcttcattttagagctaggacagaggaaaggtagcaaaataaatggaaaactaaaaagatttcaaaggttcattgttaagaaagctgtgggaagaaataatttaaaagtggtacggagagtggtcagcagtctggtgtgctgtagaattatgaggagcctgagaataaaagcatagaatttggagtttggagtctttcaaagactctaacttcaggggcctgatatagccaaaagacagttccaggaagtttaggagtggagaaggctttgcccattgcttttaaaattggggaaatctgggtggaaaattagttcttcaaaagtgtttctttgatatcaccgctgctaagggatcctttttgggcgttggttcattctagatcccttaagattgctttcaagtaataccaaagtgctggaggaaccctggaatcattcgtgtgcccgggaattctgtaaagagagagtatcttagaaaatctcaaaccacagaaaatactttgatccattgcagcacagaatcttggcttccacgatcctctttttataatgctctcatcatttgtatatgtatttaaatatctgagtctatccacatctctccatttctactaccactgtccaagttcagtatcacatcttcacatcctggaagactgttctggcacccaaactgtgcacttgtatctgttctgacttctcccagccactctccacactaaagctagagtaaacctttaaaagcacaaatgtgtcatgttgtcctcctgcttagcagtctccactggtatctctttgctcttgggctaagacaaaatcctttagtggggattataagctcctaacactctagctccctttgcttcagtcacactggcagttttggagtttctcgaactccccatatgtcctccaacatagtacctgagcatgc

SEQ ID NO: 12581 - DNA, 1025 bp, Homo sapiens
tgaaggttattgcttttagaacttgggttatgcattccttttctgtgtcttcatgtgttatccccttacctataattagaatttctcttctcccttccactgaattacatatattcttcaaggcccaacttaagtcccacctccttttttgaacattctttcactctgaaagtcctcgtagatttccctattctctgaatgttctctgttctctgtggttaatagtacaatgccaaacacgcacacaaaatgtcaaataattacctttctatgaattgatttcttttcttttttactcttagagattttcctaggattcttaaaagcttatgttgagaagttttcctataagagcataactactgatgactggaaggatttcctgtattcctattttaaagataaggttggatttaaaaaccttttctatttttcatgctcgatatatctctatttattgactgattaggttaacttgtattatctaatagtagtattggttcagaactttaggactcaacctctcattgcatattttttctattttaaatgtgatcttaaccacatgaactacctgtagaattttcctatttcagagaagtcatcaatagtatggtgatgaatataaattttagaagatagagttagatgaggtaatggatatattagcttgacttagtccacattgagtacatatatcaaaacatcgcattgtgtcacataagtatacacaattatgatctatcaatttaaaatattaatttttaaaaaagatttagaaattatcttgatatagcagattagacaaaattatatatctaaggacttacaagtttaaatttttttttgacaggaaagggcattctattgtaaactgtgaattcttactattcataggttgatgttctcaatcaagttgattggaatgcctggctctactctcctggactgcctcccataaagcccaagtaagtacttgcctgctaatgctttccttctcattctcctaactcctagagagcctc

SEQ ID NO: 12582 - DNA, 1021 bp, Homo sapiens
gacctcactgggtctttgctattaatatagctgtttactatgtttgcatcttatttggtatgtcatttttaagtgttgtctcctgaaagccaaatttgctgaccaggcattaaatcatttttctagtctttttataagaataaagcctgtattattgagcaagaaacaacagagaatattacttaagtaagcattctattaatagacttccagaagtttatgccaacatatcctagtgttccagtctccaagttttagattcccctaaagttacaccactgagtgaagtaatacctccttattagcttatttgcgtggtgatagcagtctttctatatgtttctccatgttatttcatgtcttgcaggtaaagacatttggggagacacatcctttcaccaaacttgtggttgatctgacagatatagaccctgatgtagcttattcttcagttccctatgagaagggctttgctttacttttttaccttgaacaactgcttggaggaccaggtaagtagttggtattttatgattttttttttctttttgagggtaatgtgagaattaggaagaattgtaaactattgttttgttccatttaatacttccaattcattctggatgtagctgctgaagaaatctgtattgttttctgagttacctctcaacttaaaaccattaataacccctaaggtttaaattatgctgcttcattttttaaaaaatctcatcagtttttgaaattaggataatagtgtgtattccctgaaaacatttctatggtacagaagtttataagagtaacaagtgagagtccatcaacccctttccactccccaggggtaaccactgttagcagtttggtgtaaatggctccagatcattttctaggtgtaaattaacaagcagacaaataaatacatgtaattattttaattacaaaaaatgggtcatgctatatattggctctgcatttgtgttttgttttgctcgatatttcacatacacccttctgtgtc

SEQ ID NO: 12583 - DNA, 1035 bp, Homo sapiens
tgtttacaaatggaggagtcaagaccaaaaaagcactcagttacagtcctggtcattagacatgtatctttgaccttcagtgaacagaatgtgtatgcatgcgtgagtgtgtgtgtgtgtgtgtgtgtgtgtgtgtgtgtgttttcttaattgacctcacaatggataatttgacttccactgcagcttctgtggttccaagctcccataactttggcatctacttattgccgggtaactctgtgtgcctctacaacatgccaatagtgctttgaaacataaaggaataaaaaaagaaaaccaaaaccttttaaaagtcaggaggaaaaaggcaaacatatgggaaatgcgcttcctgtaggttactttttgagaaatgctcaaaatgcaccttttaatagtatgtgtgatcttgtttttcatgtgtgagaagcttttgttcctagcagaataaaaggcaaatagatgttttgaacaatgttttatatcacaattttaagctatatgttaaagatgagaactatttgagaagtataaaagcaaagttatccctactaatattaggagatttgaaagggaatttacttacttttaaatatgaattgtcttactgtgtaacatttgtgaacactaatgcaagcacgtggtgtgcgtttgtttgccctctttaggttccaataccctgctacctgattgctttagttgttggagctttagaaagcaggtgagcttttggaaaaattttcaggtttgtggaaagatcaaaacttaggcatcttgaacttctctcaaggttaattggtcaatcatttgcatatttctcaagatatcaagctgacagctctagaaaaattcaaatctaaaatgtaggcaacaaattaattttacatttaaaaatcttgaccagttaccccttattttttcaagtattgtaaaatgagcatgctcttacctttagagatctggattctcatgtaagcttgaacaagtcactctcaatctctgtttccttatccttgaaattataatgtctga

SEQ ID NO: 12584 - DNA, 1029 bp, Homo sapiens
taccaggttgggctttttctagatatacaaccacagtgatatacagtttgctgatttgcttaacgaacatgaagtttgaaagtacatgagttctaggaggaaatatattgtgtaatgtattgaggagccagagtgaaagaaacttaagttatagataaagtttttcataatagagaaaattttaggagtcagaagcaaacatattttgatttagatttgacttttacttaaagcccaaaatttgtgtgactgtcctagggttatttaacaatatatatgcaaatcttagaacccaaaaattttcaagatgcttagagtcccaaaaaatgagacctagactagcttttgactcttcaattcttctaatttcactctgtattttactctccataagcaactagttgttgtagcctatatctaatatgagttttttctggtaaatgaaactattttcttactatttaaaaatattaattttaggttttggatacaaaggaccttacaatagaaaaagtagtgatcaatggacaagaagtcaaatatgctcttggagaaagacaaagttacaagggatcgccaatggaaatctctcttcctatcgctttgagcaagtatgaatgttatgatctttctcttttacagctaaataatggggaaacatattcttaactaatttaaatattttttctttttaaattttagtttgtaaatatgtaatgattggtacactacttatcctgatcttctgttcagattaaagttgatacagcagttaaaattatatatacttaagatactaaaaatgttgtttgtatataatacaacaaggactttgggaactgttagtttctaaacgattcatccttttactaatatctagagtgatggtgggggcatgccatcataagaaggcatttcaagataacctgggcagctttacaagttgcaccctccttgcccttgccccagaggccagctgcatttattaatgggacaatgataatgccaaagatagaactgttacagtgc

SEQ ID NO: 12585 - DNA, 1070 bp, Homo sapiens
attgataatagtgccagctgtatttcagaggtgagatgggaagacccagtgccagtgcggaatcaggagagacgtcatgtcttcttttcctctccgttcttagagtttgtgatgttgaggaatgctgaaggagacttaatcggacaaattctaagctttctaaaattcttttcaagttttgggttatttacactgaagtttgatcctccaaatttatgataactttcatacatttgtttcttttcactgaaaccttcagaaatgtttaggtgttcttttggttagtggctcaagaggttttagtgccatggccaaggcagaagccagcagttaacaataggtaattctgactgcaaaccatcttgttttcactaagtaaatgtctcaactgggaatcaaatcaaggtggttttttagttttagctttgtgtttcacacataaacctattttttttcatcatatccctgcacatagcaagtagaaaatgtaaatttagacatcataatgaggcataaagctttttttaaaaaaactctgctttgttctagaaaggactgagactgcttgaagcaacatatatagtataagattaaaaataattaaataatttgcaggaagagagaatagggataggagaaacaaaacccatggcataaagccctctatactttaaaagaagtgggccacagggttgacatggagcttcctaccagcctgtgcaaaaaaggaatcagatacctattccatgtcaactgaccagctactgagaagtacaactgctttttagggggatggagggtattgttcaaagaggatactgtgaaacatataaattatatcctataattagtagagctgttgatgcttaacacgtttcttaaaaagtactaaatccaacttgtcaacaatccagttttctttatttttctttcttattacagtttttgactattttttaaaaataacatcgctgaaatttgaaggggaattttaaaaagtagtttgcaaatgatagttgagacttaggacttgagataatacagcttaaacattgcattttttgttttct

SEQ ID NO: 12586 - DNA, 1030 bp, Homo sapiens
cttctagcactaactttgtatgttcagtaaatatcagttccctggaccagctccttttattctggtacagaattattcttagcctatggggtgggggtggggggacagtagtgtctattatttgtgaattttggaaccagtgtcattactttacagtcaaggaggcatgttagagtgtttggatttttatcccttgataagggcccacatccccacatacagagatgctcaattccaattgaaaaacctcagaatttctaagtgtcaaagcaatagtctagatttttttctgaaaattcaagaaatgtgttttctcaaatctctttttttatcctttctcataatcctgccacttaatgcccagtttggatcagttatttagtcacatttcaagttagtttttatcatcacttatagttaaggattgtaattaatcttgaatttaaagcttggtgcttttcagttttcttgtattagaactttccttcttcatgtacaggtgtggtacctttggactggtgcctgctgattttctgatggaacagaaaatatgtctgtattatcactgctccaaattacattacacaacagaatttactggagtgttccaagttatcatcagttcagttccacgatgatgaggttcctgtagaatttttcatctgtcagatttccttcattctcccctaactttagtaatacataaagcagtgtatcctctctcagtttccacaagcaaggcctttagtacctccactctctatttgtattacagcaagtttttgatccatcaaaaattgtgaacacctacctatactgatgaagatacctagtgttaaaaatggtttctttgttgtttgggttcatcaccactctgtgagcttcttctaaagcattagattttttaaatgttaattatagttccaggggaaccccaacttacttatactgacacagtaaatatatcagatggtcgggattccctatggaaaactgagaaaaccagggctaattttttgaaataagaata

SEQ ID NO: 12587 - DNA, 1059 bp, Homo sapiens
ttgtgatccgcccatttcagcctcccaaagtgctgggattacaggtgtgagccaccacgcacagccaaaagtttttaatttaacgacatctattttatctcgtttgttgcctgtgcttttggtgatttaagaaagtattgtcacgtttcaaaggtcataaatatttgctcttatattttcctttaagagtttattatatttttagctgtcagatttagagctttgatccatttaaatttttatgtgtgatacaaagtaagggtccgactttattttgcatatgaatatcaatttttttttccagcaccatttgttgaaaagactgtcctttccccattaagtggtcttggtgcccttctcagaaatcagttgaccatagatgtgaggtttatttctgggctgtcaggtctgttccattagtctatatgtctgtccataagggtttgtagcacaatgttttgattactgtctttagaacgttttaaatcagaaaatgtgagtcttccaactttgttctctttctcaagattgttgtagctattcagagtctcttgaaattcaatatgaattttaagatgggattttctatttctgcaacaacaacaaaacaccattggaattatgatagggtttgcattaaattagaatctatagatcactttgggtagtattacaattttaataatattaaatcttccagtccatgaacacaagatttctttccatttagttaggtcatctataatttcagcaacattttgtagttttcagcatacaagtcttttgccttcttaaatttattcctaagcatcttattcttattgatgttattgtagatggagttgttttcttaatttctttttggattttttcattgctagtgtatagaaatacaagtaatttttgtgtgttccttttgtatcctgcagctttgctaaatttgattattagcactaacagggtttctgtagagtctttagggttttctatacatatgatcttgttacctgcaaggaatgatagttttacttcctcctttataatttggatgctgtttat

SEQ ID NO: 12588 - DNA, 1028 bp, Homo sapiens
acatgggaagaacagaagacagagcatgctcttttaagtctgataacatggtttcaagcccagcccccagcctttcttaccaatcaaggactcagaactgaaggcaattatttcttttggtggacttggaatctccgtttgtctacactgtcctcttcacagtggagtctttttatttcagacctacagattgtttttatatttgttgtcacagtgtgacaattttttgtacagtcggttttaaggtcttctctgccattagagccagtaggttacagctattgatgtaactatagctgcaatttttgtgcaggactgagaaacacagtgcattatttattgcggaatcattgctgctaaataactactgtctgtttatttaacacaacaattgaatgcctgaagaagttgcagtggctttattatatgtgaatgcatctgtttctcctcacgaattgttttactgctgcattttttgtttttaaaattaaactgcagtgtttcctggaatgtaaatttagctttgcttaatagtaaaataagtgagccatcttgaacactttaagtttatactatataatttcttaatgaacattggcaaatagagtagctaagagattgacaagcacattacgtttagataagcatgtgatgcagaagttgattcaagcaagtgaatccctgacattttgaggatctcacattagacaccaacaaattaaagctccaaaattatttattttttatgtgttcctcactttagaaacgtctactgcatattactggatatttgtatactaatacacttacctattttacattgtgttttaaatttagttaaaacttaaccgtagaagtctgttcaaacgcgaaaggtcttgctttgtttgttttaaatacatttattttattagaaaggatgatatttcattggggaatagtttctttcatttgggggctatgtgtttcaataacattcacttggaatcagctgaaagctgtaatatgtctttgaaatgagccatgat

SEQ ID NO: 12589 - DNA, 1048 bp, Homo sapiens
gtatcatacccgaggtttatccaaggcacagttattgctaattgaaaatttttcccaaatacccccaccatgacaacttgtgattatagttggcattggcaatttttgagtttctgcagagactggaacaacaacatacacattataaagcttattgtgctatttctttagctattatttctgtttctgtgaaacttttaaaatattctaaaataatctaggatggaactcaggctagattgtgaactcatgaaagtgggaatcatgtctgtcttctctagcacctaacattgtgctgggtaaatgttgaataaatgagctttgtcctctgtcctctgaataatttctgtaggagagcacgtcaacaagctagtcattatatctattgttaatcttgttgtgttcagcaaataaaaatgcaagcaaaattttctaaaaattttatttaaagattcagtaagtactgttttgatgtaatcattaaatcctaagttggaaattactaaattgggggctaagcttttactttttgaattaggatctgacagacaattcactagtgtaattgtgcctttgtctgaattctctgcctgcctgcctgcctgcatgggtggaattcagtagtgttgtttattttatagactgattattcaaatttaaacttaacctcttacatatttgtctttacagtctaatttgtagtccatttacatagtctttaaagcaaacctcgacattttgtcatagtaaccattggaccctagtgtatttgatgttttaagaacatagtagtattcattcatttaagataaaaggattaataagaaaatttctctactcctgagaagaaaaaatgcctagcttacagtcttatttcccgtgtgcttctcattgttataatgacattttaaatatttttttcaggaacattcattcttttgttcatactagtttgcatttattctcaatatagtgttttttcccccataaaagatgacacaaaacttaaaattcatggcaaaaatgcggtagttccatattcatgaat

SEQ ID NO: 12590 - DNA, 1052 bp, Homo sapiens
tttatctctgtaggtgtgtctctacagaatggtatgctggagttggctcacactagttcataagagatgattgttaaagtttcaggaactttgcaaactggttgttaaacatagctattaaattttaaattatataagtttacaaataggtaaactaaattaaaaacaaaggtaatgaatatgcaaaagtcattgcttcctaattttttaccacttttaactattatctatgccaccggcgttatttttttctgttctagttatagtcaaaaacactatataatggtatgctactgcacatttcttcccaaccatatgttcagtgttgtcatgttggtagcctgaagttgtccatggagagagaagtcagaaaacactacagatcaggccctggcttattgttttcttgtttgtctagaccagggtttgttttttttttttttgtaagggggcagttagtaataaatattttaggttttatgggcatacagtctccattgcatattcttctctgtttaataatcctttaaaaatacaaaaaacatttttagctcatgggccatataaaaagaagccacacttgttctagacccttgttctagaactaagacagtgtattgaaaatgttagtaacgcagattaaatttaaagggtattgtgctggaggagaaaagtatgttgtatctgccgctgttacattacctgatcagcagagagatatccctcttccccccttgacagatgagtaaagttctgacaagccatcattgtttcacgtttgtcttgatggaaatgaaaataccgactggtagtcatgtcagaactacacttgtttgttaatgacgtgagtaatttcttgtttgggtcagatggtactcaagtatttattcatagtctgagattagtaagctttctttgtcgtccaattccttgtgcaacaggacagatttttttttaagtgtgaattttttttttttattatactttaagttttagggtacatgtgcacattgtgcaggttagttacatatgtatacatgtgccatgctggt

SEQ ID NO: 12591 - DNA, 1188 bp, Homo sapiens
gcctggttcctaacaggccatggaccagtactggtctgtgacccaggagttggggacccctgatcaatgtgactgatacacaattccagttatagtccattaacacatcatatttcatatatgtttaacagttgatctggtaaagatttaaaaatattttggggctaggcatggtggctcattgtaatcccagtgctttgggaggctgaggtgaggaggatcacttgagcccaggagtttgagactagctgggaaacatagcaaaaccccatctctaccaaaaagacacaaattagccaggtgtgatggtgtgtgcctgtagtcccagctatggtggggaggatgaagtgggaggaccacatgagcccaggtggttgaggctgcagtgagctgtgactgcaccactgcacttcagcctgtgcaacagagcaagaccctgcctggaaaaaaagaaaaaaaaaatatttgaatagatgtttttactataaatgctgactaaaagctgggtggtaggagtgtgtgtgaaactaatttagcagtcgtgtctgctggcctgttgcttctgcctttgtaatatgtcctaaatctgcctgcttccctccatcttcagtacagccaccctagtctaagccaccaacatttgttacttagggtactgtagtaatctcctccttttgctgttgattccctattgcctgtttttcaaacagcaaccaagatgatatcttaaaaaattgttttcagtaattacaaatataaaggaagttacaaagattatatagaaaggacccatacttgtacccttctcccaatccccccaccattggttccatcttatgtaactatagaacccaggaaacagatactggaataaagtctaaatatagttctgtgtcatgtcctcacctgtgttgattcgtataaccactgcaatcaagattaagaactgtttcatcatgacaatagatctctcgtgttaccttttgtagtcttccctacccccttacctcctactatctttaacccttcacagtgatatttttgaaacatgaatcagatcatatcactctcctgcttcaaagctaccgtaactgcttccaatctgagaataaaattcaaacttttatggtgaagtataaagtgttgaatgacttgttccctccttacctctgtggtctcacctggtac

SEQ ID NO: 12592 - DNA, 1029 bp, Homo sapiens
gctaggattacaggcgtgcaccaccatgcctggctaatttttatatttttagtagagacagagttttgccatgttgaccaggctgatcttgaactcccggcctcaagtgatccgctcacctcggcctctcaaagtgctgggattacaggcatgagacactgcgcttggccctcaacatgttattaatataatagttattaacttttttttggtgagggataataaatgttattgtctgaagccactaaggtttttttttttaatttttaaaaaagttgtaaaatacacatagcaaaattcactatctttaccatttttaagtgcagttcagtggtatttatttcatattgttctgcatctatcaccattttccatctccagaattcatttcatcttgcaagatgtaaactctgtacccattaaagaataacttcccattcctgtccttcccccagcccctggcaaccaaagtccactgtgtattttacagctgcagcacaactcagtttggactacgtacttttcaagtgcttattagcctgctgttggctacagttttggatagctcagttctgtgctgtaatagatactgaatccatttatagttactctgtgttacagaatgttactgttatatgaattaattctgtaataacatttctataatactttgttatttttgtccttatttgtcatccagaacaataggcaggtcccgtggtcagcaaaatagcaaaagggtcattcaaaaatggtgtggcaagattctgaagtggtgatgtctgtatagtcggataatgcaactgtaaaatacacagtggactttggttgccaggggctgggggaaggacaggaatgggaatttattctttaatgggtacagagtttacatcttgcaagatgaaatgaattctggagatggaaaatggtggtagatgcagaacaatatgaaataaataccactgaaactgcacttaaaaatggtaaagatagtgaattttgttatgtgtattttacaacttttttaaa

SEQ ID NO: 12593 - DNA, 1760 bp, Homo sapiens
tgcaccccaggaacaaagcttacttaattatggtgaattaacattttgatgtgctgctggattccatttgctagtattttgttgaggatttttgtgtctatgttcatcggggatattgttctgaagttttcttttttcattgtatctctgccagattttggtatcaggctgatgctggctccctagaatgagttagggaggaaaccctccttgatattttggaatagtttcagtaggattggtaccaatttttctttatacgtttggtagaattcggctgtgaatccatctggtcctggactttttttggttggtaggatttttttttttttttttaattactgattcagttttggaacttgttatttgtctgttcaggttttcacttccttcctggtttaatcttgggaggttgtgtgtttccaggaatttatccttttcttctagattttctaatttgtgtgcatagaggtgttgatagtaggctgaatatcttttgtatttatgttttcactattttaaatcggtgctgtgacaaacttgaacatgcgatatccctttcccacccgcccacaccattttgcatttccttagggtagatagatgtctagaagtggaattcccaaaccaaagtctgtgaacccttttctgatatctctgttgtaccagtaccacgaataatgtgccacatctgtttttagtgatataattatctaaaatgtttgcttttgatcattggttttagaaaaatataattatatttgcatttctttgatttctgggatgttggtcctcctcccacccccattatccccacggattgctaaggaggagactttgactgctccctgaatcctggcatcttctttttttaattttttctgatatttggtttttatcaagttgttatataataaaaaaaactagataagttgttttggtgatccatctctttttatattcattccagcttatttttcaatgctttgtaatatattttaatatctagtgtggcaaaacacttaatttttttctaataattttgatattcttatatatgtatttttaattctactttagtaaatggcaggcaaaaaaatgtagatctatggacagtagtagagtttatgggaggaaaattgcggatgatcctttcagctcactagaagtctctatttttttcttcaaaactggtctccctgctataaaatttgaactgtaggtatgtcagtatatctataagagttgcctccgtaattgaaatagacttcctgttacccgttgtctaggttgtacactgtaaagagcatcttttttttttttttttgtaggaaaaaatggttttgtacatgggatgaaacaatgtaaactcaaaacttacagataagggttagttgtatcactcatctctttgaaaagtttatatgaatatccagtcaaaaccaacaaggtatcgcccttgaaatgttatctatatggatttccaaggagaccataggactgtatactgtcttggaatgtcctcagaaggcttagagagcatcttgataaaaggttatgtggtttatgatagagtgtattagtttatttgtgttattaccaaagatgaacttatggttaaagatgaatttaggattaacatgacgaggaaagagtgacatttagctgagggtattaagtagatgtctcagatgaactgacactaaaggtaattagctttacaaatagagagatgagagaagagaaccacttcctaggta

SEQ ID NO: 12594 - DNA, 1167 bp, Homo sapiens
gctgcatccatgttgctgcaaagaacaaggtctcattctttttttatggctatacagtactccatggtgtgtatataccatgttttctttatccagttcaccatcagtgggcacctaggttgattccatgtctttgctattgtgaatagtgccgccataaacctatgaatacatgagtctttttgataaaatgatttgttttcctttgggtatatacccagtaatgggattattgaattgaatggtagttcagtttttagctctttgagaaatctccaactgctttccacagtggctaacctaacttaacttatattcctaccagcaatgtgtaagctttcccttttctctgcagtcttgccaacatctgttattttttgactttttaataatagccattctgactggtgtgagatggtattttgttgtggttttcattgcttttatctcatgattagtaatgttgaacatttttttcatgtgtttgttggctgcttatatgtcttcttttgagaaatgtctgttcatgtcctttgtctacttcttaatgggattttttttttcttgtggatttaagttccgtatggattctgaatattagtcctttgttggatgcatagtttgcaaatcttttctcccattctgaaggctgtctgtatactcttgataatttcttttgccatgcagaagctctttagtttcattacgtcctgcttgtcaatttttgttttctttgcaattgtttttggggacttagccataaattctttgccaatgctgatgtctggaagagtgtttcctgggttttcttctaggattttatagtctaatgtctttaattcatcttgagttaatttttgtataggacaaaaagtaggggcccactttcattcttctgtgtatgcctatccagttatcccaacatgatttattgaatagagagtccttctcccgttgtttatttttggcaactttgttgatcagacgatcagacggttgtggttgtgcaactttatttctagattctccattctgttccattggtctgtgtgtctgtttttgtatcagtaccatgctgtgttgcttactttagccctacagtttagttttaagtcgggtagtatgattcctctggctttgttctttctgcttagggttgctttggct

SEQ ID NO: 12595 - DNA, 1051 bp, Homo sapiens
gtgcctctgtgtctggccagtatgtcagtttttaacgaacataaatgtggaaattttttgaagtgaaggcaaagtgattaaaactttctacctgggtgcagtggctcacgtctgtaatcccagcactttgggaggctgaggtgggcagatcacctgagcccaggtgtttaagacaagcctgggcaacatggcaaaatgccatctctttaaaaagtgttttaaaaaattggccagctgtggtggcacatgcctgtagtcctggctactcctctggaaggtaaagtctgcagtgagctgtgattgtgccgctgctccccagccagcgtgacagagttagagaccctatctcaaaacaaagcaaaaaccaagaaaccttcctgtcgttccatcttatttttccctccctttttttttgttctacttggagcgttttagttttaccgggagttggcagttttcttaattttatgtataattgtcttttgtttcaattattttatgttttttcctttagtggatgtttttgtctgactcttttagcttgtttcttatcagtgatactgtttcctatctgtatggtctcagttattagttttagaaaattatttttaaaatgtgagaatgtataatcatataaaaaatgtacaatgtacgttctctaacacagtggttactattttcaaatattatcttggcttttctccaatatgttttgtatttttgtttaagatcctttttatgttttttttaaggtaccaaataattgtggctgttacttttagtgtttgcaaaagatgcttaaccatttcatgttgtttgataattattacttctcatttttcattattttgttttaaaaataatttcaacttttatttttgattcagggcatacaagtgcaggttcgttacatgggtatattgcgtgatgctgaggtctggggtatggatgagcctgtcactctggtagtgagcatagtatgtgataggtagtttttcagcccatgcccccatttgccaaccccttctagtcatctccagtgtctgttgtt

SEQ ID NO: 12596 - DNA, 1040 bp, Homo sapiens
acattccagtttaggcattcaaaccactactctacactgtctccatgaggatgagatgttaaaaagtcaatgttactgtctgcactctataaacaatgagtgagatattagaaaagctcatcaaaatgcgatttaaagtacattgaactggttttactacattaaaagattgcagtatataaaatatgtaaggtaggacatgttgctcaaaatgaattaaaaatcaagatgctaaaaaaatttaaaacatttatatgggcgaggcatggtggctcacgcctgtaatcccagcactttgagaggctgagccgggcagatcacaaggtcaagagttccagtccggcctggccaacatggtgaaacccggtctctactaagaatacaaaaattagctgggcacggtggtgcatgcctgtaatcccagctactcgggaggctgaggcaggagaattgcttgaacttgggaggcagaggttgcagtgagccaagatcgcaccattgcactctagcctggcgacagagcaagactctgtctcgggggaaaaaaattatagattttttgaataaataataaataaaaataaaataataaatattttttgtctaccttttttttttctttttttttttttgagacggagtctctccctcagttggcccaggctggagtgcagtgttgcagttgcgtgatctcaagctattctcgtgcctcagcctccggagtagctgggaccacaggtggtgtgagcttccacgtccaactaaattttgtatttttagtagagatgggttttcaccatgttggccaggctggtctcgaactcctgacctcaggtgatctgtgcacctcggtctcccaaagtgctgggattacacgtatgagacaccgtacccgtgcttctctaccttttaataacacatttttgtttctttttatgcatttgttagtgtaaatatgttcaagaatactctacattttgtgtacatgtttgtaaacaagggaaaaggacccaaagataatttctctttcattgtattct

SEQ ID NO: 12597 - DNA, 1150 bp, Homo sapiens
cgcatgcctgtaatcccagctactcgggaggctgaggcaggagaatcgcttgaacccgggaggtggaggttgcggtgagccgagatctcgccattgcactccagcctgggcaacaagtgcgacactccatctaaaaaaataaataaataaaaactaaaaaattataataggcgcctaaaaatatagtttaaaatgctccttttaattcggcatgaacctgttccgccaaaagatggcctgttgctgggaaaaattaaaacaaactagaaaacataaacggttcaaaaagccctccacacgcaaaagtataaaaaggcgggaatttcctcatttcaaattttggttagaaattagagtgtcatcagttgccctccagggagcgctctgagactctgctgcgagtcatttcagttaataaagcgggaaaacgctcgaacttaacctatagcattttggggccacccctccagagctttcgaaagggcacggaagtccccgtctaaacgcccgctgcaggcggctggtggtccagggaagcggcgtcgactgcgtgcaaaacaaccgccgccaacgcaactccacacctcccagacccacacgtcaaagaacgcgaaccccgcggccccaacttctggcctctccgctccggcgcctgcagccccgcggggaaggggcgacgcgagggggcgcagggacagccccgcacctgggaggcccgagggggcgcccgggagggaggggctgcaaacggcggcgagcgcgcgcggcaaccgccaaacgcccgcctttgtagccccggccccgcgtccttaccctgccgacggctgctcggctccggcccgcggcggcggccccagagccgaggaccggggtgggctcgcgctcttcgtcactggagaagtccgggggccccttgctgttggtgccggcggggagcggcggccggttgcgagccgtgaggtgctgcaggtagagctggacgtacacgtctttgcgctgctccccggccggcagcgtcacattgttggcgaccaactcactcttcaacttgtcttttgtcaggaccgaggggtcttccaggaactccggcatctcggggatctgcgaagccccctccccacagcctttgccgccgccgctcacgccggcg

SEQ ID NO: 12598 - DNA, 1053 bp, Homo sapiens
ctgcatattctgggcactttattttagggcttaggttttttttgttttgttttgttttttgagacaaagtcttgctgtgtcgcccaggctggagtgcagtggcacaatcttggttcactacaacctccgtctcctgggtttaagcaattctcctgcctcagcctcccaagtacctgggattacaggtgcctgtcactacacccggctcattttttgtatttttagtagagatggggtttcaccaggttggctaggctggtctcgaactcctgacctcaggtgatccacccacctcggcctcccaaagtgctgggattacaggtgtgagccaccacgcacggccactagggcttagttttaaatagtaaaaggagagaattatatcaataatccctaagatgccttctggctttaagtggttttatttacttatttaccctttttttaatataaaaaaaagtagaggtgagggtctctctatgttgcccaggctggtctcaaactcctgacctcaacggatcctccgtccttggcctcccaaagtgctgggataacaggtgtgagccactgcgcctgatctaaatggttttaaattatacagatcaataaaatttccaggtcctttaatagaattcaaagaacctagctgggtgcagtggcccacgcctgtaatttcagcgctttgggaggctgaggtgggtggatcacgaggtcaggagatcgagaccatcctggccaacatggtgaaacctgtgtctctactaaaaatacaaaattaggtgagcgtggtggtgagcgtctgtaatcccagctacttgggaggctgaggcaggagaatctcttgaaaccaggaggcaggggttgcagtgagctgagatggcgccactacactccagcctgggcgacagagcaagactccgtctcaaaaaaaaaaaatcctttagcaagtttttagaaagcagattggacctagaaatcatattcttgaaccatgttgctgtgcttgtagatccaggcaatgtttaacattacaggacagcatctaacctcata

SEQ ID NO: 12599 - DNA, 1049 bp, Homo sapiens
agtgagactctgtctcaataaataaataaataaataaaaataagcctgtggcctgttttgagggaaaagtaacataactctgataattaattatgataataactatgatagttaaaaatacgtcattttaaagatttcccaaaccacaccactaaatttgttttatgaattgattttattttatttgaaattatataatgtagtcaactgcaatatggaagtttgttcttgtttctttgtcaataaccttaccagttttataatgcagtttttgatggaattaaacacaaagaacttgaaagcagtcagttacaaaaaggtagttgtggtcaagtagttttaatatgtaaatttgcaagtttttggagaacccccaaactccttctccactggagttaggagggcctgtggtagacagcgtgaatcatgaaaataagcctggagagttctgttattaaggggcatagcattaatttttgcagtcttaaaattacacttcttgacttctgaatgtctcttatttgcgtgcactgacaaaattctatttgtttacttttatattaatggtaataaaatagattataaagtaagctggaactttgttgttttaacctccatcctgtcaaggcaaatgtgatctcttatcttatatcctttacgtttaaatatttttttctcaccgatcaccacatttaatatgaggttattatgaacttatatataccatggtaatggttactgaaagtaaatggaaacaaggtggctactgttctctataatgacacaagggaaaggaagaaaactgcacttctacaagtataacatgagaaaactattaaagtatatatgcgtttgtatgtatgtatagatatctagatagatatatcctgtatttatgaagaggttttcctattaagaaattattagagagatttagatgtacttaatttgtctttctctctttcttccattcatttatttaacacagatgcttaaaatttcaaaaactttcctgtgtatcaaatattaaattacattgttagtctttt

SEQ ID NO: 12600 - DNA, 1050 bp, Homo sapiens
actaaacctttgctcatgtcacaaggtaagcaaggacctatgcttggcaccagggtgggtaaggatgttgtaaaaatagagatgaaatggagcatctaagtccctgcagccccatgcacaggatgagcatataatcctccagaagagaaaagccatggaggaaaattaagtatccctcacaaatgccaggggattccatggatggtgagtgtaagggatttggggaaggagctgcaaaggagttggtattttcacatagggctcaaattggaatctgagccaggcgtagtggctcatgcctgtaatcccagcactttgggaggccaaggcaggcggatcaccttgaggtcaggagttcgagaccagattggccaacatggcgaaaccctgtctctactaaaaatacaaaaatattagctgagcatggtggttcatgcctgtaatcccagctacttgggaggctgatgtatgagaattgcttgaacctgggaggcagaggtttcagaagtgagctgagatcataccactgcactccagcctgggcaacagagtgagactctgtcccaaaaaaaaaaaaaaaaaaattggaatctggttgtagctgttgggggaactctaacataccattagaagaaatcccaggggcaagaaacttcatatatatatatatatatatatatatatatatatattttttttttttttttttttttttttttttcagatagagtctctccctgtcatcccagctctcactctgtcatccaggctggagtgcagtgttggaataacagctcaacctcccaggctcaagcactcctcccaactcagcctcccaagtaactgggactaacaggcacgccactgcacccagctaatttttttttctttaattttttggagagacggggtcttgctacattgcccaggctggtatcaaactcctggcctcaaatgacctttctgcctctgcctcccaaagaattgatattacaagtgtgagccactgtgccttgccaaaacttcacatatttaattaaaagctattga

SEQ ID NO: 12601 - DNA, 1037 bp, Homo sapiens
gctctgcccacatgagggcccagttcctcccctgtaaacacatgcagtagtgtcagaggtgcccaacataggtgtgcctccctcctgagaccatccatgatgctgctttaggaaaacagaacctgactcttgatatttcagacctttgacctgaaatacttaggggaaaaacgtattgactagatcatgccattaataaagtggtggaatgtcattcattccttggctgttgcttcaaaagcgactccccacccccacagtttgtcttgtcagtatttcacaattttgaaaccaaaggttagccacagaacatggtatttatttcatgatgtatttccattcaggaacccagtggtaatcacactcctcctcagttgtctccatcacttagccaaagcacttacaccactggtggctccctagacgttcctcacattatcatgcagggcgatgcaaggaggagaagaaatgaaaactactttgatgatattccccgatcaaaactggagaggcagatggctcaggtaaggtgttataagcctttgtgatatttttcaaccatatcaggtaatgccttttaatagtgaacagtagcttcctatggatgcttattgtccgtgcctaactagaatttataccatgttatgccccgcctttcattccttgctcatctgaactagaccgagacagaaatgtctgggaatggaatgtgtacacatgtccttgttatgcattcctgctgaagaaattatgtctgatctcattgcacccagaaagtctttgccctgaagggaataatatagtgtcaaagtcaaatcataatgaaaatgagtaataaaagtctagattacaaaatgtaaattggttggataatggggcagaagtttggggggaaggattaaccctgtgtgatgtggttaatttcctcccaagtctatacattcatacagaaatgctctactgggactagttgcgttttctcatattgtcaccttgactagttgaaaatgatgatgctttctagcacaagtaattga

SEQ ID NO: 12602 - DNA, 1031 bp, Homo sapiens
taccagagctgcattaagaggttcaaaaaagcacattggtattaaagattctgtgaaaccctgaaggagaaaaaaatcaatttattcttatttaatgcaagtttcaaatttatttgaccatgtagacctttctggttccaggaatatatattaacatcacacaggaacaagtatgtaataacaattagtttagcaatgaagaaaccatgagactgcttccatttgatgttatttggtattatcaaaaacccaaagacagatgaaatactatttttctaaccctttgtaagatttagtaggtacagaacagggaggattatattgttcttgtctacagcagcaattccacacagataagcttttggtcttcgccgcttgccactcctcagatttgttcccttccacaaacacaaaacttgttttgcaaagacaaaaccaaaggtattattaagtattctgagcatcctggaattaaatgatgtcatttagtgggagcttttcagaacacaaggaatgactgtactgcatttcaaacaactcatgaaggaaaacatctcttcttatacaagtgactatgactaaagaaagcttgttcctcatgaagaattctcagaggtggagctgcagggctgattggaaagtgctgcctaccagagcagggaaattgcaaagagctacacacagaaccagaaggagcttgttgtgttagtttgtgtttccccctggtctcttccctggtctggagaaccacatcataatggggagaatgcagagagaggccagaggcaggtgtcgcctttgaaagctgagaagaccgaggttggtaggtttcttccaccatgggactgagctctgtcaggcaacccctgagcaacacaatatagatttagagcttgttaagatcaaatgcacaggtgtgttccttcccagtaatccagagaaggctctgagtaagtataatcagggacaccaatctctttcaggaaaaagtgcctccttaggctttccattaaaaaatagagttttggttc

SEQ ID NO: 12603 - DNA, 1022 bp, Homo sapiens
ataagcttttatttgcagttctggacaggcagtacctcattctctaaaataaaatgaccattatgatgaggtgagcaagaggacattggtttatacacagaaaagggctgaggaaagcaaaaatagaaaacaaaaagcagactgattgtttaaatgttactttccttgtaaaggataaagtaaaggggaatttctaatcctgccagctaaaactggcttgtttagagatttggccatcatctcgcactctcttggtttcttggaaggtcagaaaaacaacttagattttgcttggtgatgtggaactttagcatgagtgactccattttggtttgtttttctttttggggggggcctggtacaagagctcagtggtatccaatggcctcctatacattatctttaacactgattaaaataaaataatgcatctcctttggggtaaacataatccagaagggtactcatttcaaccacaaacatttctaaacactctctgtgtgaaaagaacctaagacaactttactgccctcaagaaaatcaagggttaaattagaaaaatggcttgtatccaaagaaaaataatataagacagtgtgacagacttccacgggctaccctcaataaggctttaggagtttctttgccttagcaacggcttatcaaagtcaagcactgtgtcacctggtaatgcaaacccttccagcatctctgcctttaggttttaggggggaatcgtcaaaacagacatgcagcccactacaaagtacttgaaagcaatagggcaccattcaagcacacgcctgcatttactgggctacgtttatttagggcattcaggtggctgtaattattgtgcataaatagttttctaaaaagcataaaactaaaaacttgatccatggaaacacagtgtggttttaggatggagatcggatttcactcacctcaaaataactcctggtgtttgcctccaagacccattaatttatgttatctcttgctctgtagcagtttggatt

SEQ ID NO: 12604 - DNA, 1052 bp, Homo sapiens
taaaattgggtaaagacttagtttgcatggctacataattttccccaattgtgtttgatcacttgggtttagtatagaagaagccagtttgctcagttgacccaggcttaattcataataattgatagtctttgggctgtgatcatgaattctaaggtaaaggagtccagaatttaaagggaaattttgtggtttttaaaaaatgattagaattgggatgaatatagatcaaaacagtttctatgtaattttatatgagaccttatccactcagccccacagaattgcccccaataagcgccatagcaggtagaggagagcatcaacataactgttacttcttttctggttaggtaaggaaatagtttgcattttttcctctgttgattccattaacccatagtttaggttttgcatcaatcctattacttccaagtctctcaactgctatgactagtcccttgtgactcatacctagctatgcatttcccccttagggccaactaactgatctggagaactcagggaagttactgacctctcttggagttactgatgtattccctttgttactaaattctttagtgagtaaaggtagaatttgcaaacgtggagacatttcttgatgcacacgagtcttttagagaccctcaaattgatcttggtgggtaaataccctatagttctgatccattcaataagcacttattgagtacctctgatgttctaggcattgtgctaaatattgcataaggaacagagcaaaaggtataagtgttgacctttaggagcttagaatgtgttaaaattaaggataataagggcaatgaacaagataagcatagggtgctctgggagagtagaaggggaggaatgtgaatgaaggaaggcttgtgggaggaagtgctacatgatttgctagcctcaaagaaggaggagttagatagatgaataaggtatggcactccaggcaaggggcagtgtgtgcagagatgcagagagggtgaaagaacagagtacattcagagactatgcccacttggcatggttag

SEQ ID NO: 12605 - DNA, 1038 bp, Homo sapiens
gaaatatgggagaccaaatctatgacccattggcatctctgaaagagagggagagaaagcaagaaacctggaaaatatatttgaggatatcattcatgaaaatgtttccaacatcactagagaggtcgacattcaaattcaggaaatgcagagaaaccctgtgagatactatgtaagacaaccatccccaagacacacattgatcagattcttcaaggttgaataaaagaaaaaatgttaaaggcagctagagaaaagggacaggtcacctacaaaagtgaggtgagagagttgaacatctcacttacagtgttgtaccattgagacagaaaactaacaaagatatttgggacctaaacttgacacttgactaaatggacttaatagacatctacagaactctccactccaaaacaatgtaatatacattcttctgatctgcacatggcgcatattctaaaagcaaccacacaatcggccagaaaacaattctcaacaaattcaagaaaacagaaatcttaccaaccatactctctgaccacagcacaataaaaatagaaaccaatactaagaatatcactcaaaactgtacaattacatggaaattaaacaacctgctcctcaatgacatttgggtaaacagtgaaattaaatcataaatcaggaaattatttgatactaaggagaacaaaaataaaacatatcagaatctctgggacatagctaaagcagtgttaagaggaaagattatagcactaaatgcccacatcaaaacgttagaaagatttcaaattaataacctaacatcacacctagaggaactagaaaaacaaaagcaaactaattccaatgttagcagaagacaagaaataaccaaaatcaaagctgaactgaatgaaattgagacatgaaaagccatgctcccccccaaaaaaaatcactgaatccaggagtttcttatttgaaagaataaataagtttgatagacccactagccggaatactaaagaaaaaaagagagaagatccaaataaacac

SEQ ID NO: 12606 - DNA, 1029 bp, Homo sapiens
ggttgtctctcgtaaggtacaccacaacagagtaatgaatggagcatgccaaatattctcccttattgaagtgttgcaatttttgccaagacagagttgttttagtgggtatcttttaactgaaaaaaaatttttttttgagacggagtcttgctctgttgtccatgctggaatgcagtggtgcagtctcagctcactgcaaccgccacctcccacattcaagagattctccagcctcagcctcccgagtagctgggactacaggcgcgtgccaccacgcccggctaattttttgtatttttagtagagacagggtttcatggtgttagccaggctggtctcgatctcctgacctcgtgatctgccagcctcagcctcccaaagtgctgggattacaggcgtgagccactacaaactgaactttatttctttggtgtatccttcttaaaaaatggagaatttattcagaattacataagcagctggagatttgactgggtcattttgatcactagtaggagttaactgcaattcaacagtgttctcagcagcagacattattttacttcaaagtcctagtagttttaaaagagaatctaattacaagatattttctgaaaagcatttggaaattgtttcccacttgtgcagttttaaataatcacatccctttcctctcctccaaaaaagtcctcaacaaatcatatattatttaggctatattatttgctactttcttgagcagccttaaggaaaaaaaacaaaaaaataaaaaaacaaacagtttggaggaggggcaagtggtactgcttttaagatctaagtcatgtcaattttgtaatggtgcatggccctcctgatcacacctctgtggagcaggacctagaaacggagatgaggccagaaactagaaattaggtctaggctatgaaagatgtaggagcgcaaaagtgtacttagaagaaagctaaagattcacttttataagccctttgaaatattttgaaaactttttgttaaagaacctat

SEQ ID NO: 12607 - DNA, 1024 bp, Homo sapiens
cacaagttctcataggttgtggtggtcagacagtgcaattaattatagggctagctaaaagggaaaatggaaagtttctattacagtgaaataaattgagttgaaaaatagtcgatgggattttaaaaagccccatatgttattctatatactcgttgacagtgacattttattggaatgatagttcatgtcagaagaatgaatatttatgggacattttttcaataggtcatagagatgacttgtgtgtactcccttgttaaataatcttctctttcaaacacaggtagacaatgtgtgcatatttcagattgcagctctaataattgcctgtagtcacatgtagtttatgtgaaagcaatttatctctttacagttttaagttacacgtaaaataacaacgtttgctgtggatccatcagttataaaaatgattatgtctaaaaactggtatgctgaaagaattttctcaaaataaacaatttcttcgggaaaacatgaggaattatttgagaacagtgagaatttcacttaattttattgtgataaatcgtattttaaaaacactccttgtgacaaaactcaaaagcaaacatcctttaaatactcctttcccagctgtgatttttttttttttttttaaagaatagatgtcaagttttagggataaaacaccaagtatttaatgttagtggacactaaagtatcaaaatagtgacccacagtgtatatcttgagtgagaggttttctcttttgctggtgtagtagtagtagtagtagctctacaacaaagattgcacatagaaaacaaaagtaaacaacatgtgtttattagagtacttcgaaccaagttgtaaaaatcacaaacaaaaccaataacctttaaacttgcttttatccatcttatactgaatagtgtctgaagaaaatgagagttgaaattgtattctttgggcaatcatttgcataaaatgacattcctaagaaggcacattttatttagttgtcactttatttcaaaaa

SEQ ID NO: 12608 - DNA, 1058 bp, Homo sapiens
gttctttaagaaatcacactgttttccatagtggttgtactagtttacattcccaccagcagtgtaaaagtgtcccttctcaccacatccacatcaacatctattattttttgattatggccattcttgtgggagtaaggtggtgtcatattgtggttttgatttgcatttctctgatcattaatgatattgagcattttttcatatgtttgttgcactgtatatcttgttgcatttgcttttgggttcttggtcatgaagtctttgcctaagccaatgtctagaagggtttttccaatgttcccatctagaatttttatggtttcaggtgttagatttaagtctttgatccatcttcagttgatttttgtataaggtcagacagatgaggatccagttttattcttctacatgtggcttgccaattatcccagcaccatttgttgaatagggtgtcctttctccactttatgtttttgtttgccttgtcgaagatgagttggctgtcactatttcgctttatttctgggctctctcttctgttctattgatctacgtgcctctttttataccagtaccatactgttttggtaactatagccttgtagtatagtttgaagttgggtaatgtgatgcctccatatttgttctttttgcttagttttgctttggctatgtgggctcttttttggttccatgtatttggtcccctatatttcgctcacctctctaaatttgtctcagcttcaggtaaggtcaaatcctcctgtgatctggaccttcaggttacccagtgaggatgcgtgtttcaggggcgatgttccccctctcacactatgagcgctcacagtttttcagctgtcttacggagcctgcagtggcaagccgcttccttcaaagagtctgtggattctccctgctttcctggcatatttctgcgttagcaaaaggccatgatgtaggtctccatatgctgctctgtccattcaagagggagctgctagttagtgctgcctcctatccaccattttttcaacaatcattatcctttatatgta

SEQ ID NO: 12609 - DNA, 1046 bp, Homo sapiens
atgtcacgaagtcagataaaattatggcatcttaagggttggaaggaaacagaagttctgttgctcagcctcacaccaaagcaaatccagaatgctcacaacagggagtcaccaaattacagctgaagttcttaacaagaaaacatactaccccataaacctttctgttttaagtagttctagtttgaccttttttctcctatttgtgaattaatgtagctccccattaccacacttggtcctaggtttttcattcacattacagaagagctgttatatctcatgccaagtcttcttttttctagactttacatccataatcctttattcctcaaaagacatggtttccaaagccttcaccattatttgccatttagatgtgccccaatttgctaaagttccgcttaaaatgtggtcacttgcataagttagcatgcttctgtctacaagtaaaggaaaagccaactaaaagtgttaccctattcacataaggaaacatctggcgatggggtggttccagatgcttactgatgatgacggaccctagctctttctgtctttcatctctgccatcctcaatgcaggggatttttatcctcatgttcatggttgcaagcagcttctagcaaaacctctttaaacataggcacattcaaaggcagaaaaaactcattttcctcacacttttctttttaagtaaatctctcctttccagtaatggctcagttgacttccctttacatgtcactgtacctaaatgcatcacattccctcctgaaccatctggttaagataaatcaccctgggctgggcgtggtggctcacacctgtaatcccatcacattgggaggcaaaggtgggtggatcacctgaggttgggagttcgagatcagcctgagcaacatggagaaaccccgtctctactaaaaatacaaaattagccggttgtggtggtgcatgcttgtaatcacagctacttgggagtctgaggcaggggaatcgcttgaacctcggaggcgaattttgcagtgagcctagatcgcacc

SEQ ID NO: 12610 - DNA, 1052 bp, Homo sapiens
ttggcaggagttacagcatataccaaagcaagagactgaaccacatatatatagttctttaaaaaaaagtcaatcagataaatcataccttcttccctgggaagcagtgagaaacaggaccaaaagaatccaagaggactgcatgactgaagttcctcctcaaaaataggaggaatctccccaacaagatactgaggttagaattagcccctgaggcaacagcatgaataatatgggcattcctttttgggatcctcccctgtgcctgtgcccagtagtagacttcagtagggtttgcatatagactaaaatattgagggtagattatgcagctgctaagcccccaggaagggaatgattccctatctagttaacaaacttggtgtatctcacccagaagagcaagctttcctttcccacagtcactagaggtcagctatggcaaatagaaacagcatttataggcaagaaaatgggataaacatgaacaagaaaataggaaaatacaagacattcaacaattctgaaacatttgaaaataacagtactaatcagcttttataattataagctagaaatgctctctagctgattgagtagaaaaggagcttggcaaaagataattggaatgaattgaattgagagttcagagataaactcttacattcattgatctttggcaaggctggcaaaacaagtcaatgagggaaagaatagcgttttcacaagtggtgatggaatgactagatagccacatgaaggaagctgaacttcttccttatgcaggcatactttaaatatattgctgattgggttccagaccaccacaataaagtgagtatcacagtaaagcaagtcataaaaatttttcagtttaccagtgcatatgaaagtcatgtttacactattattatgtctaaaaaatgtacatagcttaatttaaaaatacttgattgctggctgggcgtggtggctcacgcctgtaatctcagcactttgggaggctgaggcagatggatcacctaaggtcgagagttcaagaccagcctggc

SEQ ID NO: 12611 - DNA, 1359 bp, Homo sapiens
agaaaagaagtttaattggcttttggttctgcaggctatattggaagcatgatgtgggcatctgctcagcttctggggaggaggcctcagggaacttttacacgtggtggaaggtaaagcaggagcaggcacgtcacatggcaaaagcaggagcaagacagagagtggcgcagggaggtgccacatacttttaatcaaccagactttatgagaactcactgttgtgagcacatcaccaagccatgaggtatctgcccccatgactcaaacacctcccatcaggctccacctccaatactggggattacaattgaacatgagatttagaggggacaatatccaaactatatcaggggccaaccataaataggaaattccaattcctagttgcttcccaggagcagggtcagagggagaccaatttccttattacacagtagtctctgtggaaggatctaaaatgccttttttgctttacggaactacagtatactatatatactgtattggctatactgtgaatataattctatagctaagaactctgtcctatttatactaacaatcttactcagtttataatcacctaacgtggtctaattgcaatgtttgagaccaacacgataatatatgatctattcttaaaaaataaaagatttctagatttatcatttataaattgttctggtttattttgataagtctgtggctttgagacttagttttatgtgaaaagtttttatttaactcagtgattcccctctgggaccaattttgccccccaggggacatttggcaatatctgaagatagttttggttgtcacaactggacagggatgctgctgacctctagtgagtaaagaccagtgatgccgcctgttaaatcctacaatgtgctggtcagttccccacaatgaagaattatctagcttaaaacgtcagaagtgccaatgtttagaaactgatttaacagttattttctcattatgcagttactacttactttacattcgatatacagtcatgtgttgcttaacatcattaactgtacttagatggtatgtagcctacttaaactcctaggctatatgtatggtatatcctattcctcctaggctttaatcttgtatatcatgttactgtattgaataccgtagcagttataacacaatggtatttgtgtatttaaaccttaccaaacatagaaaatatacagtaaaaatacagtaaatacagtataaaagctgtgttataatcttatgggatccacatcttataagtggcctgtcattggcagaaatgtcattatatggtgcatgaccatatgctccagctttttaaaagactttaaattttag

SEQ ID NO: 12612 - DNA, 1027 bp, Homo sapiens
attgtgtcatttgacttatagttggcatcttttactttagagatttgaaaggaaaatccaaaaaagttagaacaaaccaaactaagaaaatgaggtggtcaagattaagtagtaagaatgagaatggagaaagtgttttctaaggccttacattcctcactattccctgatagaataaattgaatgattttatttaggaagaaaaccttttcaccaaaatatctccttaatagtacaggtctgtaatcactattgtgaaatccaaaaggctctgaaatattataagtttgtgaaaaactcatttggtggcaaaacctgacttatgccaatacttttttttattctttgcctgcttcctataaatatttatgttttgctgcagaattgctatttttattagtgctgcctcagaacctgctgagagtgttgcatggtatatcctgtatataccgtatcatattactgtcgtgaaatctaaacatttctgaattctgaaacatttggctttccaaaggttttacgtaagggattgtagacctgtgctgaaaattctactagttgagataaattggattttacaaattaatatagggagtgtatacatagctatgtctcagttagtatttttctttcttctgattgatttgcccattttgttttaaaatttgatttttatgttcacgttataccaatttgtaatctacttttgattttactatagctgtgtgactttggacaacttacctaacctaacagacttttaataatttcccttttttttttttttttttttttgagatggagtctcactctgttgcccaggctggagtgcagtggctcaaactcggctcactgcagcctctgcctcccaggttcaagcgattctcctgcctcagcctcccaagtagctgggactacaggggcgtgccaccatgcccagctaatctttgtatttttagtagagacggagtttcactatgttggccaggctggtctcgaactcctgacctcgtgatccacccgcctc

SEQ ID NO: 12613 - DNA, 2030 bp, Homo sapiens
ttgtaacaatatctgtatattgtaataaaagttatatgaatgtgatctctctctttctcaagctatcgtactgtaccacaggtaactgagaccgtggaaagggaaatcttgggtaagggaggactactgtatatagcaggtgtctttctctttcatattaatttccaactaaaaccggatactgattcttgttgggtgcttggtctaggagatgttgcaatattagcatactagaatcctggaatcagaagggatttgttcctatctcagagaaggaaattattaaaacattgacatttgtgacttgtccaaggtctcacagatagtgttgaatggtaaagtcactgatccagtacccttttcattgatttttctgtgctgcctattaaggtgtttcctactcgcccccaccccacctcaacagtttgcttttctttttacccagttttcaacactactcttgttttaccatcctgctgtagtatcccttaggagattcttttatgacttgagaatcatttgactctgcggtcctttgaagttagaggaacataatgttttgactcagcatttcttgaaagttgggggatgtctcaggccattttatgttgctataaaagattatggggctgggtaatttattttaaaagacaggttttatttgtttatttatttatttatttttttgagacacagtctcactctgttacccaggctggagtgcagtggtgtgatctcggctcactgcaagctccgcctcccgggttcatgccattctcctgcctcagcctcccgagtagctgggactacaggcacccaccaccacccccagctaaatttttttatttttgtagagacagggtttcaccgtgttagccaggatggtctccatctcctgacctcgtgatctgcctgccttggcctctgaaagtgctgggattacagatgtgagccaccacgcccggcctatttatttatttttgagacagagtttactctgttgctcaggctggagaatagtggcacaatctcagctcactgtaacctccacctctcaggcttaagcaattcttatgcctcagcctccggagtagctgggattacagtcatgtgccaccacgcctggctaatttttgtatttttagtagagatggggtttcaccgtgttggctaggctggtctcaagactcctggcctcaagtgatccacctgccttggcctcccaaagtgctgggattacaggcgtgagtcaccacacccggccaaaaaataggtttatttataaagaaaagaggtttatttagctcgtggttctactggctgagaagttcaagggcatggtgctggcttccagatagggcttttatgctgcatgacaacatagtggagaaggtaaggggaagtggacacttaaagagggcagagcctgagggatgtcttggctttataacaacctacgcacgtgagaactactttattttctgtgagaacttactactgcaagaacaataccaagccatttatgaagaatctgcccccatgacccaaacacttcctacctactaggcgccacctcccaacactgtcacattcgggatcagatttcaacatgaattttggtggggacaaataaaccatattgagactctagcgggaaaacataatgtctttttttcttttctttttttgaataattttccttttttgcagtattacactttgctttagtactgcagtttaaacactttttaaataagttgatctcttatcaattacatgtgttttaaattctgcatattgtatgcttaggacaaataatttttttaacagtgggtgtggctgggcacggtggttcacgcctgtaatcccagcactttgggaggccaaggcgggtagatcacctgaggtcaggagttcgagaccagcctggccaatatggtgaaaccccatctctacttaaaaatacaaaaaattagccgggcatggtggcgcatgcctgtagtcccagctactcaagaggctgaggcagg

SEQ ID NO: 12614 - DNA, 1419 bp, Homo sapiens
ggagagtagtttttcacatgggaatggaaacttctaaagagaagtcgtaacaaatgtgagaaaggaaataaaagcagaagctacctttcagctcaagacattagtgtgtgtgtgtgtgtgtgtatgtgtatgtgtatacacatgtacacacctgtgaacaggcgcttgcaaatcggcaaagtggacgtatatttaattaagccaggacctgaaaaggggtagggaagttttggatacagacactctcttctccttcgctcccttaggctaagggcatactgtgctctgcacaaggtttcctgggagtgggagttgactgggcagacattcacctcacctcggtggagtcatcgtatagtttaaagcagcagttgtcaaccagggtcagtttgtcttgaggtgacatttggcagtgtctggagatatttttaattgtcaagacttggaggggagggtaatactactgccatctagtgaatagaggccagggatgctgctagacgttctacattgcacagcatattccctcacaacaaataattatttgcccaaatgtcagtagttccgagattgagaaaccagcttaaagtgtacaggtgtgtgtcgtatgattgagctagggttctgtgctagtaaagttgttttgcctgcaaacatcagaaagctgatctatttaagtaaaaagggaaatgtaacagaaagcagaagaatatctgaacaaccaaatcaaggaaagaacaggaaccagctagctcctagaatctcattggaagagttcttggaccttcctcttaaagtagcagcagggttttttaaccttggcatcattggcattttgaaatagatagttctttgttgtgaaggctgttctgtgcattgtaggatgtttaatgtctccagacattgccaaatgtctcataggaggcaaaattactcctggttgggagctacagctttagagtgctggcctatcttccataattcccagtctttgatctctcctgtcaggtttcagaatcccctagagagaaagcctttgtgacccagttttgtctacccatggttcaattagcaatggcaaagggttgtacagcaaaaatatggtaatggagagggctattttgagttaggcttgttgctccattagtcatctgtaataggcagtgcactaaattagatttccaagggcctcatttgctacattaaggaaattgaactttatcctgggggtgaggagtgactactaataaaggtaagagggatatgctcattaaagcagtcttatttttgaagtctagggtttaggagcaatatctggggtggaaatacggagtctacaaatggactctgagtaacttaagtagaaaatggggccaggtgtggtggctcatgcctgtaatccaagcactttgggaggcc

SEQ ID NO: 12615 - DNA, 1038 bp, Homo sapiens
tggcatttgtctgctaatctgctgtagcgtttcatgtaataatacgggtatttctagtcggcaaatgaaactttattcttggttcttggcccgctgattgagggaactgcattctcacaagcatcaggtaacaccctcgccccgctagaacccaagtgagggtgcacattctttaactcgtttctcaccctccaaatgaaggtgcagattctttggcttggttaaatccctccacagttttctggggagcatacttcttgctcccaagcatcacaggcgctgtcctgtcttccataaccgccttcagttttgttccgcctctcttctacctgtaaatggtagaaaggactttgtcaagtcacacctattctgttgaactttcccaaggttctctagcccatggtgttgttcatttttcaactcgcagctcttagttatgccatgtctttgccaaataacagtgtggcatcacttctgatgttaactatttttttttgtattaatgtaacttgtttttaatcttctctaatggctctggatgggaaaaggactgtgctttttatcctacacaatacttggtgtacaggaagctttctgggaatattttgtgatgcattggatagagctttattatttttaaaagtgggttttttgtcaaaaatagttattgttttcagcttttttctcaatttcttgtactagctatattgcttcgtggagaactctgattgaagttggttatagtggtactgctgctgtacagtacttttcctgtgcgaggattacattgtcccactatcctccttactggccccttggtttttaggggtagtgaggggatcatgctaaaatattcctattctgctgattagaaaatgagattcccaaaggccgcggccatatttctcttattatttggtttatcttctgtgcctgcatgacacaatagtaacataactaaggacatagtaacataactaattacttgtttgatattgaataatatatttcattgggaggaaaaatatgcacctacgc

SEQ ID NO: 12616 - DNA, 1029 bp, Homo sapiens
atgaactacaaaaggatctggtaaaactgatttttaaaaaacaaaacaggccaggcatggtggctcacacctgtaatcccagaactttgggaggtggaggtgggaggatcacttgaggccaggagttcaagaccagcctgggcaacatagtgagacttcatctctacaaaaaataaaaagtttgttgggcgtgatggtgcacgcctgcaatcccagctaattgggaggctaaggcgggagaatcatttgagctcaggaggttgaggctgcagtgagccgtgattgtatcactgccctccaacttgggtgacagagtgagaccctgtctcaaaaaagaaaaagaaaagagaacaaaacaaaacacatagtcctgtgggtacaagtaagcatgcattagagaagggtaagttgattttcacagtgccatccaaacaaacttgcccctcagttcatgccattacgagatcttggcagtcatccatctggcctgtgtttcttggtgcccaaggagaactcagccacttttgccagatactggcctcactttgttagatgatgattttatgaatatggtgctctagtaacggcttgctcttcaagggacctaaagacagaggaccccctcccccaacccgctggctgcctactcactcattttgagccccaggtgtggtatcttcttgaaataagtgtttattatgaaaaatatctccacagtaagacagattcttcccttgaaaaatataataggcccacagacttgtttccatttgaaaacggcagtaaaaagtatactccctttatgccttttaggaataaattacagactatggaattagaaactttggtactttttatttaatatatgagattggtcattttatttactttatctgggaaagttacagcggacttctggatagccataagaggtaggaacctggctgatgtaattcccctttgattcgttaggagtatttcttagtacctacttgttgacttctttgtgaatgtcaagagtgcacccca

SEQ ID NO: 12617 - DNA, 1031 bp, Homo sapiens
tcgacatataaaggagacatttttaatgatgaaattatcttatatcctttgcttagggtgtaccagtgatggcaataagaaacaaaatgatatcagaaggactagacccagatcttcttgagtaagtaattcttctaatataatgatattattgccaggacattgaatttgtcagttataataaaaatatttcaaattctctgtatttttattcctacagtgttttatggttgaggatatcatctttgtaaatagtgtgtctgttatgttaccaaacagaaaaatatcatattctactaagaccagcctttacacattttaggaacagtttcaatagattagtaattattctagatatccaaaggagctggaatttaatgacaattttttttgctttttttttttttttcctttttgtgctacctctttcttggcttgattgtttttttgtttatttgttggtttgtgcttttttggtgggggggtgattattatgtaccagggggtagatgatttcatgtaagatcttagtttgtaggaaatttagtctgctataatctaggttaagccagattgagaaataaataggctaaagctgttctgggtctatgttaatggttattaagaaactagatactaatttatgtgagttttttttaaccttaaagtatttaatcccttattgtgtgaattttataaaatatttttgagaaatgataaaaaaaaattgtggctcagaaatttgacaacagtttatttcatccaagcaaatctggctgtatagttcatcttggataaaatatatcgtaatgcattcttcagaagaattctgttttgcaagtatctaggtacttgtaaagaatctttccaatttggggctgtagttcaccccaatgtatttagctgtgcactctaagcattcattactgtactagcagtatactttggaatttttcttggctctcagtcctccaagaaaatgtgtacactttggaggtaaaacattatgaagtagtctttttctcatattt

SEQ ID NO: 12618 - DNA, 1028 bp, Homo sapiens
tgcttgtgcagtgaatcctccaaggtaaacaagactcctaggtcctagtgaatgtgcctccaggccaaacccctggcacagaggctcagggtgggttctctccttgccaagccctgtctcagccagaaggaggggcttggaaccaccactgctgttcctcttaagagcagggaccccatccaagcagcagtaagcgtggggtgggtggccgcccctgctactgtgtgacacactgcttctgggtgaggactctggcgcagccaccgactgaagcagcccaggtccagggactgggtttttggagaggaccccatcatcatgttcccatttttctctcttacctcaaaatgctggaagccgattgttctccggtttatccgaaagtaggagtaagcagccaaggcaacagccccagtcaccaggatgatggcaaagaagatccctgctcccaagccagtgtgggtcaaggtctgaacacaaagaaaggaaaggggcccattcttaaaacttctgactccccaaaaggggaacccttggtggcccgaggcattctggagccagtggggataaaaatactgacatgttaacatgtatctggcccttattactgccagggtctaatacccttctgtgaaataacccattgaagtgtgataataacccaaagagatagggagagttattattgtgggagaactggggcacagagaggtgaagcacttgcccgatatcacacagccagtcagtggtggaagtgggctttgaacccagtctggctttggagcttctgtgcttaaccactatgctgtggaactctccagcagctcacctctcccctcatgcttttgcaaaaaagaatactaacaaccaccatcaccaacttttatatagcatgtactgtgtgtcaggggctgttctaagtgttttccatttctaacttacaatccttcccaaaacccaggagggaggcattatgagccccattttgcagatgagaaaattgggactcagagatgctacgaagtgga

SEQ ID NO: 12619 - DNA, 1045 bp, Homo sapiens
gctctgttgcccattctggagtgcagtggtgtgatctcggctcactgcaacctcttgcctcccaggttcaagcaattttcgtgcctcagcctcccgagtagctgggactactggtacatgccaccaggcctggccaagttttgtagttttaatagagatggggtttcaccatgttggccaggctggtctcaaactcctagcctcaagtgttctgcccacctcagccttccaaagtgctgggattctgggtgtgagccactgtcatgcctggcctcgtcatgactcttttctctttttttttttttttttttttgagatttagttttgctctttttgcccaggccggagtgcaatggcacgatcttggctcactccaacctccgcctcctgggttcaagtgattctcctgcctcagcctcccgagtagctgggattacaggtgcccaccaccacatccagctaatttttttgtatttttagtagagacggggtttcaccatgttggccaggctggtctcgaactcctgaccttgggtaatccacctgccttggcctcccaaggtgctgggattacaggcatgagccaccgtgcccagcctatcatgactcaactgggatctggcacactgcactgggtgttttgttctctgatgtgcacattgatgaatgcatattggtacaagggaaatgaatctgttttcagccatttaaaaaattgtgttgtaaagcaaacaaaaatagcttgaacatttaaaaattactgtttaatattgtttgactgattttctaagaattatgtgaacaatgatgagtccagggcagcagccatcacaaatatgacagtccagcaaggcccatggaggtccctttggaagggacttgcacagctgattttctttttccagtgttgtttttacgggtgaaacgtggcttttgaaatactttagttgtttggcttagagctcccactttccccctaacatagtgcctgtctgttttttaaaacattttacccttcggcactattttctgctattcccattaa

SEQ ID NO: 12620 - DNA, 1034 bp, Homo sapiens
ggcaaaaactagaaactgtaactgcccctgattgggcaggcatgatggggttgacttcatgtgggtctgagtgttgcttttggaaaagatacagataagccttttgatatttattttgtaccttacggagaataattctcccaatggttaagacaggagctagcagcccacccctccagcctttccccccatgcagggctgaaaggcaagcttcacattggaactctgattttgcctttttgtttactgaggtcctggaacatcaggtttcctgggataggtgagaccacttgatgccatgtctgtattctagcaggtcaagcttgaaacggttcttgactcctccatggaacatttcctgaacatttacgggctatgcattgggaactgcaggggcacagtgatgggcaaagattagctgcttccagaaggctgatttcgtgggctccacaatggtaaaacgctgctgtgagtggcagagaggttccccaggtgatggccagttcccaaatcatttggtactaaggctttgacattctggcacatcacatcaaatagaacacagcctccctggaaggacttaagtgagaaagaacaagagaagctgcaactcctggacccttttgtcctcagtgtgtggttcctgcgtccttccccagcatggaggagggcaggagagaggagatgagagctctggtcaaaacctgccagctagtggaacagccttctgtagagccttctgcaagaaacgagtgggtttgaagaaccaaaacatttgtggtaggtctcccaggagcttgttaaacctggaaacaccacctgagttggtttcatctgctcattggaagaaagaaaatgaaccaggaaaaagcatctttgtcatgaaatgctatgccatgccacccacccagttgaattggaatcctgttaaaacatgagatttaccagaaacagtcctttgtctagatggaaacaaacaagatcctggcttctctctaatgagttaccaactgagaggtgcttggattggccag

SEQ ID NO: 12621 - DNA, 1094 bp, Homo sapiens
gaaatttgactttcatgtaatttttacatgttaggaaattcttctcttttttttcttttgaggcagtctcactctgttgcccaggctggagtgcagtggcatgatctcagctcactgcagcctctgcctcccaggctcaagtgattctcatgcctaccctcctgagtagctaggattacaggtgtgcaccagcatgcccagctaatttttgtatttttgaagagactgggtttcaccatgttggccgggctggtctcgaactcctggcctcaagtgatccacctgccttggcctcccaaaatgctgggattataggcgtgagctaccacgcccagcctgtcatgaaattattcttcttttgagttttttttcccccaaccattgaaaaagaaaaacccatttgtaagcttataggctgatagaaaaatgggccggtggctggactgatgtaggctattgcactggctagattgtaatatctttctcaaacaagggcaaagatatgtagccaatctgttttgcccctaaagagctgattatgcccatgaacaaccactggagatggagatggctgaagtgcctgtaggatcagttctctgtggggcttcggttagtcttttccaatgttaagtacccactctagagtgcatggtttcacttgaaagattaatgatagctaatgaacacacactgtctttgaaatattttaaagtggatttcagaaccagaggctcttgttttatggagtttggccttgtagggggacagagctggagaaagggggttgggcaccaggagaaatcttcttttttcaatgggagagacttgagcatgtttaatggctgatgggaaggatgcaggcgagagggctgttcctatgagagagatgataaatggtgggaaaggttcatggcagggcagccagcagggcgccccagccagctgctgggtgcttcgtgggaggtaaggcccgaagggtggccgagtgaaggcgcagagctcagggtccccctctgggcatgcgtccctggcctctgattcctggggtctttctcctttacatgtcccttcaacagcctcagggttcagagtca

SEQ ID NO: 12622 - DNA, 1073 bp, Homo sapiens
attgcagttggattttgcagagctgctctgcaacacaggttttgcatcacgtgcagtaaatctctattacgtcttaatatcttcctgccactgtagccgtgggaatggggaagcaggtaagttttaggttgtgacagggacagagtgtgctgttagtatttagtgggtagggatcagggaacgctaaaatatcttttaacttgtgggacaggcctgttcaccaagagctgttctccacaaattcccacagtgttgagaatcactgcactagggttctaaaaaaattacttgtatttgtataataatgggcaagttttgaaacacttttacccccatgtttattctgcagctggtaagcaggtagtctgttcctctctgttaggtgatttgaagcatcagggtgtggtgccctgcagttaatgctttaaattcctcttgtcccagttttccacgtgtcacagtgactccaggaagaagaggcaaaccaagaaccatgtgcagggactcaaaaatgcttggtgggactcaagaaaatgagtgtgatgaaaaacagctataaactgtggcttgctgctttgttactattttgtcccactgactggcggctggagtcatcccaaagacagtggcaagggagttcctacatgggagagccgcaaaccgtcccatgatggggctggttgggattccaaagaaagaagcactaaactctggggtgatcagtgcaaagcgcttattagaggaaccgacttacagagtgggctgctgtgcatcctatggcacagggtccccaacctttttggcaccaggggccggtttcatggacgacaatttttccagcaggtttgtgggggtagggtgatggtgtcaggatgaaactgttctacctgagatcatcaggcattagattctcataaggagcacacaacttagatcccttgcttgtgcagctcacgatagggttccgctcctttgagaatctaatgccaccactgatttgccaggagttggagctcaggcggtaatgctctctcacccactggacgctcgcctcctgctgtgcggcccggttc

SEQ ID NO: 12623 - DNA, 1031 bp, Homo sapiens
aactccctttgtccagatggccagggatcatttgttcacagtactggatataaattactgtctatcatgtgggactttattcagaattattcacagaaattacctcttccaagcactcttttgaaaattgcattggaaattgccaccatcaccatggaaactttggctttcacaaggggctgcctatgaaaatggaccagaattggctgggtgtggtggctcatgcctgcaatcccagcactttgggcggctgaggcaggtggattacttgaggccaggagttggagaccagcctggccaacatggtgaaaccctgtctctattaaaaacacaaaaattagcctgatgtgctggcgggcgcctgtaatcccaactactctggaggctgaggcagaagaatcacttgaacccaggaggcagaggctgcattgagctgagatgggaccactgcacttcagcctgggtgatataacaagactctgtctcaaaaaaaaaaaaaaaagaagaagaaaatggaccagaatttagattttgtgtagggcctggattgtcagactttctagggacagaagttaccatgactgccatttcacttgtactgttactcaggctatctcagttgtattttcgctgattaaaaatgtatcttttggcaggattcaattcgagacgtccacatcaaaggaataatgtacagagcaattgaagcagacattggtatgtgctcagcagtatcacgaagagagtttcagcctttctgtttcttttgcaaccatgccggcattttactttgcattccaggtgctaagcagaggctgcatgagtgctctgtaaggacctggcatcctggcatgttagccgtctcctctttgtcctggaacttgacataattctgacttaaaaggagaggcactggcagctatagccacttagttgtttccacttagaccgaggaggcagggtctttgtgaatgatgcaccagatgtacccgtgttccaccggacaaagcttcttccttagggcctttatt

SEQ ID NO: 12624 - DNA, 1048 bp, Homo sapiens
gaagtccagcctgtacctactcacccatgagtctgcccgagcaagggtgcctcttcttttttttttgaacagagtcttgctctgtcactcaggctggagtgcagtggcgtgatcttggctcactgcaacctctgcctcccgggcctcccgggttcaagtgattctcctgcctcagcctcccaagtagctgggattacaggcgcctgccaccacgcctggctaatttttgtatttttaatagagacgaggtttcaccatgttggccaggctagtctccaactcctaacctcaagtgatcctcccacctcagcctcccaaagtactgggattaaaggcttgagccaccacgcccggccagggtgcctcttcgtcacatgggttacattcaagctcctggctggggggcctgtgccactgtagttgcccagaagggatgcctttttcctttgcctacaaaggttccatgtggctctctaaagtcctgcaaaagtcatgcaagaatccagttgggggacgggggatgtagacaaatgtaaatgtttacgtgagcatatacaaagtcctcacttactgttgcccataggatcttggcatccgtgactttaagtgaaaccgtgtgcaacaggtccttgaataacgccaatttattcgatgtcattttagttttgacaaggaaaaaaattgattttgctttatgtcgtttcacatagagttgcagtttctaagaacctactgaagatgttaaggacttactgtacaaatcatttgtatttataaatttatgtattttatggtcacatgtttatatatttatatatgttctttaagctgtatgaactttttagtactaaaaaagtttatattattttgtatgtatttacatagttataacatatttataaaaatatgtgtttatttaaatatattttttaaagatacatatttacacattaaaatatttttgttatatatttataagtaaatgtaagttttggcagcgtgaatcctgggttttaggaagatagaggataaattatagtttctcaat

SEQ ID NO: 12625 - DNA, 1037 bp, Homo sapiens
tgaccagccttgaaggtgtgactgttctgggaacacttgttggcctttattggtcgtgcctgctgggagggaagactaggcattgggcgcacacacacacactgttggagactctcctataaaacctggtggccacagagtgcttccttccgtgcagggagacaatagagaaacttctctcttttggtctttgctctagatattttttctgtgtgtgggggggcaggttttggaagtgtcccgtgaccttgtaatcacaagctcgtcctcacatggatttgggtttgaatttattcttcttgtattgtctggcaatctgtatgagtccattcttttacattgctttgaagaaataccggagactgggtaatttataaagaaagtggtttaattgactcacagttccacatggctggggaggccttgggaaacttagaattgtggcagaaggcacctcttcacagggcatcaggagagagaatgagtgccagcaggggaaatgccagatgcctataaaagcatcagatctcatgagactcactcactatcacaagaacagcatgggggaagctgcccccatgattcagttacctgctcccgcccttgacacatgggggttatggggattacaattcaaggagagatttgggtggggacacagagccaaaccatatcacaatcccaactgagaaactgagtgatagtgatctgggactcctggtagaagccagtgcaaactctctggataaatagaccgtaaacccaggcctcctaggattctcaagattagatctgagcttacaatccaaaatttaaaaatacacaaataagccaccataagggagaaccagcagactcagcagacagcacaattaatatgaataggacttaagatattggaatttttaggtaaagaatatatgtagtgctatctatgagtgtttgaaacttttggagaaataagagatgaaatggaaaatgtgagcaaagaatatgaaactactaaaatgatcagacaggttttaaaaagaaccaaa

SEQ ID NO: 12626 - DNA, 1089 bp, Homo sapiens
tgcatactgctttctgctttgcatataataggcacttaatatttttgaattaataaattaattcctaacgcctattttctatgccaggcacatggtagagagtcagtagatggtgcaggaatgaatttccagatgtggaaagttttattcaaagctgtgaacctgtcaattgattctgatgccagctatcctttgtgagtcctgcagtacgtaatgctgaagaccttgccaggatgatagactcatataaacacagggttagaaagggacttagatcaaccagagcttctcataataaagagttatcattgagtagcaagcaagggaactttttgttattttttactctttaaagtcttctaggttacattgaattacagccttattaagggttagacatttatgttttttgttttgttttttttgcagacaatacctgaaattccaccaaagcgtggagaactcaaaacggagcttttgggactgaaagaaagaaaacacaaacctcaagtttctcaacaggaggaacttaaataactatgccaagaattctgtgaataatataagtcttaaatatgtatttcttaatttattgcatcaaactacttgtccttaagcacttagtctaatgctaactgcaagaggaggtgctcagtggatgtttagccgatacgttgaaatttaattacggtttgattgatatttcttgaaaactgccaaagcacatatcatcaaaccatttcatgaatatggtttggaagatgtttagtcttgaatataacgcgaaatagaatatttgtaagtctactatatgggttgtctttatttcatataaattaagaaattatttaaaactatgaactagtttcattaattgaatttgctaagtggagttatttctcattgctaaactgttttttttcaaattctagatctctgctaactttagtaaatgaacactaaagtggtgagctttgataatgcattttgtggatacaaaatcatcgcctcatcactttctagaatgaaaggctgggggcattgctcaccttttgcgtgaagaaaagacctgtcccttagagccagttt

SEQ ID NO: 12627 - DNA, 1178 bp, Homo sapiens
cgtgccactgcgcttcagcctgggtgacagagtgagactgcatctccaaaaataaaaaataataaataaaaaataaataaataaagtttttctgtgttattaataggaaaatgtgaattgaaacatttttgcattgttgaaaatgaaaataaaaatgaaaacatatatgtcacttcagtgacaatcttcactcatcaggttggcaaaaattaaacagaacaacattacccagtgcaggaaaatgggcatgcttattccttatttatacaatgtgcattttctaagttggtaagacatttggcaaggtcaacatggcaatatctatcaaaaggttgtatgcatatataatttgattcacatgccttttcctcttccaggaatctgtgctacaaaaattctagtacatattaccaaaatacgtgtacaacaatgctagtttcagcattatgtgaattagtgaaaacatttcaaagtgctgaaatgtccaccaatggaagaatatttaaatgaactgtgaaatatgatccagatgttaacgaaagaaggcactctgtctaagcagacataggagattcccaaggcatattgttaagtggaaaaaactagctgcagtataactcgtatagtatgatctactttaggaaattcaaaacccctaactgtaagtgtgtacatgtacatgtatgtgtttctgtgaagaaaaagaactggaaagctatcagattgttaacactatctcttgggaggacagaggaatcagggagggtgctgatgaaaggaagttcagggtgtttcagtattatttgatcattcaaaaggagaatatatttgcatactgcttttataattaaatgtttttgtagtggtgccatcaggaggtactgagatctgtaaaggtgtttgcctataatctaaatggcccttggctgccctgggttttgatgtcttgtgtatgctttctggattttctgtctcatttctcactctccttatcatactattgctcatcattcacttagcctgttgttaacagcccattaactatccatgggtatgaaaactagataaccaaatccaaaaggatggcatgtataaggtttctgggcaagggtttgtccttaacaaaaggcatgaacctcatgactttctgactttggccaggggctatttcccagttc

SEQ ID NO: 12628 - DNA, 1027 bp, Homo sapiens
cttatatattttggatattaacttcttatcaggtatatggtttgtaaataatcgctcccattccacaggttgcttttttattttattgattgctcctttgcagtgcagaaactttttagtttgatgtagtcccacttgtttgtttttgtttttgttaactgtgcttttggtgtcatattcaaaaaatcattgccaagaccaatgccacagagctttccccctgttttcttctagttttacagtttcacatcttacacatttaattatgttattattaaattaataaataataaaaatgaataattacttatttaatatgtaattcattttgagctggttttgtgtatgataaagatccaatttttttgttgttaatatccagttttcccagcaccacttactaaagagactatcctttccccattgtgtattctttgtgccttatggaagaatagttgaccatatatgcgtggatttatttctgggccctctattctgtcccattggtctatgttccattgatctatgtgtctgtttttatgtcagtaccatactttttggattactataactttgtaaatataatttaaaattaggaaatgtgatgccttcagttttgttcctgctcaaaattgcttcagttatttgggggcttttgcggttccatatgcattttaggattttttttttctatttttgtgaaaaatgtcattggaattttgaaagggactacattaaatctgtagattgctttgggtgttatagacattttgacaatgttgattctttcaacccccatcacttttttgagggcataactatataaagttctagaatgttagatctaatagaattgtctgcttcagtcataataatgaggaaactgagacggagagagatggagttatttccctagaatcacacgatcataatggcttgtataagtggggttccaactgtttgccaagtactgttgtaagtacttaatgcatgtaaatgtattactgcatttaatcctcataaagcc

SEQ ID NO: 12629 - DNA, 1032 bp, Homo sapiens
gaaaaactgtttttctcctcatagatggatggtgacagttctacaacagatgcttctcaactaggaatctctgcagactatattggaggaagtcattatgttatacagcctcatgatggtaagcaagccacaattagaaccaaattctcaagttgaagcaagttagaaagtggacatttcattaatatggtgttctaggctacttgtgtctttataggaaaatttacaatcttgtgttacggttcaatgagaaagtctaaaaaggcgtaccatgctatttttattagaaatagtcttcaaaagaatgagtccttgaaaagacttttactataaaaatacaccttgtctaaaatctgtacagtttcttttaaaatttgttatcgacttcctgtttaaatgttaaataagaaatttataatcaattgatagggtaactaaaataattatttagagggtgagttaaatttctagctattatatttcttgcacttatgatttatttttggttttcattcaatattaactttgaactatgtcaggtattagaatggtagtgttggctcagtgtggtgctcacacctataatcccagcagtttgggagggcaaggtgggcagatcacttgagctcaggagttcgagaccagcctgggcaacatggtgaaaccccacctctacaaaaaaattaaaaaattagctgtgcttggtggcatgtacctgtagtcccagctacttagggggctgggggctgaggtgggaggattgcttgaatctgggaggtagaggcttcagtgagccatgtttgcaccactgcacactccagcctgggtgacaaagtgcaaagtgagaccctgtctccaaaaaaaaaaaaaaaaaaaaaggcagtgttatgttggcctatcagaaataatttacttttgtggcattttggtttgtaaaaaaaattttttttttttttttattttttattttttttgagatggagtcttgctctgtcgcccaggctggagtgcagtggcacaatcttggctcac

SEQ ID NO: 12630 - DNA, 1050 bp, Homo sapiens
cactgtccgtgtccccttgtcattatcctacatgctgtgctcttccagcctcattacctggatgaaatccaacactttggcttttgtagtctcatatcaggcctttcaagtgtcacactggacatactggcaccactgtaaactcacggtcattagcttcagctaggcttacactgtccagcactcccctccctttcctttcccattctctgcggtgacagctgtctgtctctccagctgcaagaatcccagcattatccttggtcttcctgtatctctatcagtcagtcaccaagtcacctactaaaaagctgtctagttgttctgcttctcttgatctccagcgctctcacccagacctgatgctaaaatgatcattatcttgcttgaagtcatgccctgactgcagcattgcagtcctcactggtcttctgtgcctatttgtgctcccctccaggtcggtttctgtactgaactgtagccagagggatttttttttttaatgtgatttgtgctcttctgcttaaaactctttgatttcctcttgtccaccggacactgcttgatctagcccctccttagcgccttccaatccaccagtactgtatttcttggttttctctgcctagaacattcgtttcccacctttctttttgcctgactgatttctgtttatctgtcagtctcattttcaatgtcatttcctaagatagcctttcttgacccctcagactagtgaggtcccttttggagtaaactcacatagcacataacaaaacatctttgtttttcttcgtacttggcactagcaattacttaattatttgtaattattttaatagctatatataccacttactgagtatgcccattgtactatgctgtctttacatggattagctcctaacctgtacaggagcctgggaggttaagtcttgttctcatccagtttgttcacggtctcatggtaagtggcagggaattcaaactaggtgattcgattccagagcctgtgtcctggaaggactaataggctctgttctctacccc

SEQ ID NO: 12631 - DNA, 1028 bp, Homo sapiens
cattgttaatatgtaaacatgtaatattataatatgtaatataaatttattcatttatttttcttgctaatcccagagaaattagctaccctcattcttttaaaagctattgtttcctcctgtatacattacttattcaatcagcaaatttacctccatacagaaggtaaatttacctccatatacttcagtaattttgagtttactgcataacttgttctatttatagatagccaaattttttttaagttctgcttttggtcttttcttccttaacctaacactctactctctgaagcaacatattatatacctagcgtctgctgacatgataatctttgtcttaagttcacatctcctaccctccttgcccaggacaaacaattcttattctcataggaatctcctatatgacactgtctcaagctgatttgcattccgtcaatcagatgttgtctactttttaagttagtcactttgctaggtactgaagacgcaggtgtgaaccagtttctctgaaaatagggcatccaaaacagagcctagatgtggcctggctcactgggggggtcccatgggatgactctctttctctcagtctgtgcactatgcttttagtgatagaacttgacatcatgctgcctttttgcctttcctttcatcccccaaaccaaggctcttattatttcgaagtaagtttggcagatattaggccccatattttcttcaaatgagaatactaggctcagagtggtaagaaatttacccaaaggcagaactgaaaatcaaatccagattttacaacttcccactccaggattctttctaatatttcatgcttcctccatacccaaaacacattgtcctagcaaaactttatatgattccaaaacagtctctaccagtgaaacactaatgaagaattgaccacatggaaaagacaatagggcttaaagtacaacctctctctgacagatgtccaaaggcatgtaaaattcatgcctttggaataggtacatgtcttccta

SEQ ID NO: 12632 - DNA, 1069 bp, Homo sapiens
aaaaacgaataaatttaaacccgcttgaactatgtcatcacaatacctttaaaaataaattgcacgggaagaaaactttattcatattgtataagtaaatccaataaatggaatgagaatgtgcaaaggcagagagggaatatcacaaaggtgaatagagcaatttctgcatagttgacaatgaaatttcttagctctataatttagagctagaacagactatgaagacataaatttattcgttttaaagactgagggatcagagaagtgacaaatataactggttagtgttagaaaccagacttctattccaacaatcttttaaataaagtccataaattctgagacagtgtaataattgatgtattagtgatgatggcaccaatatttacttagtacttactataaaccaagcatttgcttagccctttacctatattatcttgtttaattttggcaatcagtccatcaggtaggtaatgataacctcattgtacagatgaggaaactaagacttggagagttttttttttcacttgtagacagtaacagttattcagtgatagagcttcttcaatagcaaacatttgtttcatttgtcatgtataagtattttgctagaaaccaagggatcaaacagaaagaagacatggttttcttctttcggggattgacacattagatccctacaacctaacatgtaagaagtatctgtaagatgagtagtgtttttttgtttgtttgtttgttgtgagacacaatcttgctctttcacccaggctggagtgcagtggtgagatctcagctcactgcaagctctgcctcctggactcaagggatcctcccacctcaacctgagtagttgggtctacagggggctaatttttataatttttgtagagacagggtcccactttgttgcccaagctggtctcaaactcctgggctcaagtgatccacctgccttggcctcccaatgtgctaggattacagatgtgagccaccatgcctgactgagtagatttcatatgttttgaccacagcacttgtaagaaatatgtttattctg

SEQ ID NO: 12633 - DNA, 1050 bp, Homo sapiens
atttctctatttcttcactgtcaagagtccctggcattgggataaactctgcttctagtataacgaaggtaattaactccctggatttaaagttgggaagcaaatatatattgagctccaactctgggccaattactgttgtaaggactttacatactttatgtcatttaatctccaccatgacacagtagggatagacactcttcctaacgctattttacagacgagaaaactgaagcttcagagaggtttcataaccagtggccatttcccctcttatcaatagttgatataagttccgtatggcattaaatcttagagccgaagcctaagtttgaatggctcaagatctgagaacgctctctctctctctctgtgtgtgtgtgtgtgtgtgtgtgtgtgtgtgttgattaatactgctttcccatcgaagtgccaagaacacaggctaatctagatttctattaatcttgtgtcagtggcaatgacagttttactgggagaggctgataaacatcagtctgtgaggataggagtgggccataacataaacacacttctccagaacggctacagagcaaatgaggctgcccagacttggaatgaaaactcctggtgtgagtgtgtgcatgtgcagcgggtgcctctcacacgcacgtgtatttggaagctcatatggtgccccaggcactgccaggcgggaagagaatgcattttcctgtgcgtagccattccatgcctcttctgattgacagggcacacttcataaagcttccaaccaacttcctgcaagcaagtcaggggccttgataagaaagtggaattcagggcaatgaagtgcaatctgagcccggagaatgcattttctgaggctggttgtacaccagctgctttcaatgacattccattcattcagggatgacttttacaaaataggctgcttctaggggctgtgaccaccacagagcctcggtggtattcaggctgggctctctctgggcatgtgaatcatgcagctcatttccaagcctcaaatggaaatcagcttgg

SEQ ID NO: 12634 - DNA, 1045 bp, Homo sapiens
cccctggaagccatgacccagtgacctcttgctcttgcagagtgtttgaccgtagtcacatgtagtctatagaataagcaggaaatagttggtcaaagtagttctccatgggaataggaagtggaatcgcagggtctatttctggcaaagtggttggattattctagaaggagcactggttgtagagttaggaaattccgggctgtatggcttactagcttcttgacactgggaaaaccacttaaccctgtttcctcagctgtaaaacggggtaacagtactactcacaggcctgcttagagcagtgaatgagacactctgtgtttagttttgtaaactgctaagcactcgtgtccaaatgagtcaaagttaaaagcagtggctttggagttagatatttcaaccctgccccttagtaatggcaggatttggggtaagtttcttgatgatttaggctttagtttcctcatctgtcaagagttgccagttcctgtctctgcagattattgtttatttgttcatttttgtttcaaggagtattttctgaactgttactgtgtgcaatgccctgtgcccagtcctggagagtcaataataaacgtgaagattttagacaatactacaatcaaagcaattcatgcttaactgttactatactgggagccttcttaagtggctggccactggagagggaattgaaccggaagtcagctgctctgaaggtgcctacctaggtcctggggagtggtggtcaggccatggctgaaaaattggtcttggtttgagggccaccacatttttctaagggtttgtgtcatcaaccttattgacttcctctccagatccttcctgccacctgcccccagagctctcaaaactaaatgtcatctttacaaggcctggaatgtaagcctcttgcctaggggttgggttctatggtgcagtgtgacctcttggtcccatgatgtattcccagaagtgataagacacatagctttctatgaaatcatgtaattccctaatggaggaaaagaatgattagaat

SEQ ID NO: 12635 - DNA, 1077 bp, Homo sapiens
ggaacagcataaagtcgcaggcatggaaaaaattaaattcatttccttttcaggccaattggttgcattgagtatgttcttgctgtttctcctgtcatttctgcagttgctcatctctgactatggagtggtttaatagattctcattaatattataaaagaaaatattgacaagtgtctgataaatataaattcaagtggtgaaaataaaaggaatatattaggaattcacatatttctgatggtggggcagttagagttcttacaccaaataatgcagctcagtcttgtttcttcattcaatatagtgttcattcattcaataaacatttattgggctgatagccagccattttgctaagtatcagtgaattaaaatgtacaggactagcccagtgggaatgacagtcatgtaaagtggtaggtattagaaatacaggtgccatacttgggtgtattgggccaagaggaaggagtgaccattgtgccatggttggtctagaggtggttagaacaggtttttgaagggctgggggaagtcccttggaatgctttcatgagtaatgggaagcttcgggaaacaggttgttttgccctttgaacaaacaatatacacaaattactgaacatgttggttaaattgcagatccagcaccaggataagaggctgcagtgaaacttctcaggcaggactgacagcaccctggtgaggagactactacaccactgaccatgtggccttgggcaagtcacttagaatggtgatggtgttgataatagagatgatggtggagatggagatgatgatggtggtgatgaagatgatgtgatggtacagggtggttgtcaggactgaatgagcgtgttgaggggttagcacagaatctggcacatcataagtgcttcagtgatcatgcgtgcatggatcataccagaggttaaaatgttgaaatactgttgtcctagttggtgaatagcttctgccctgaaccccctgcatgtcctctctctggaccactatacctctttacaatccagcaactaataggttaatattctagtatagcagagaccaca

SEQ ID NO: 12636 - DNA, 1570 bp, Homo sapiens
tggataggttgtttgtgaaagtggagaagattcacgaaaaggtctaaatgaattgcgtgtgcagggcgcggatttaaagtccaatttctcatgaccaaaaaatgtgtggttttttcccatgtgtcccctaccccccaatttcttgtcccctcttaaagagcagttgtcaccacctgaacaccaaggcattgtattttcatgcccagttaacttatttacaatatttaagttctctgcttctgcatttggttggtttcctgaagcgcagcccctgtgaataacaggtggcttttcatggatgtctctagtcagagaaaaatgataaaggcttaaattgaggattaacagaagcagattaacctcagaaatcctgtctggctggcagatttcaagtaaaaaaaaaaaaaaggtgggttggggggacccttttctttctagttgtctttaaggaaaattaattttacttttttttttgttctggccgaaatttttatgagatatctctcacttgtcttccactttgaaccggttaaagctcatagctgtcagctctgaatgaggaggggagaagcccctgggtctttctttgaaaggaatccgctgcttgagggctgcctccctcatggtgtgcgtgtcgtttctcttcctgacgcatcttgtgatatcagaggtaactatgcaaagcatccaggcggttctgaatgtgaagcactacacccagcagagtcccggtgccctctgtccccactgccggcccatgttctctctccggaggtcaccaaggaatgcacaggtttcgactaccagaaaggggagtccttgggttctttcaaaaaattcgtgaggagagctgtctacagtggaatagggggtctccctggggaatgcaggccaagtccttttattttaacatgatgtccatgaagaggtttgccgtctgggcagccctgtcggcaaggagcgtgcatactgcgtttgtgtaattgtttgctgtatctcccttccctctgagctgtattgttctttaatggctgtcttgcccttccaaaaaaaattgaaaaaaaaaaaaaaaaaaaaacccgaaaagtaaaaaaaaaaaaaaaaagttttgtttagtttactgtgaaatgaactgtatggcttatttacagtatttttaattcttaataaacacttgagctttgttatgacttttccagagtggttacattctgagaatttcgtaattatgatgtgttttattagcacatggtataaacgattagcaaataggtaagtttactattttaaggctgttttttcttttaattctgaaaccgagatggcctcactcttgggccggggacctcctttgatggactgttagcaagtgtgttcaatgattacttgtctccagctctgttagcttcaagcacaggatctcaaccctcactacctattagaatcttcctaggagcttttaaaaaatgcctgggccctgcccgcacagatgctgattgaataggcataaagaggctggcactgttttttttttttttttttttgagacagagtctcgctctgtcaccca

SEQ ID NO: 12637 - DNA, 1034 bp, Homo sapiens
tttagaagaaagcagaatttaaagccttggcagtttggtctattggctacagctccagaactggagttcagagaattccactaattcaagatatgacttgtcactcagcaaccaccacctcactatgtgaggccactcactcagcctttcttgaggtttagaaatttagaactgaaataatagctggattgtcccacagtgtccttagctgttaaactaagggattgatccagatattatttcagttctaaatttttcagttctaaaattttgtgattctcggaaaaacaaaaccacctttaaatatgctaattctttagaaaaacctattatgaagagtggggatgtgaaaatcaatatgtgcaaatcaaatatcaatatgatatatgcaaatcattccttgggcatacctccaaagattctgattcagttgatctgtggtgaaatctggatactggtagttttaaaagcttctcagttgatttgaataagcagctagtattgagaaccactggatcaatattttgatagagtatctaccactgaactggttttttgatagacccccaaactcatgtgcatgtaactcattagtctttgagaaataacctgacaatatgaaagttatttttttggccgggcacggtggctcatgcctgtaatcccagcactttagaaggccaaggcgggtggatcacctgaggtcagaagttcaagaccagcctgaccaacatggagaaaccccatctctactaaaaaaaatacaaaattagctgagtttggtggtgcatgcctatatcccagctacttgggaggctgaggcaggagaatagcttgaacctgggaggcggaggttgcagtgagccgagatcgtatcattgcactccagcctgggcaacaagagcgaaactccgtctcaaaaaaaaaacagaaaggaagttatttttatttcattttttaccaagaatgcagtctcagccgggtgcggtggctcatgcctgtaatccgagcacttcaggaggccaaggcaggcc

SEQ ID NO: 12638 - DNA, 1029 bp, Homo sapiens
caattcaattaattatttaggaggttttttttttttaagagtttcactcttgttgccccgtctggagtgcaatgctacaatctcagctcactgcaacctcgggcttctgggttcaagcaatccttatttaggaagatttttaaaaatattccacatgagcagttttcttgtctaatttaaatccactttatttccagacttcaacagctcaaatttgtaagtgtatgtgttctgaaagtcaacacccttatactaaaaacctttattttctttttttcagatagaatgagtccatttaagtcccaggacggtggaaactagctagtagattgcagccatgttgtggaagctgctgctgagatcccagtcctgcaggctgtgttctttcagaaagatgcgatcacctccaaaatacagacctttcttagcatgcttcacctatacaactgataaacagtcgagcaaagaaaatacaagaacagtggaaaagctctataaatgttcagttgacattaggaaaattcgtagattaaaaggatgggtacttttagaggatgaaacctatgttgaagaaattgcgaatattttacaagaactaggtgccgatgagactgctgtagccagtattttggaacgctgcccggaagcaattgtctgtagtccaaccgctgttaacacccagagaaaactctggcagttggtctgcaaaaatgaggaagagttaatcaagttaatagagcagtttccagaatctttctttactattaaagaccaagagaaccagaagctgaatgttcagttctttcaagagttgggactaaaaaatgtggtcattagcagacttttgacagctgcacctaatgtttttcataatcctgttgagaagaataagcaaatggtaagaattctccaagagagttatctagatgtaggtggctctgaggccaacatgaaagtttggctactaaaattgttaagccaaaacccatttattttgttaaattctcccacagctataaaggaaacact

SEQ ID NO: 12639 - DNA, 1032 bp, Homo sapiens
tattccccaagaactatgtaactttaaaaaaaaaaatctccattctgagtgttcttttaaaatgaaaaagacaattagttaatataattttctctgtgtgttttcaggcttgggtggcaaattttgaaagacctcgaatgaatgcgaattctctgcttgcaagccctactggacttagtccttatctccgatttggttgtttgtcatgtcgactgttttacttcaaactaacagatctctacaaaaaggtattctctaaaattagagcttattgtttaatactttaaaaaaaaattctgataatacttctttgctttttaaccataggtaaagaagaacagttcccctcccctttccctttatgggcaactgttatggcgtgaatttttctatacagcagcaacaaataatccacgctttgataaaatggaaggaaaccctatctgtgttcagattccttgggataaaaatcctgaggctttagccaaatgggcggaaggccggacaggctttccatggattgatgccatcatgacacagcttcgtcaggagggttggattcatcatctagccaggcatgcagttgcttgcttcctgacacgaggggacctgtggattagttgggaagaaggaatgaaggtaagtgttctaactgatatagcatgccttattttgaaggaatccttaccttaataaaacaaatcctagaagttgtctgtttatagattcatttatggtgtagtttttcagtggataaaacatttaattccccaaatacggggacactttcagagaaaaatggtataatcagacaagcaaaaaggtgaaaactggttaaattgattaacctaaagtcattttaatggttaaaccagcctagccactaagagaactgtaaaatttaacactgaatttgttgatagatatatttataggtgatatttctatcacgaaaagaattcactaaagagttcctagagatagtgaattcatattataaattttaaaatataaatcatttcacctcacttc

SEQ ID NO: 12640 - DNA, 1049 bp, Homo sapiens
gtgtgaacatctgttcttggatatttaggagtagaattgccgtatgtttaactttttgaggaactgctttccaaagtggctgtgccatgttaccgtcctagcagcagtggatgagggttctaatttctccacatttttgccaacagttaattttttatttttatttatttatttttttatttttttgagacagagtctggctctgtcacccaggctggtgtgcagtagcgcaatctcagcctcactgcaacctccacctcccgggttcaagccatccttccacctcagcctccccagtagctgggactacaagtgctcgccaccatgcctggctgattttttgtatttttggtagagacgatttgccgtgtttctacctggtctcatgcgttcgagaccagcctaggcaacatggcaaaaccctgtctctagcaaaagtattaaaaaatcagccagacgtggtggtgcatgcctgtggtcccagctacccagcaggctgaagcaggaacgccactgcactccagccttggtgacagatcgggaccccgtcttaaaaaaaaaaagaaaagacagatagatgactgtggttctaaggtttatgtattccaactattttgtgaatggttgtggagtttaaatgtaatgattgagtaatagtatcataaatactgttccttagcagagtggaaagtgtaaagaatagagcagaagatttacggaggaggacactcataagcttgtgaaagtgaagttgtagtaagaatagagaacaatatataaagggagcatcctctctgccaatgcagaaagaaagaccatatgaaaaataagaaattaagaattttaagcaaataatgtctgcaagaatacaattcttctgccctttgaaagagcaggctgcaaattgtttttgtcttaagaatgtgtcctcaaaacttggttgaccatcttgtttatagtgaagcaaaagagtacagtggtgtagctggctctgacgccagtgtcctatgttcatagcataggtcactggggtcagagccagctgtacc

SEQ ID NO: 12641 - DNA, 1047 bp, Homo sapiens
tttatcttatttagctgacagaccacctccacagtacatccaccctaactctataaatgttgatggtaatacagcattatctatcaccaataacccttcagcactagatccctatcagtccaatggaaatgttggattagaaccaggcattgtttcaatagactctcgctctgtgaacacacatggtgcccaaagtcttcatcccagtgatggccatgaggtggccttggacacagcaatcactatggagaacgtttctagggttaccagcccaatttcgacagatggaatggcagaggagcttacgatggacggtgttgcaggcgagcattcccaaatcccaaatggctccagaagtcatgaacctctgtctgtggattctgtgagcaacaaccttgcagcagacgctgtaggacatggtggtgtgatacccatgcatgggaatggcctggagctccctgtggtcatggagacagaccacattgcaagtcgggtcaatggcatgtctgacagtgccctcagtgactccattcacactgtggccatgagcaccaactctgtaagcgtggcactctctacctcacacaaccttgcctccctagaatctgtttccctccatgaagttggcctcagcctagaacctgtggctgtctcctccatcacccaggaggttgctatggggacaggtcatgtagatgtatcttcagacagtctttcttttgtatcaccttcactgcaaatggaagactccaattcaaacaaggagaacatggcaaccttgtttacaatttgtgagtgtgtttagcctttcttttttggaaatatttgtaaaaagggccaccatccctaacaagttaagtcgtaaagtttggcattaagggagtatagaaagcaactagaccttggaacttttctttgccttggtattgtcctttatattaatgtggtgccttttcttcaagtaagccaaatgatatacatacatttagttggttcttagagcatcctcctgaagaaatgaaatgtgaagtagtcatttttgtattt

SEQ ID NO: 12642 - DNA, 1060 bp, Homo sapiens
tccgtctcaaatcaatcgataaattaattaattaaatatttttgtatttaagcgcaatacagacaattggagtatcaacttgccggtttagaactaacttaaaaactatctttgggactaagactactttctttaggcttatttgtggatatttgcacattatctaaggatgaaaagggctagtaggtgagatttttgcccatgtgtaaaaacctttctaagagtttagccagtggttgtagtgagaatttttaattacctattttcttttaactgagaaaaaaaattttgttttgtaggcctcccagtggcaattccaaacctgggtccctccctgagctctctgccttctgctctgtctttaatgctaccaatgggtattggggatcgaggggtgatgtgtgggttacctgaaagaaactacaccctacctccaccaccttaccctcacctggagagcagttatttcagaaccattctacctggtaagtgttacagttacttgagatgttagagaaaaagaacggcgccagcttttaaacttttatcctgaagatatgaataacacttttttctgtttgtcactattagatattaatctctaggcaggaaaagtatctttgtttatatttatgtacttttcctcttagaatgtggcacataacacattagtaatacagtttgactaagctgaatttcttaattgcacataatttttcttctttctcctccagtatctctttcatttggtgtttataattctacagctataatttcagtcaagcactatagtgtcttgttatagtgtcatgttttttaagttcattgaatttttattctgttataggagtattatatgcttattgcggaaaatttagcaaataagggaaggaaccactcagtcccatcatccatctttttggtgtacttccttcctgccatttgttttggtgtataggtttttaccaattttcataattaagaccacggtttcttctcttgctctcttttttcttttcttttttttttttttcttttaatggagacggagtctcaacta

SEQ ID NO: 12643 - DNA, 1050 bp, Homo sapiens
ccctttccaccgcatctgtttcactagtcaagtgaatgcctgggctaatttgctcctataggacatttatagacactctctgctgaaaacaacagcctcagtggagagcagcagacagccctcagtgtcctgtggacctgacttgaatcaatattctctgtgttcttttaatatgcagaatctcctagtaaaggtgaactcaattaatgaatgacatacagagtttcattttattttgtttttattgatgcataatgtacatagtttcagagtacatgtgataatttcacacattcatataatttgtaaacatcgatcagtatacttgggatatccatcaccttaaatatttgtcttttctttatactagaaccatttgaattctctcttccagctatttttaaatgtataatagactatcgcaaactatagtcactctattgatctatctaatactaggtcttatttcttctgtaaaaccatgttatttgtttatagccaataattactgagcccacaacggggctttttttcctgttgcctctgttccatgtgcaactgtcaacatatggttcactcgcggggccaaaacagagctcactgggaaaactcttggtctaaataactttatggatgaatgagaattaagccatgggcctgtccagcttttcctttccagacagagaaaaagaagctttgaatgctctagggaaggccaaaccagaggcaagaataacaaattcttgacttttctgtggatacagagaaaatatgtgagactagatataaacagggtgttatataaattaggcaaaaatgggccctgtattgtacatccaatggaataaaactagaaatcaacagcagaaggaaaaatggaaaattcacaaatatgtggaaattaacacattctaaagtgactaatgggccaaaaaagaatttataagaaaaattaggctggacatggtggctcacacctgtaatcccagtactttgggaggctgaggagggcggatcacgaggtcaagacatcaagaccctcctggccaa

SEQ ID NO: 12644 - DNA, 1150 bp, Homo sapiens
ctgcctcagcctcccaagtagctgggactacaggtgcatgccaccatgactggctaatttaaacaattttttttttttgtagagatggggtttcactatgttgcccagtctggtcttcaacccctgggctcaagaaatcctcccacctcagcctcccaaagtgctgggattataagcatgagccgccacaactggccacatctatttttaaatgatgaaatatttctgatatccaaaagacatcaacagtgcaatgggcgcttgtatacctgccatccagtttaagaaataccatgtcaccaatacactgaagccccatgggccttctccccttcacatgcccttccctccctcccagaggtcactaccatgttgaatttggtgctgctgcctccatgcatggctttttgcttttatccacatgcatgtatccataaataatatataatgatgttatgcagatttttatgcatgatatataccgtgtggatccttctgcattttggggctcagaattatgtcttagagatttatgctcatgctgatatgcatagttctggttcattaattttacagtgctgtatagtattccattaacaatttatttcccatttacctgttgatgggcatttggattgtttccaatttttccctatcacagactgcagtgaaatacttgtatgattttttggcacatgtgtggaagtttctctaggacaaagtttctcaaagaatcatttgggggggttttggaaaaacaaccacatggggccttgctccagaccaacgaaatcctctaactgctcctctgatcctactgtatcttagctacaagtggaaataatcgtacccaccatgctatctcatttttggtagtggtgacaactgagcacttactgtgtgctaagtaatttgtatggtatttgattgaatttttgtaacaacgccatgaactagatattattaaacccactttatagaaggtgaaaatgaggctcagataaattaagtaattagtctgaggtcacacagcaagcaagtggcagagccagggttcacaaccagtcttcctgactcaaaactgtggttttgacgattatgagaccctaggctttcagagatctcaggttacattttagctcctcagctt

SEQ ID NO: 12645 - DNA, 1046 bp, Homo sapiens
aacctggccaacatggtgaaaacctgcctctactaaaaatacaaaaattagttggctgtggtggcgggtgcctgttttcccagctactcgggaggctgagacaggagaattacttgagcccgggaggcagaggttgcaatgagtagagatcatgtcgttgcactccagcctgggagagagagcaagacactgtctcaaaaacaaaacaaaacaaaaaaaagaattgtctctggacttgaaaggactctgtatactttcttaatacagatgtgtgagccagagagaactgggaatggagtcatccatcgttgagttgaccttgcttgcacaccttgtttgggctttcctaaatgactgaggatggctcattgctccactggcctcccagtttggcagaataaggcaaatgtgatgtgtgaccgcagtggtgtgtgatcagggcatggcgtgtgatcaggactgtgggagatggcattgttaatactggtggaggccaaagaaggcactagtgggtcaacttcgtaccaggaagactgtgggggaagagatgcggcatccagggggaagaccgagtgactgtggcagcgagaagggaaggtctgagctacacagggaggagccaatgttagtacagcctgaaggcacagcacagcctggcattttctgtgagcagcagataattgggtttgaactcagatgcattagagaggggtggggcagtggtcgaggaggctggagtggtaggtgggccagtcagctggacccagcccagggacactcttgaatacagtagcagtgtgcagggcttacgttgcattggaaaggcagcgggtgaactgatggggaggtctgtttgccggaggctgatgtctgttgagcttcagtactggccctctggaggcagtggtgaggacagactgcagtagaagattgtggttaagctctcttaaggacacaaggccatattgaaagtgttttagaaaccacagatcctttgtagtgctttccaaaatgtgctccctggggcacgggtatcagtcactagg

SEQ ID NO: 12646 - DNA, 1022 bp, Homo sapiens
ccacatctgtcatagattagctgtccatttatgtgtgggtctttcttctggattttctgttctgtcccactggtttatgttacactgttgtaatgatgagagttataatgttttgctcttggatagggtgagtcccatccacctttttcctcttcaagaggatcttggctttttttttttttttgccttcaatgcttccatcggatttagaatcagcttttctagttatatttttaaaatctttttttttttaattggaattgcattgaacctggagatcaatttggggaataatttacatcttccaatctatgaacatatataggtttctgctacttatatcttgtctttctgtaaagctttataataatattataaatttgtccagtgtcttcaacacttgacctttagagtcccctgcaagggagatttgctggtaacagattttctgtgttcaaaaaggtctttgcttcccttcttgaaaattattttcttaggctatagaattctagaccgacaacagcaaaagaattctagacggacaatgtgtcctctcagcaattgattgtatctttctgtcttctgatgtctgttgttgctgttgagaagtcagcggtttgtataaatcttgcttcttcagaggtagtcacttttttgtctgactgcttttaagatctcattgatttggtttgctgtcctctaatttcactgcagtaggtccatgtgtggactggcttgaagttttttgggcttcttgactctttttttctatctttctttgccaacaataggattgtgaaggtcagattcttaatatacgtcaagccagcaaaaggttaatgtttacttagcttgccaccctcatttagattttgtccttagtccttagtatttcttgtttctttgccagtttgttgatgacttttaagaagatattatatttaatttagcagttttagttgttttgaatggtacagtgtgtctgggtaactaattcttcctcgttactggaaatggaggcc

SEQ ID NO: 12647 - DNA, 1028 bp, Homo sapiens
agtacgccatggcttcctccgcggagagctcccccggggagtacgagtgggaatatgacgaagaggaggagaaaaaccagctggagattgagagactggaggagcaggtgggcccgggggtgggcagcgggcatcttccagtctttcaggtcctcgggtccccatgtcctggcccgcctccctagtcctcggcggcgataaagccgccaaggctgcaaacccgcttttcgtgacagtagctcctgtcggatttgagtgcttactgcctgcccattgccttgcaaacgttatctcattgaatcctcgccacgaccctgtgaaggaagccctgttatctatccccattttactggaggaaactgaggctcgtggaggaaagtttcttgctcaagataacacttcctgcaagtcaggccttgtactttgatcccattccagaactcccactcttaaccacacgtccaacagtagaaataaactcattcgcaagagagtgttattttgttatgtaggaatgacggcgatgatgaaacttgtggtaagaaaaatattgaccgcgatggtgataatagaaatggaaaggtttctggttctggaggttaaggcctcagttctagctgttcaactcttgtatgtgcttgtaagaatttcttaatttctctcaccctctcgacttccttatctgcagattgggagcaacaatttctgcataatataattgttgtaacagtaactatagctcagtgcctagcatctagtcataacatggtctctcacttgtaaccttatgaggtggtgatatctactgtataatccaggatctcagcaggaaataggtggcacatttaaattaggatgatctgagagaaactcaataaaggtgtgggtagggaaatcgggagtgaaggtttagtatcccatagctggtaactccagaacctggtgtccatctttgggccggaaggggtgaagggtgtgatctgaattgtgtggagagggcacctgagacctgctgataactttgttca

SEQ ID NO: 12648 - DNA, 1017 bp, Homo sapiens
caaatttgcagaaacaaaacgtgatttaaaagctgagctttttatcagaaagcttttttgatgttttaagtgttatgtgacttgttgaactttttaaaaagtgctacttttaaaatcccagatactctgaattttagaaaacaaactaattctgattgtgtcgtgcccaagtacccttttttttttaatgaatagggaccaatgccacattgctttttatatttctttcttttttaatgttgccaaaaccaaaagtagctttgttttcctttgtattttgctactttgcagtatttgtgtgtgtggttttttttccttaatttgaaagggacagcactgtgtatgtttataaactaaatgaagataagatattattttgtataaacattcatctgagaacaatcaaagcagtagccacatggtgctggctcctttgcagcacaaacctggtcattttgatgactgtacaacaggaagacttgaaaaatcacgtggattcatattaccaccgctctcatttcatggagtcttctgatcaaaaaagctcacgtcgtatttcttcttttcctttctcttttctagaaattgggtgtttgtaccagaatggaattttgcttctcggttatcctgtgcttcagatgattataatctaacccaaactagcatgtgtttctgcagtttgttacacacctaggatcatattgcattcatcactttaaacatcatgtttcaggttttggtcaatacttgacaagggtgcccaggacaggaagacgtgtactgctgagtgttccttcttgcccttttcagcagcttgcccagctcttgagtacagtggtggggactaaaaatgtgggcatgtggagaggggtatttgccctgggtgatcctgtttccctgtgctgtccccatgctgtgttggaggaggaagtggctctccttccaccaacaaagctcctgctctaccctcttcctcacatgtgctgcgacctctctcagggctcccccagccattcc

SEQ ID NO: 12649 - DNA, 1083 bp, Homo sapiens
acaattaaagaattgatacttacgtcttccaaataaaaggaagagaatttttataagccccttttttatattaatctctactaaaaataaaaaatttgctatgtgtggtcgtgggtgcctgtaatcccagctaattgggaggcagagtcaggagaatcacttgaacccaggaggcggagtgagccgagatggtgccactgcactccagcctgggcaacacagcgagactccgtctcaaacaaacaaaaacaaacaaaccaaaactctctatgtgattttttttttttagttggaataatgaaggaaagctgttaaagataattgaaaattgtggtttaaaccaaactaatcaaaatatggttcaaaatagactgaattcaaatttatgattacatccaatattttgaaacacatttgttgtcatctaaaagttcgacagactataaacacagttgttcagaatgtctccgatttatgaagtgtttcttgagcatttattgtatgccaggactgtgctaaatatgctacttgctacctctttcttttcataacaatcatatgtggtaggtgtaacttttatccccattttatggatgaagaacttaaggcttggtgaggttgtcacactctcgtgggttttggtagtagagctggaagtcaaagccaagtcagtctttttattggctatactaaccacagaattttcattaaatcagtctttaaaaatgtttttgggccaggagtggtggttcaccctgtaatcccaacactttgggaggccaaggtgggaggatcacttgagcctgggagttcaagagcagtatggacaatctagtgagaccctgtctctacaaaacattaaaaaaattagccaggtgtggtagtacgtacctgtggtcccagttattccagaggctgaggatttggcttgagcccaggaggtcaagacctcaatgagcttgtgccactgcactccagcctgggcgatggagcaagacccagtcccaaaaaaaaaaaaaaaaaaaaaaaaaaggtttttggtttatctgggactcttttagtttttggttgaaatagtaaaga

SEQ ID NO: 12650 - DNA, 1050 bp, Homo sapiens
tctgtggtgttgctgccagctttgggagacccctattaggcaaatacactccttccttttaaagaaaactttgattttcccctgctatacaattagtacatgtatactgtagagaacatatataaacaaaaggaaaaaaaaatcacttttaatcccaccactcagagagaagatcattattacttttttgatgtttctttccgaaagatatttctgtgcacatacataaattattttacatacagagatgggttcatacactttacacatgggctgctttctgcacttggtggtaggctgtgacccttttcacgtgccattaagctctcttcctatttttaatgacttcatactaatccattttctggatatacctcattttacttgataagtcccctatttctggacactggtgttgtacagaaatcttttcctttatctaaaattggagatttcattttcttttatgaaagcaatacagagagcatgagggaactttgtggggtgatggaaatattctgtatcttgatcatagtagtggctacatgagtttatacatttgttgaaacttagcaaatatatacttaaaatgggtgcattgtattgtatgtaagttataccttaataaaagtggtttatttaaaaagtgatactaatgttagagataggatttttaaaggtctttcccctcaccagtaaaaaggaggaggggcagttcagtttttaactgggaatacacaatgtttatgactcatagtgagttaaataaaaaattataatgccaagtaactattgaaactaaggcccacttttcaaaaaagatgccatgttttttataatcaccatcgactatacttgggaatcatttttgatgttctctcagaacctcagtctgattaaggagaggaaaaaaattccagagctggaattccttcatggaaaattccctgctacctttctcatcaaggctcaatacagggcagcagcaacagactggtctgcattctcccttttacatgtgaaggagaatgggtgattgtcgtgttctgc

SEQ ID NO: 12651 - DNA, 1058 bp, Homo sapiens
gctctgtcacccaggctggagtacagtggcacgatcatgccttgacctcctgggcccaagcaatcctcccacctcaaccttccgagtagctgcaaccacaggcactcaccaccatgcccagctaattttctattttttttgtagagacgaggtttctcacaatgttgtccaggctggcctctaacttgtggcctcaagcattcctcccaccttggccttccaaagtgttgggattacacgtgtgagccaccatgccaggccctaaaccttttttttttattctttttttttagactttattattattattattattttgctcttttccttttatttcttttgggggcattatttgttgtgtttatttgctcttgtgttctttcttggtttgtcttcatttatttctaatttttttcttgatgtctgtcactttgttttgagtttttcaagttctggtttataatgttttatatattgttttcttattttgaatcactataatgtagtttttatctcttttgagcatgtctttttagcagtcttatattgtctaaagggatcttattctgtgtcttattttctttttttctgacagtaattttggagttcaaccttgatttttttttcttgcttatttttatgtggatttaattttcccaagctttttaaatggtggcttggttcagatagctgctctaatttcacagaactccctctctgacatattcagatagtgttcagaaacatggtgccttgctttctaatatttcctagcctggcttttatgtagcctctcttatgcttttatccctcttactgctatcctgctgaaattcgatttcatttcctggagtgtctcctttgtgggcccatcctggaagggagcccgctgtgggtgattttgagagtgctggggtctagattgtgcctgcctcttcagaccttttaaattcagtacccatgtgcccagcttctgttggaaaaggcaaaatccttcccagtttctgctgctgatctcacaccggcctgctgccctcaggtctgtcaggtgtcccctt

SEQ ID NO: 12652 - DNA, 1060 bp, Homo sapiens
tggtaaaagagtttttgcaattgcttgtttccaagctaatggcagaactgtgttctgtccagtggaccctggttaagaaagtccttttcataaagatatacaaacaaaaaacgtgaaaggtgaattaagtactttacattccctcctttagtttccaaaagtaggttatgtgtgaaacaaggctttggaatactttttaatatgatttcttgtccttagttatgatttttaactttaaaatgtgattattggtttggatcagtttttaatgctagcccaaagtaggctgaaaaggttaggcataaacacaaatgggagtacttgctgcccctgaaataagggaagatggtctctaattaatttgtaagcagtctcgcacatgtcaggtagtctcgcacgtgtcagcattggagaaccatgctacttttattttcctctctattggctgtggactgaaacattgtttggaaagctttattaattaaaattattttacataaatacaaattaattcctgaactgtgtcatttaaacatttacccgcttttcctcatgggcttttggctgggaatgtctcctcctgtgatctcataattttggcagctaaagcatattaaggaaatacgctgctgtgaaagggaattgttctgtttaatgtgccttgctaaattgatcattttaatggctatggacgcattttgttaagagaaaggaatatcgtttagacctgatgccagaatttttttttttttttttgggatggagtctcactttgtcacccaggttggagtataatggcgtgatctcagctcactgcaacctctacctcccaggttcaagtgattctcctgcctcagcctcccgagtagctgggattacagccctgcgccaccatgcctggctaatttttatgtttttagtagaaacggagtttcatcatgttggccaggctggtctcgaactcctgacctcaagtgatccccccgcctcagcctcccaaagtgctgggattacaggcacgagccactgcgcctaactctgatgccagaatcttaaacgg

SEQ ID NO: 12653 - DNA, 1065 bp, Homo sapiens
aaggaaatgttaacttttccgtgtttttgctttctgataataaaatgtttgtagttttacaataacttccctcaagttcttaattgattttaaaatatggtctattcagtattaaacccagtttttagagaggatctgtgatgcaaaaattatttgcttggcattttcacttctgtccaaaaagactgctgttttttactcacaggcaggtgaagtctctgtaggcccatactccctctccccagcagcttttgtttctagcttaccttaccttacagggtaactcaatctgtagggtttattccagagcacctccttttacctcaaggatggtatttctggttcccttaaagtaaagcctcctcagaatgttttattcctgggccatgagctgtcactctcagggaccagcctgtgcacaagtcatatattgtgtgcacccgtctttttggtctgctgctgagtctctgttttccatgccgctgtccccttgtcccatgaccacaatcactctagctcctccccgtggagcagcaggggcttaagaaattcaaacaaaacatgtatccacataaataatactgtcataagaaaaaggaagttgaaaaaaatggaaaacccacttcaatagatacgcttttgactcctttgaactctgcacagtgtgaatggagcccttatgcttgggctgaaaacttttcctctacttctgagcacatgtgtgacttaacattctccttgctgagttgaagaattctcagtatgtatcacccaaagccaaaaataagttatgattgaaatttgggcacataaagtgattttgatactcattttttcctaaaatgaaaacttagatgaatattaggtaggggtttgaacaatgtggaaatcttttaactgttctttgagtcaggtcatgtaaagtatctttgtttgccttccccaggatggggtgggggctcttaggcccttacatcttcgggtggtgtaaccagtctggataataggcatagaggactgcagatcaggagatggaaaagtactggaagtgagacagctgcctga

SEQ ID NO: 12654 - DNA, 1891 bp, Homo sapiens
ttattaataaaaatatcccccatccctttttaagatatgagcatccagtaatttcatttcctggtataacagtattgccaaataattaataaaattttattgtctactccatatgactaagtagtgaaaaacagacttaacaagtttgaactgtcatacacagtgtgttttttaccagttgttgataagaaaagtaggtcatcaatatagaaagaatgtttagaaacatattcaaggatttttttttttttttttttttttttttttttgcgacagagtctcgttctattgccaagctggagtgcagtggcgatcttggctcactgcaacctccgacttccgggttcaagcgattctcctgcctcagcctcccgagtagctgggattacaggcgcgtgccaccacgcctggccaatttttgcatttttagtagagacggggtttcaccgtgttagccaggatggtctcatttcctgaccttgtgatccacccgcctcggcctcccaaagtgctgggattacaggtgtgagccaccccgcccggcctcaaggattaatttttaagtgagattgctaggtcactcatgtctataaaagttttgcggttggtgtgagacctcttgggattaatttggctctttgagttgtgttctgctctttgaagagagacacagaattaagcttctgagtctggtctcctgtggtgcactttagggagatggctgctgccagtgttgtgagtatgcgggggggagggggggagggaggaggcgggtcaggtagcgcctgcctttgtcttcccaagggacgtttcttcagcaatgctttttcaaagctccagggaccaaaagaggtggttgtgtttataaagatgctggtgataagcagaaaattgggagatgtggagggttgtaaacatgtcatccttgcacattatctctgtaatagaaatatatatttctgtcattgaagagctagagatgatttcgaagtccttatatattctcacattttagtaactgcaaaatttctgtagtgtcatttctattatattttaagtgagttacaggcctcattatggcatcttttagttcataaaagggtctctctttaataagatgtgagggaattacagttttgttttgttttgttttgtttttttaagagacacagtttcgctttgtcttttggtatcaagttcagtggtgcaataatagctcagtgcagcctcagactcctgggctcaagggatcttcctgcttcagcctcccaaagtgctgggattactggtatgaaccaccacacccagcccagttttaggaattttatcttttgtcttcaggttcattatgtgttactgttttgctgctcattttacttcttgtcagacttgattttcggcagtcattttcatagcgtcacattacgctctgcaatgcgctcactgctttctgcttcacattgccagtgagtgcttaggtttgactttaggtggtccccaaccaagtctctttgtaagaagttcctaaaatgagtatagattataaaatgtaaatatacgagtgctcttctttgaaaactttaaaaagtatgatacctctttattatacctcaccttttatttttatttttattttttttgggtatcactgtgtcccccaggctggagtgcagtgtcgtgatcttggcttactgcaacctctgcctcctgggctcaagcaatcctcctgccctcagcctcctgagtagctgggaccacaggcatgcgccatcatgcccggctaattttttgtatttttggtagagatggagttttgccatgttgcccaggctggtctccaactcctgagctcagcctcccaaagtgctgggaatacaggtgtgaaccaccg

SEQ ID NO: 12655 - DNA, 1003 bp, Homo sapiens
gtcaagatcctattaagtcatctcacctgaggcatctggagagggagttgccttccattggtgggaaattgttggtgccagaatacattttgcccaaaactcttctcattggctggccacctagcagggctcctctaaacacgcaactcagcgaggggacccccttcacctctggcaagagagctgggtagatcagaaacttggtgacacctggctagcacagagcaggctcacttgtcttggtcccactacccagattcctgcagacattgcaaaccaaatgaaggttgttgaatgacccctgtccccagccacttgttttgttatcatctgctctgcagtggaatgcctgtgtgtttgagttcactctgcatctgtatatttgagtatagaaaccgagtcaagtgatcatgtgcatccagacacactgtgtcacctgagccacagagcaaatcaccttaacgatctggaatgaaactgtgaccagtgccgccctgggtggttctggagagactgccgtcttcttgtttggccataggtgctggggccccggcttcagtcactgtctcagacaggagtcccgataagcagatcaccagtcctccactgtccttcctgtcggccttgctgcatgagaagatagctgcttcctccctcttttcctacactgtaattattgttttacaattgagtgccttaataatagtttacaaatactatgtatttatgcaaaactgttaaagtctcatctgttatgattggatacttggtcttgtcagtagtggtcagcattgggttgtgagcttgtcctactccatacgtgtttatcctgctatgcagttttacattgtgtgttcacatctattccaaggagccttgctagaaacaacactggcggttcctgcaggccaggcaggcattggcccatgctgtgtcccataggagccaatgaaagaacgtagcttggtctgctagccagccgtggggtggcgcaggccaggca

SEQ ID NO: 12656 - DNA, 1055 bp, Homo sapiens
cagagccgtgtatgtgagaggccctcaaaacctggacacacacagaccaggaagacctgggagagcagagctcttcatcgttctcttctgctctgggcacgaaacagggccacttctgttctggaaaacacgaagagggcaaacagtgctgaggcagggaaggtcttgcttggtgagggtaaaactatgcaagagatgaaagggcaaagtcatgaaatatgcccataccagtgatcagtaaaatcatctgaagcttttattacctaccgataaagaaaaattacaggtcgtgttttaccaaaatcgaattaagtggagatttaaaaaataactttaaaaaatttggctgggtatggtggctcatgcctatgatcccagcactttgggagaccgaggtgggaggatctcttgagcctaggagttcagtaccagccctggcagcatagtgagaccctgtctctacaaaaaaattaaaaaattagctgggggtggcagcacacacctgtagtcccagctacttgggtggttgaggtggaaggatcgcttgagcctgggaggtggaggctgtgctgcgtgagccgtggtcgtcccactgcactccagcctgggcgacagagtaagaccctgtctcaaaggaaaaaaaaaaaaattggtaactcgaaaacttgtaatgctcccaacacatacaaatgattaatactcaaggtcatggataccccagatactctgacttggtcattacacagtttatgcatgtaacaaatacttacatgttttccataaatatgtaaaatactacgtcgataaaaaattctcgttaattttgagataatttccagcttacataagaattgcaagtacagtgaaaagaactttcttttttgaaccatttgaaagtaatttgtcaacctgctactccattacccttggaatacagaccagggcattctcccacagaaccgcaacacagccatccacgcgggacactgactctgatgcattcccaccgtctagtcctctaaccccattcaagagtcaccatatgtcccagcgtt

SEQ ID NO: 12657 - DNA, 1044 bp, Homo sapiens
acaaaaattagccgagtatggtggcgcgtgcctgtaatcccagctacttgggaggctgaggcaggagaatcactggaacccgggaggtggaggttacagtgagctgagatcacaccactgcattccaccctgggcgacagagtgagactctgtctcaaaccaacaaacaaacaacaacaacaaacattattaagaatttcaagatggcaccaacagagtattaaaccaagcacggggcccctctgagcacatatgaagaagctggccctgcccactagaccgtgagccaccctagggacagggctgcctgacctcctgcctcacagtgcccagtttgccctggataggccctagaggtcttgtaagttgagtattgtttcctgttgagcaactaaaagtggtcttggactttcaggaaacaaaggacagagaaattcttcccaccgttgcctccgttgcagtttagtaatatcggtgctgttagatcagtctcaagacccctctgtcctcatctgtctgcttgtgagctattcattcaacaaatattttttgagctcctactgtgtgccaagccctgttttaggggctgggaatatagcaacaaacaaaataaaaattcctgctctggaagctgacattctgttgaggagacaagacagtaaataaaataaacaagcgcaataatcgtgtgttggtaagtgcccaggcgaaaaaataaagcagggatggaggagagaaaagggagcacccatactccactctgtgattgccttgtgtgcattatttcagttaatctttgtgaaaaccctgtaaggacatttgaattcccattccctggaggagaagactaaaccccagagaggtcagtggcctgtttttatttagtagtaaacggtagagctgagaccctcatactccatgtctcattgactccaaaacctgtgctcttcaccccaaaatccaagcactgtcttttcctcctccctatgcatcagaacccacactgggagacagaatggagtttatcagaagaaccaggctttg

SEQ ID NO: 12658 - DNA, 1040 bp, Homo sapiens
actactccctgctcccccgtcacacacgttccctaggccagttccttttcacctggctgtagtcctcatgaccagctaaaagtgcgcctgccccagatatttgtgatttccctctcttcagagaaagcagggagcccctggcatccctatctgtgacaggtgccacacccgccttacaatgcaggtctgtgtgcccttgttgtatccctaactgctctcaaatcccttagtgacggcctcatttctctgcctttgtgtagcatttaaacagtttaaatggctgggcacggtggctcacatctctaatcccagcactttggaaggccaaggcgggacggatcactggagctccggagttcgagaccagcctggccaacatggtgaaaccccctttctactaaaaatacaaaaatcagccggcctggtggtgcgctcctgtaatcccagctactcgggaggctgaggcaggagaattgtttgaacccgggaggttgcagtgagccgagtttgcgtcactgcactccagcctgggcaacagagcgagactctgtctcaaaataagtaagttgataaaagtgaacagtttaaatggatgaacctttgaccctgcagtaaattccagacatgtaggagaaacagccaggtgtagagggaaggcagtggggttctgagtcaggcagacctaagtttggcatctggctcctgtgctggtggctgagttcctttacctttgtgtgttcttacagctctgtgggtctcaattgttccacctataaaacagggatgacactgtgacctttcagggttgtggagtagttgtgtgatgttccttgtctaggccaggcccagtggctcacgcctgtaatcccaatactttgggaagccaaggtgagtggattgcttgagccccgtagtttgagaccagcctacacaacatggcaagaccccatctccgcaaaaaaaatagaaaaattagctgggcatggtggcgcacgcctgtagtcccagctactcaagaggttgaggtaggagaatcactt

SEQ ID NO: 12659 - DNA, 1121 bp, Homo sapiens
cgccgcgcccggcctgggccgccggacgccgcgccgaggccgccggagctggggccgcgcgtgcggggcaggggggcggctgcgcgggctcctcggggccccgccgtaggaacagagccgggcagccggaccggggtgaccgtgcgaggactgtgtgcgatgtgaccctgtcttggggagctgtgcggggactttgtgtgcggtgtgacccctatcggggggcgactttgcagggactgtgtatgcagtgcgacccctctgggagtgtctgcaggatactgtgtgtgcgctgtgacccacatcagggggttacccccatcttggggtgacccctgttaggcggagactgtgtgcgttgtgacccctaagggtgactgtgcagagactgtgtgtgcagatgtgacctcgtgattgtgtggggactgtgatttcaggtgtgacccccatcttgggttgacctctgtctggggaggactgtgcgtctgtcgggactcccatttgtgagtgactctgcagtgtgaccagggtccaggggtgactggatgtgcaactgggacccttgattgggtgactgcgtgagccgctggttctgagacctgtggccggggtagttctaggccctttgcctgtatgcctggctgtgcgatgtgagatgtgactgttgctgacctgccgtccggggactgtgccagcgtgagacaggcatctgggagtgcccctacaaacgtgtgagattgtttccccgcctgccgcctctggagttctgtctgtaggcgtgcccgtgtcactgtgtgacggtgaccgagcgtgctgtgggctctgtgtggctgtgtttcacgtctgtgcgtgcagccttagtctggcttttcctttctgtaacatcactcaggcctgtgtgtttatgtgcatctatctttctgtgtggctgtgacccattctgggtgattgcataggtgcattcctgggttgcgtgtcctggcactgtgcgcgtttttgtgggtctgtgtgtggcccaggtccgtttgcctggccactttttcctctggggttgattgagggcactgttgccctcttagcctgcagggttggcctggcttgtcctaggctggggccttgggcct

SEQ ID NO: 12660 - DNA, 1087 bp, Homo sapiens
aacaaaacaaacaagaacaacatcaaaaaacaagaaaacaaagaaaaacgagcaataatggaaccaacatttatttagaggacagagcatttctcatgcatcctgtcatctcctcaggcgctctcatgacataggtgctgtagtccgcacttcacagatgaggcaacttaaccccagagaggttaagtgacctgtgggaggccacacagccagggcggaggagacagaaacagaatccacgatatccgactgcagaactcctgctcccactcgtgacaatatactggtggcccaacgccctttccggacaccaaagtaaccctcactgagaagtgacgccaagccacagttctcaccccagccgtgattctcgacagtggcccaacaggtgatcaacgggaaagcggcagtgcttgccacacacgggaggccagcaggtggcaccagggggccgcccggctgctctctttgcgccctagcctgccgtagttcccagcgtgctccggaagtgacgcgaccgattcgctggggcgcgtctttcccaccacgaggccaccagggtgactgcgggattccgatctgcgccggagctgcgatgctagagcactcttgccacccccaccccacggacgtgttgcagtgatatcagaattttgcgtgcggtttacccgtgtttaacctctttgcgtctcgcttctgaatcgtatccacttgagcatcactagactgatctattttaacactggtggggggcagcgaggtcagttatgggtccttcctccttaaaggggtggacagttgactttgggcaaacctcttcgcctctgtgggcaacagtttccccttctgcaaaatgagggtttggattgtagtttctaagtttagctgtggcgtgcgaattcccaggaggtagttctttaaaaattcaggtgctcaggcgtggagtgcagacctctgggtttttgcaagctagccagctgattctgatgcacaggtggacgtgggagaccctggatcagattgtccctagggtcccttccggctttaacatcttctgtttcctttctaggacatggttttaaacttt

SEQ ID NO: 12661 - DNA, 1070 bp, Homo sapiens
cagtgtcattttgacactgcaaactgtgacttgtttcatgtcaccggagctcagcccctgcttcatatcattatgaaaagctaatggtatggcattttatggggcattcttttctctttttttgagacagggtctttctctgtcacccaggctgaagtgcactagggccatcatagctcacggcagcctccatctcctgggttcaagcaatcctcccgcctcagccttctgtgtagctgggaatacaggcatgcaccaccaaacacagctaatttttagaatttttttctggagatggggcctcactatgttgcccaggctggcctcgaactcctgggctcaagccatcctctcacctcagcctcccaaaatgctgggattacaggcgtgagccaccacgcacagccgatgggtattgtttcatttaatcctcaccataacccttcgaggggtggatactgttgttgccattccaagtgaggagtccccatttcagaggtgaaatgctttttcaaaagctgatgggactagaaaaggtgaagctgctgaacccaggacttgctgcctcttactgtctgctgtccatggctagttgtgggcctggtccaaggccagatcatttgagtgtggcatccttatggtttaactgctgtctttgtgctaaagccctctggtgggggccctcgtgaaggcctgggctggtaggctgggtatctggccttccagctgttgtctgtgtctggcagagcgatcctgtcggtccttggagagagcactgcatagcctgacccatggcctgcatgttgcctcaaatgcacccttgggtctacaaactgggatagactccctgcatcctgcagctctaccctggcctacaggctggaagcctgtcagctgcaatgaagtttgctacaaataggcagaaatgccaagtgcagctcagccaggcagtgaatccagcagtacagcttgctggttaaaggacaggggctttgaaggtcctgaacaggggatgtgtcatgttgcccaagaaagtgattgcttcaggagaggggacctggcatccagca

SEQ ID NO: 12662 - DNA, 1080 bp, Homo sapiens
gtggctaaacatttttttccacagggttttctagtaccttcacaggagaaaggagacccaaagatgaccaagtgtttgaagccgtgggaactacagatgaattaagttcagctattgggtaagggggacaggattggccttgaggttgcgtttgagtcgagtatgagtaaacgtaatgaatgtgaagctctcacgcatgctgggcagcagcctcggaggttgtcagcccttattgaactttcctcagccctgaagcacaggctggtcagctccacaaggctgtggggctgcagactcctttcccttctggccctgcctgtgcctgcgctggcctctggcccatgccatgtgaagctgcctccctctcatccctcacttttcaggtgagcctgtgtgtgccactgaggttagtatactgagtgaaagaggtgagttagtataatgcacagtacatccaatgtgatcccttttgtgactgttgttttttacataagccaaagtttagaaggtggactcaaggatggaccagatcaggatgggccaggtcatgctgtgatcacagacaaccccaaaatctcctgacttatgacaccaaagatggacttgctgttcccacttcatgcccatcacagggtatattctttggctccatgcggccttcattctgggacacaggctgctagtacagctgctgcctggggcaattatcagtcattgtggcagagggaaaagaggtcatggtgaagctcacattggctcctgacgctgccaggggattgtgcagtgtcagtgttgtcgccagtgaggtttacccaagatgtgattattgctgattgaaaacttttcccactaccccaccatgatgacttgaaatatagtcaacattggcagtttttgacagtctttatggagactaaactttgttggtaaataaaagttgaaaaaaaaatgactaggtgcagcggctcacatgtctaatcccagcgctttgggaggccgaggtgggagaatcacttgagctcaggagtttgagaccagcctgagcaacatagcaagacttcatctctactaaaaagaaaa

SEQ ID NO: 12663 - DNA, 1035 bp, Homo sapiens
caggcatggtagcgcacgcctgtaatcccatcttcttgggaggctgaggcaggagaatcgctagaaactgggaggtggaggttacagtagccgagatcgcgccactgcattccagcctgggcaacaaaagcgaaactctgtctcaaaaaagaaaaaaaagaaaaaaaagcacgtgaccttatgaggctctcgctgtattgttattttaaggactataaagagtttgatttaaaattatgcagggcccctatgtgggattttttaaaaagcaaactggtgtgtattctcatgtggtttgcacagcccagcctcacagcactattgtaaaccctgctctttctgtctcgctagacagatttttttgtttgttttcttttttctggttgttttttgttgttgttgttgttgttttacagctgaaaccaaccagcaagcccttgatgaccaagaggcgtttctttcaaagctatagggcacaaacaattgaccatagatgactccgtttgcattcttctgcagaattatttccttcagggacagattttccaacctaagaaactacctaccgtgtgtattctcttgacggggagagatgaacccttcagctgctaagatccaagaaaacgcctcactgccttaaccttaactgttcttcctggcgctaaaaagagctgtattttttaaagtgctggggcaaacaaagcaaccccaaaagagttgatgtgtgttttaaaagaaaaaacccaatgaggaacaattggagatttttatgcagaaactaaataatccttaataaataaatctctattttggaatcacatctgtgcactgtattggttcttgatttttttttctttcctgcatcagaaattacaactggggacccttacaaatcctaccaagaatgtattttctggcgtccatggttttaaaattttatttatctattatttttaaatgtttttgtagagattggggtcttgctatgttgcccaggctggtctcaatctcctggcctcaagcaatcctcttgcc

SEQ ID NO: 12664 - DNA, 1056 bp, Homo sapiens
atttttcagtgtactttcttattttagaaaaaattagaatataaagatatatcaggaaggcactgtaattgtactaaaaattagattgatagtgtatagcaacttagaatcatttttatagtttctcatttcacatcagtcctgattgaaaaacaaatatgcatttcatagtatccattaaaaaattattgacaagtttgacaaattatgttaggtatttcccttatggaaaagcagccttattaaattcagagtaatttccaggaggtgtttcaccaagggtttaagcatctctggggtcctgtcactggtggccactgagattgcagcactcacgtcacataatgtgtggtgttccaggattcttttactgaagctggcaaggtggtaggtttttggtttgttttgtattttcccgagtgtgtttctctttcccattccagatcgggaggagtgcacttgtgacctcctcttcatctctgccttccttcccctccacactttcctggtcgagggacgaaagcgcccgaagggttaagtacattctgaatggtctgctctctggaggaggggccgtgctcctgggcgctttgtgcttgggctctggccctcctgtccctgctaactgcccttccgtcctgcatgaggcagcacttcctcctggtttctcacagtgcatcaggctcacactcgtccacatgcacgctcacccatcgagggcgcctccctttctctaaccccatactgctcatgttcacgtcatatttaacaaagtttgcaaatcaccctacagcatttattctgagcaaactgtttttttaaacaacgagaaaattagctggctgctggttagatattataataggccaaatttgttcaatttgttcagggctacagttgtcagattgaaactgctgtatgtggactcgctgaagtactaaaatgtcatgcctttttttttttttttaacctgtgacacattttatgtcagcaccacaagtgctgacaaaccaaggtttacaagtccctgcatcttgaatcagaattgtaacacct

SEQ ID NO: 12665 - DNA, 1048 bp, Homo sapiens
tttcaagaatcagactgaataatcaaagcaaaattgaatgggtaccacagttcttgaacatggtgggactaggaatgtaggagcaaagcaataacctttgtagttatttgaaaaattcttcttaaggaatggaaaaaaagtccagaagtaaactttgccaaagccaacttggctatttgtgatagggaacaggggtcagcaaaccatggtttgtagcccaaatctagccagttacttgttttattaaacaaagttttgtatcgtgccactgcacttcagcctaggtgacagagtcagactctgtctcaaaataaataaataaaaataaataaataaataaataaagcttctgccgggtgcaacgggtcatgtctgtaatcctagcactttgggaggccgaggcagaaagactgcttgcacctaggaattcgaaagtagcctgggcaagaggggtgagactccgtctccacaaaaaagttttttaaaaaatcagccaggcatggtggtgtgcgcctgtagtcccacgtacttgggagactgggacttgagcccaggaattcagggtggcagtgagctatgattgtgccactgcactccagcctgggtgcagtgacaaagcaagacccccaactctctaaaaaataaatgaataaagttttattgcaagaaagccgcgcccaattatttataccttgtgtatggctgctttcacataacaacagcagagttgaataggttaagtcgttgcaacaggccagatggccacaaagcctaaaatatttactatttggccctttaaagaaaatattggccaacccctgatgtacaacattcacatacatgtatgcagtgattctccatcctggttgtatgatagagttaagagcctctggtatagtttcagttctgggtgagatggagtaagcacaccccaccgtgtctcctgcaaaatagaactaacagacctggaccaaatgcttggagtagctagctaaagactctgaaaagtaaatcctggttggtagattagggaactcaaaagtgtcat

SEQ ID NO: 12666 - DNA, 1025 bp, Homo sapiens
ggccagggctgctcccccaacaggaaggggcttgggcaatccacaggaaagccaattacagaagtaaaatgtgagcgtcctcccggctgcagcctccagaggctgcaggtgtcacctcccactagaccctttctccgcctgggtgtcctgcccggggaggatgacactccctgagactcgccagagggtccccgtagatgacttccccgctgctgacatccgacagctactctgcccgggagaattgccaggagatcggggtcttccaaacacaaccagcacttaggaggcagtgcttgtctcaagtttgaggatctgaacggcctgggttcaaactagattttgcttctggctgaccttgggctggtgacttcacttggtcacttgcttgatttcctcatttttttcaatgaggataatcgggagtatcacgcttagtggtgaggaagattcaatgaatactcgtagaatcatatcatctaaggcttttcttttttgcattatgctgtctacagtagaactcttgtagtcccttaaagctatatttgactatctaaatcatacgttgattacaacggaaacaaacgcaaaatcaccagcaatataggggcattgaaacgctaaagccattccttcataatgatgcataactgttcatacataatattcacatttagagatcaagtgtgtcttagcaattgcaactgaattgtcaggtctctggatagattattacatgctgttttaggtgcttggatgtattggctttgagttaattcgaaggtaacatggctttcttggcacaatagtgtccgataaacaatcttaattaaatcattgaacaccactggctttgcaactgttctgatcttaagcttgtcatttggaagtggagaccaattgtaaatagaactgtgataactcaaacctcatgtggttgttttatggcccgtacagtgcaggtgttaccagtttcctttgaagatagggagggggtatggaggagtttaaaaagaagtgttttc

SEQ ID NO: 12667 - DNA, 1035 bp, Homo sapiens
tcttaaacaggttatgattgataaatataaaaaaaaataaatgttaaagtttgtacattcttagtcacaaatcaaggcattttgagtaatttccaaacttaaaaaacacatttttatgatttctacttatttattttcttgagacagggtctcactcttgtgcaagctggagtgcagtggcgtgatcgtggctcacttcagcatcaacctcccaggctcaagtgatcctcctgcctcagcctccctagtagctgggactacaggcacacgtcaccacactcggctaattttttttttttttagatggagtctcactctgtcgcccagtaatttccaaacttacaaaatacatttttatgattgctacttatgtgcaccacacctggctaatttttgtatttttagtagagatggggtttcaccatgttgatcaggcttgtctcgaactcctgacctcatgatctgcccacctcagcctcccaaagtgctgggattataggcatgagctactgtgtccggccttggctaattttttgtagcaacaaggttctcactatgttactcaggctggtctcgaactcctgggctcaagtgatccttctgccttggcctcccaaattaccgggattacaggtgtgagctactgcacccagcctctacttattttgatggaaaaacatccaatttaaactttaccaacactcactggctgactactggacatgtttttctctcctccccctgcagggagtcctgtcagaagtacagattgctaggctgggcacggtggctcatgcttgtaatcccagcactttgggaggctgaggcggatggatcacgaggtcaggagatcgagaccatcctgtctaacacagtgaaacctggctctactaaaaatacagaaaaaaaaaattagctgggcgtggtggcaggtgcctgtagtcccaactacttgggaggctgaggcaggagaatagcgtgaacctggaaggcggagcttgcagtgagctaagatcatgccactgcactccagcc

SEQ ID NO: 12668 - DNA, 1042 bp, Homo sapiens
tgttggggtgatcagaatggaagcccttttcaaaatagactcttagtatttttgtcttattcgcaatgcattgattcagccccagaattatttgccagaaatagactttcttcccctggtgttgggagccaggagggttggaaagctcaggaaccctgagctggttcatctgtttgcatattgggtaggttaatttccctggagcctgagagtctttggccagatttcagctgcgtctgcctggctcttttgctgcagctgtgagattggggtctggttccagcagtctgtcactggtcagcctgagtatcacaccctgagctctggggctgggagtttcttcccacaccctctcccttgtgccttaagttgcgatggctctgagtatacaattaatcggaggtgaggggtgggtgtcacagctaatcccaaattcaaaaattagtccaaggtgctgcaaaatataaatttgatgtcagtagaaagtcgtatcctaaaatgtaaaaactgtaagtgtacagtagttaatgagctcagaacatctgataactgcaatttaaaatgggcaaaaagtttctatgagtctttcagtctaagacccaaagcctgcgcaacatcacttgatctgagccacttctaaagagacatataaggctaggcgtgctcacacctgtaatcacagcactttgggaggccgaggcgggtggatcacttgaggccaggagtttgagaccagcctggccaacatggtgaaacccccgctctgttaaaaatacaaaaattaaccgggcatggtggtacacacctataatcccagctactcaatactcaggaggctgaggcaggagaatcacttgaacccaggaggtggaggttgcagtgagccaggatctgcactgcactccagcctgggcgacagagacagtgtttaaaaaaaaataaagccccacagatagttggggtcacaccaggtgagtgtgcggccagtagaagaagctgcctgccccttggcctaggcatgctgtccaggatgcagcctcac

SEQ ID NO: 12669 - DNA, 1032 bp, Homo sapiens
aatgctaggggtaataggtatgaaaaagtttaagaaatttgtggagaaaaactcaaattgagaactctaaaaattaggaagagactcctttttgcacttctggtggtggactccctcaacccagccttggaagcctgagttgtttggagaggccaggctttagcacattttttgggactgtgtggtcatttcactgccgggccagggagatgacgaatcagccagcaagagcaaggcagagattcaggcctctcctttgttttgttgtcccctagtttggaccccaatgaccagaagtctctagaggggatgcagaagatggagaaggaggagagtcccacggatgccactcaggaggaggatgtggacgacatggaagggagtggggaagaaggggacctggagggcagcgacagtgaggcggcccagtgggctgaccaggagcagtggttcggcatgcagtgagggggcggcagctccatggccgcagtggcctgccctgctctgagcacttccgtggactgaaggaaccgtaggagcctgctctcagaaggacaatgattcagcatgtgattgcagcaggggtctctgccccctcgctcccaattcctagtcgtgacttcatttctaaaacagagcctgaccaaccttccatgtatctccatcctcccctgctccagccagggaggactgagggagtgccccgagacccacgcacatgttggggcttctgggccaagagtactttttatataactaatttctaaatccaaaagctcaaggaatagacagtgttctgtgacatggattggtttgaaggagttacccaccatcccagcacgataatgtcatctcccaagttggatggcagcacgatctggccctagggagcttcctgttcccagaagtcattgtcctgggctatccagatgtccctagtaaatcttgcttccttctgcaatgttagtaatgccttaagctgacagttgctattttgcagaacagttttcctctttgcttagctagtaactt

SEQ ID NO: 12670 - DNA, 1051 bp, Homo sapiens
acaaaactagccgggtgtggtggtgcatgcttgtaatcccagctactcgggaggctgagggaggagaatcgcttgaacccgggaggcggagattgcagtgagccgagatggcgccattgcgctccagcctgggcaacgagagtgaaactctgtcgcaaaaaaaataaataataaaataaagaccctaggagtcttccatcttaaacctagccctacaggtgaccgaatgcagctggagaataactgcttgttaagaggcagcaaaaccttgggttttgttgggaacatcatctctcactactttgatctcttggccatatgacagactaatcattagtgtcgcatttattcttccagtggtcagatggggtgctcacatgctgcaggttccttacatgtgcttgtttccttccctaaactgaaggtgcctttgaaggcagtctttttctacatccatcaagttctctggggaagagcacttcttagctattccatcaacactcttgccagtctaatctcaccatcagtttcccgtggcctgccctttgtctgaaactttgaaggttagcaatttggagagctgtcagagtggaagcatgggttggaatggtaatggcattgaatgtcttcacgtgttttacttttttcaggtcttatcgaatgttacttagcctccaacagtattcgagaagcaatggtaatggctaacaacgtttacaaaactctgggagcaaatgcacagacccttacccttttagccaccgtttgtcttgaagacccagtgacacaggagaaagccaaaacattattagataaagccctgacccaaaggccagattacattaaggctgtggtgaaaaaagcagaactacttagtaagtgtgtcttattttctgtcctgttcatcattaatttttataaaacctgacctcagttggagccccttgtcccagctagttacagatgactagacaggtgtgtgccttttgcagcaggtctgagcctgcttggattggtttatatttagcccaaccaaacgtagctggcttag

SEQ ID NO: 12671 - DNA, 1026 bp, Homo sapiens
ggaggccatacggctcgcaccttgtcgcttagattgttatgaaggtaagaaagaaaacataggtgaatggtgtgaatccgtgggtgtggcagcagccctcagatggaaggtttcattaggccagcacttcccaaactctgttagaataatctggggaagctggccggacgtggtggctcacacctgtaatctcagcactttgggaggccgagacgggcagatcatgaggtcaagagattgagaccatcctggccaacgtggtgaaaccccgtctctactaaaaatacaaaaattagctgggcatggtggctcacacctgtagtcccagctacttgggaggctgaagcaggataatcacttgaacctgggaggcggaggttgcagtgagccaagattgcgccactgcactccagcctggcgacagagcaagactccatctattaaaacaacaacaacaacaacaaaaaaacatcatccggggaagcttttcaatatcctgacgttgggtctctccagtgtagatggaaatacatggaattgggaatagacatcgatatttttggaggtccccaggggttaccaatgtgcagacaggtttgggaaccactgcattaggcattttacatttatttagggctttcactggatttgtcaccccatactttcataatccattttttctgattttttttctggtttttggtgagggtatagttgggatggggttttttttttttgtcctcccaccgctcgcccccatccagtgtggcgtactcattaatatgaatctctctgtgtcagacaccatgcaagatcacttagtttgcctattttttttctcttactcctcttttttttgagacagagtctcgctttgttgcccaggctggagtgcagtggcatgatctcggctcactgcaggctccacctcccgggttaatgccattctcctgcctcagcctccccagtagctaggattacacctggctaattttttgtatttttagtagagacagtgtttcaccg

SEQ ID NO: 12672 - DNA, 1538 bp, Homo sapiens
cttcagcctggaagaaaatcattttgcactcaccagaagcttggtttattgcagtgtctaacctagcttgcctgcttaggactagggattttctttatattcagataaagttcaaggacaagaagagacttgggcttgtgttatgcaaagtcgtttacttgagtaataaataggtgtcacttgtgaatgacattacctttaacaccatgtagcgtatgttgtgttctgaagaactgcaaccacagagttatttgttggtactgagagacttctgctttattctttgtttttgctatcctgtcctatataactttttttaaagtcataagcttaaagttttttattacgaagaattttatatttatgcaaaagaaaatagtatctgtatgaccaatcatccagattcagcaactaagaggatttataatagatttaaaggttcaatgtttaataaatatcttaaagttcactagagaaaaaatccttattgcgagataacgtggacctattgggaagcttggcagatctgtacttcagagctggagacaataaaaactctgtcctcaagtttgaacaggcacagatgttggatccttatctgataaaaggtaagtaattcttggggcaggaagacagtggctgttgttgggggggatcagagataatagggagaatatgcagcattaatactcgataccaagtttcatagaaatggtgtataaaacttatactagtcttttactttttttaggtcatgacacatgtctctaacgcttaggtaataccatttgagcagctgtttttgcttgaattcaagtgtcttctccccacagatcattatttggctttttttcttttgagggggtcatagctcctccttatgacttataaatttatggtgtgcctgactgagaatttggatggcatccctaaaaccataatatccttttagggaattttgttttgccatgtccttagtataattaaaaaggaataagaaagggataaggtgattaaaggcagtaattaggcgtgaacaacagaaaaatcactgatcttgaaaaagattgcaggtgaagggtaatcttcacagggacctccaacagatggcagttaggacactggcagtgagttctcaggaatagtgggaaataaggtcagatagatatgctgtctatttgtaaaggtccaaaaaaggccatcagaaaaacagggccttgtgacaataaacagtcttatgagctcttaagccaggggaatgatggagctgggaaggggccatcccaagcgtttagatgaggaagcagatctagaaggatggatttgtttgcacaagatctcccctcacctcaagtgcttattcctcttctccaagctgcctgcacccatgatgaaaatgatgttttagaaatactagtctggcaacagctggcagcttggaatggcaatggcagcttggaatctcagacccaggcccaggggctagcaggagcattgcagtaatcttggcttgagaggaattttcatgggaatctgaa

SEQ ID NO: 12673 - DNA, 1049 bp, Homo sapiens
agtatcgcttgaacccaggaggcagaggttgcagtgagctgagattgtgccactgcattccagcccagggggacagaacaagacactgtctcaaaaagaaaagaaatactaaattatggtttttctctcatgcatcgctcagaatagggaagcagttgccttttagccaagggaagatgtagcccgttgctccttgcatgtggaagagagatatcgtgccttactttctttcttctgctttctgttggtttaggcttgttgtccctttctgtaaaaggggcagaggtggcatccatgacaatgaatgtgatccaaaccgtgcctaacttggactggctctctgtgtggatcaaagcgtatgcttttgtgcacactggtgacaactcaagagcaatcagtaccatctggtgagagccacaaagttaattcagtgttcttgaggccctttgcttgtctggaagtctgatgtatctgaagtagcaaaaagaaaaatgagatgctttgctgttggtgctgcagccagtctctgggatgtgttagtcttttatactgaatggtcccaaatgtaatcatgtaatcatctctgttggagacctgtaaaaatagaaatctgactgagtttagctctgtgcctgcacaggtagtaacccttgcaaagcaaagcaggctaccttggtgtgtcatttttttttttttttttgagacaaggtcggtctctctctctctctctctctctctctctctctctctctctctctctctgtctctctctctctctgtctctctctctctgtctctctctctctctgcctctctctctctctctgtctctctgtctctctctctctctctctctctgtctctctctctctctctctctctctctctctgtctctctgtctctctgtctctctctctctctctctctctcccaggctagagtgcagtggcgcagtcacagctcagtgtagccttgacctgtcaatctcccgggctcaaaccatcctcctgctcagcctcctgagtatctgggactacaggcgcatgcc

SEQ ID NO: 12674 - DNA, 1043 bp, Homo sapiens
ctacgaaaagtaaaaattaaacaattagccgggcgtgatggtgcgtgcctgcggtcccagctactcgggaggctgaggcaggaggatcgcttgaacccaggaggtcgaggctgcagtgagccgtgatcgcatcattgtcctttaccgtgggcgacagaacgactgcctgtctcaaaaaaaggaaacgggagactccattaatgggtgggcgtggcgcctttcatgtttccttgaagcactgagctgattccatccttgagtgcatgtccctctcctgcttaatatcctttattggccgggcgtagtggctcatgcctgtaatcccagcactttgggaggccgaggcgggcggatcacgaggtcaggagatcgagatcatcctggctaacacagtgtaaccccgtctctgcttaaaaaataccaaaaaaatttagccaggcgtggtggcgggcgcctgtagtcccagctactcgggaggctgaggcagaagaataacgtgaacccgggaggcggagcttgcagtgagccgaagtagcaccactgcactccagcctggacgacagagcgagactccgtctcaaaaaaaaaaaaaaatcctttattgcacttatgaaaattctttcccatggcctctgaaggcaaatatctgccctccactctctgcgacttcatctcattactctgttcactgctctctagcctccctggctattctgttatttgtttttatttgtttatttatttttatttttttgagacagcctcgctctgtcgcccatgctggagttgagtggcgcagtcttggctcactgcagcctccgcttcctgggttcaagcgatcctcctgcctcagccaaccaagtagctgggattacaggcgagcgccacacgcccagctaatttttgttattttagtagaaacagagtttcactatattgaccagtctggtctttttttttttttttttttttttttgagacggagtctcgctctgcacgatcttggctcactgcaagcttcgccttctgggttcacgccatta

SEQ ID NO: 12675 - DNA, 1029 bp, Homo sapiens
agaggaattccttttaagcccttgactcaagggttcttaacctggggtccaaggatagaattcttcttttccctgtaaaatatgtgtgtgtgtgtgtgtgtgtgtgtgtgtgtgtgtgtgtgtgtatatatatatatatatttttttttccagtgcaattccaaaagccaaggtgagaaagaaatgtatacgctgggaatcactaattttcccattcctggagagcctggttttccacttaacgcaatttatgccaaacctgcaaacaaacaggaagatggtaagaacaggtctctatcctcactctgtgacacaagaagattttctccatttgacttcctaccacccctctttttcttgccttgattcatgtacagattgagagtgaaatcataggaagtacattatcttattagtcactctcacaaacgattcttggcaacaaggatgacatgcagaaaatcttttgaacaaaaacaaatatagttataaaactatctggactgtcatttctattttgtatcctgttcaaatgtataaaaatgtattaccacagtgagcatccagagctgcaaccagtacatttgggatgtatttgcaaatacagttttttttaaattgttctgttttagaagtgatgagagcctatttacaacagctaaggcaagagactggactgagactttgtgagaaagttttcgaccctcagaatgataaacccagcaaggtaagaccctcttcttgcctgcttaattggtaaatcaccttttatcccatagccaccattgaacacactaaggtcttccattgcaagaatatttttaatttctgcattgcaatgttgcttaacttccagtatatgtctagtatgtaatatgagttcactgaatcacactaaataatgaattgcaggccgggcgcagtggctcacgcctgtaatcccaccactttgggaggccgaggcgagtggatcacttgcggtcaggagttcgagaccagcctggccaacatggtgaaacccccatctct

SEQ ID NO: 12676 - DNA, 1042 bp, Homo sapiens
atgttgcatttaataggaaattgtattatttcttctgacttctccaggaaactcttttgagaaaatggaggaaatgtgcttaattctggacactgtttatcagttctttcaaacaaatctaatgctgttacgtctagaatgccacatgcccatcctttctgtcatcaacctggaaaagaacaacaacaaatattttaacctcttcctcgtctaaatctacttcctttattcattcttcaagatcttcatttttagcaatacctcaatcttaaatctgaagtgtactatgtaacattacttacgtctattcccgcttttctgaattttatttcagaaagccgcaatatttttcagacactgtctgagactcttctgatgctttctgagatgttctcccaacagtataatttgtattatgttagacatggtttccctgtaccctgcaagggtctgaactgaattccattcatggtttccaagaccattattataattaccaatttggtacttatccagtccccatttctctgccagactgtttgacttgaccttttttaaacttaattttgttttcaacaccatttgaaagctcagtaaacttaatgcatatggtgagtcaccacagtctctacttgattctgaggaaaaggaacaaggaagaagacagcctgggaaagaagaaaaataacataaaagaaaatcacaaggctgggtgcggtggctcacacttgtaatcccagcactttggaaggccaaggcaagtggatcacttaaggtcaggagttcgagaccagcctggcaaacatggcgaaaccccaactctactaaaaatacaaaaattagctaggcatggtggtgggcacctgtgatcccagctactcaggaggctgagacaggagaatcgcttgaacacagagggtggaggttgcagtgagccaagattgcaccactgcactccagcctgggtgacagagtgagacttcatctcaaaaaaaaaaaaaaattttttttcactgcaaaggccaggcgtgatggctcacac

SEQ ID NO: 12677 - DNA, 1048 bp, Homo sapiens
ggaaagtgaagatatcaaagattataattcaaaagcacacatttacctgatgaaactgaaggctgttgtatatctctgtaacgtacacctaatagtttgaagtaacaaaaatatcaaattttggctattatgcttgcacatagttgtcagtctagtacagataaattacataattaacttttttgtctattaacaatttccttaaatatttctgggattaatatatcatttcatgttacaactgcagaaatatgaattaccatatcagtctttaaaaatgccaaattctatagggcccagtagtatactttacattttgtaatttttaaaattcagtgtatttacaggtctctaaatgaatcactttagaatgcttgatttcactcttggtaaatagaatgattacctgtattttatatatgcaactgtttacaaccaaaataagattgatttagaacaaagtacattaccataagtatgtctgtttaaattgtcatgatacaatcaatgatgaaacctatcccaaagctgatgacctgaagaaaaatacgtacagattcagcttctgagattaaataaatagtcatgataggaaccctatgaataatttctgggattcgggatctcttatgagacttaaaagggggcttacaagaggagactattttgttttgatattgtgtttaacattatgctttatctcaccttgacactttaaagttggtgttggtattaggagatctgcacatcccacaccggtgcaacagtttgccagctaaattcaaaaaactcctggtgccaggaaaaattcagcacattctctgcacaggaaacctttgcaccaaagagagttatgactatctcaagactctggctggtgatgttcatattgtgagaggagacttcgatgaggtgatgtatttccctttcccttctcaaatatctccctttcttgattattacttacataagctttatctttagaccagggtttctcaactggtaaggtttttttttttttccctttttcttttccaaatgtaaaatt

SEQ ID NO: 12678 - DNA, 1029 bp, Homo sapiens
taccagctggcttgaatctgcaggggtggttttgatgagtaagaactttcagtcctgcaaatcagatgtatgcatcagcccagactggaagaacatggcaccctctgccccaggctttggtttccttctcacccacagaagaggaataactagaatacttaacgatgggattgtgaggattagcccaccaaaaatctacaacttgccttagtcataagcattcaggaaacagccctggtataagaccaatgaatagccctaagatttagaccaatggcaacacacaggaactttgattaggaaaacttgggccaggcacaggcagaagtcacttttcattcatccttgccaacgtgtgagcttcagaagagtggaaatgatggactatcaacaccttcagcctacgactcaaatagaattgagtacttgcattagtgcatccctgaattagtgggtggttcatagttgtgtgatcacagagatgactgccatcccatctgatcagctgtagctccaacggacttgttgtcatccagatgtattacaagtattccaataatttcaaacacaggtaagtatttcagttgtgagaattatgtcagttatttgaaagataaatatgttagaggattaaagcacttcagttaatcatgtaaacagttttgtaatcaaaaagttaaaactaggctgggtgcagtggctcatgcctgtaattccagcgtgattgggaggccgaggtgagtggatcacttgaggtcacgagtatgagaccagcctggccaacatggtgaaatcctgtctccattgaaaatacaaaaatcagccaggtgtggtggcacatgcctgtaatcccagctactcgggaggctgaggcaggagaatcgcttgaacctgggaagcagaggttgcagtgagccaagactctgccactgcactccagactgggcaacagagcgagactctatctcaaaaaaaaaaaaaagttaaaactaagaaagtttgcagtaatagggaaatagaattttacct

SEQ ID NO: 12679 - DNA, 1437 bp, Homo sapiens
caaagccattcttttaaatatttgtgactctttcctaaagccaaagtttctgttgaattatgttttgacacacccctaagtacaaggtggtatggttgtatacacatgctgccttcttggggattcaaaaacaggtttttgattttgaatagcaattagtgatatagtgctgtttaagctactaacgataaaaggtaataacattttatacaatttccatatagtctattcattaagtaatctttttacagttgcatcaggcctgaacccgtccattcagaaagcttcaaattatagaaacaatactgttctatacgagtgaccgattatgctttctttggcctacattctttattctgcggtgaagttgaggcttataagttaaaacaaaggaactaacttactgtccaccagtttatacagaactcacagtacctatgacttttttaaactaagatctgttaaaaaagaaatctgtttcaacagatgaccgtgtacaataccgtgtggtgaaaatgaattcagacttattaaatgatgaacttgttaaatcttctcagtgtctatttatcagcacaatacacacaggagaactgttgatggcatattgaatagattttcctgaataaattgctctggaaaccacacggttgcattttggttttgcttctttcaaatagtctgttttccaaagatggattataatacagatactaatactctttgagttgtaacctggagacatctatttgtgtaatagagtgatgaggtggaacgatcctcctctaccatttggggagatggggattaatctgtgtccatagttttcttactgtctgggttcacttgaacttagtggcgaatttgaaagcagctcactttgttttctgagtcagccacctatattttcatgcacagttctttgatctcttcccccttccctggtttatatggaacacagtatcatgtcatattttgtcacaagtatgtatcttaatttctcaaaggtacgctaaaaatgagtgaagagcatgtcatttgaaaagctttttttcctgttacaaagtggtctccctgagggcgttggcagaggacctagcgaggaactctttgaaggacacagaagagcacagggccatggactcccctctgctaacaagccccggtcctgaggcatctggaccctgccatgctcccatcaaagagggaagggggacctcattacctgcctgctccacattgacaatatccaaacttgtgctgtttcacttttacgtaatattctcccagacttctttgactataggaagaaaacagtgaatgataattgtgtcaaaggcaaattctgcacatctttatgtcctgaatgttaatgaattgatactaggatttcaaaatgctataaagtaaaattgggctgctctactaggattatat

SEQ ID NO: 12680 - DNA, 1047 bp, Homo sapiens
gtttgcactgatgaattcaaatccagttgacctcatttttgtgacgtgtatcctaatgtaatgatactggctgcatcagtttcggtttctacttaatgcagaggcctttaaaaaatgacttagaagatcagtgttggttggtatcagtttcgactcctgtttggtcatcaacacaatttgtagatcttatgctcaagcttcctctctctcatcaggcagatataatttgccatccagtctacttgtgggcatgaaagtgcccttgacataggtggcttttggttgaaggcttgcagacatttaatatatatataaaatacttaactaattttattaaaatgaaaagttgtattcaaatgttgattttcatgggacaatttaaaaaccactgcctgttttccaggtacataagtactttatactaccatttcttttttttttttttttaactttgtaaatgtgatggaaaggctgaggtatatgttgttgggtaaaacatgagtgtttgttgatctgtttctgctgccgtagctgtctgatgtacagtaatgcgaaaccgcattacaggttatggctcagaatcttaggatttggaagctaggcgattaccctggctaaacctttcaggagccagatgttcctagtggtctgaggtagccttagggaggaaatgaagagagaatagaaagaggcaggcccacgcttaaagtgctgagagggaaaaggaggaaacaaactgatttttgatggagaagccagcaggaatcagcaggagaagctggagtatgtggcataactaaagaatcaaagccggggcgtggtagctcacgcctgtaatcccagcactttgggaggccaaggtgggtggatcacttgaggtcaggagttcaacctgatcacaagaggtcaggaggtctgaccaacatggggaaaacccatctctattaaaaatacaaaaattagctgtggtggtgcacacctgtagtcgcggacactcaggagattgaggcaggaaaatcactggaacctgggagaccatggttgcag

SEQ ID NO: 12681 - DNA, 1034 bp, Homo sapiens
tgaagtggggatcccatctttcaccgggagtatttcctgagttctaactctgtatgtgtgtctagagagaaaaaaaattacttacgaaaaaaacatttttgttgctcagttgctgttttattaaatatgcatctgtttcatatctttcctcgaagactattattactatgcttttattgcttcttgttgtataatatttttatcagaacgagacttagttacatattttggggtccaaaagtgaactttataactgtaaaattaaggtacatttagcagttccgtgctactttatctgtatctaatgactatccagtctgttacaactggaaccaaaacaaaatttctttcccacaactacctacgtgctgacaagtgagttctgttgcaaagtttgtactttgatagaagaaccctaagtgctctggtggtgtggatgccccatgctgtgcaatgatttctttctcccattattatcttatctgttcaaattattagggaacgtgctttcttacagtatagcacatgactgacatcctttgccctatatagacatgagcataaacacaaatgcaggcccagaaaatgcatggcaaaataagtacaatgaaccaacattttcttaatgaaatgaaaacaacactaacattttttcataggtaaattaaatcagagatcctcaggaggagatacccatggtcctctggaaaacactgatgggggagggttctgagtatttccaatcctgtttcttttcttttcttttctttccttttcttttttttttttgagacggagtctcgctgtgttgccaggctggagtgcagtggcgcgatcttggctcactgcaacctccgcctcccgggtgcaggcgattctcctgagtagctgggattacaggtgcacgccatgttggcgaggatggtctggatctcttgacctcatcatgatctgcccgcctcaccctcccaaagtgctgggattacaagcgtgagccattgcatctggcctgcagtcctgtttctaacagcatt

SEQ ID NO: 12682 - DNA, 1187 bp, Homo sapiens
gaccttcacacagggaaagacagcccccaccacacctgcttccagaccagcccagagtccccagcagcaacatggtcccctcctcagatatgggtgccgactccaccaggtggccaagggtggaggggccagttacacatggcccctgcagcctgctgtgaggatggtgggacgcttctactctcgagtcggctatggtggggctatgcgcaaggcctggggacagtggcttatgagggatgatgcctggaaagccctacactccctaccccgcagtgggcaccttccccagcgctctcatcccaaaacatggacaggaagtccaggccccatccagcccacctggctaggaggaatgtcctgggatgggccttgcaaggagcaggatggaaggaggggagccacacccccagggccttttccctccacaccttcactcaagctgtgccctccgcacagggcaccattctggccaaaccgctgggctctcaagtgccaaataaggacaaacaactgtcaggcaccgggagctgcgctgcagtgacagccagcggaccagcacatggcacagggcatgcagcagcttccatccacctgccctgtccccagcaggcctgagccacttctgaggacaagatggcatctctgggcggcactcagctccatacacggcagggccaccagaccccactccaggcctggtcccagcacacctcccctgctgcatgccagctgccgtcagcccacgcctcgcacgaccacatcctgctcccagctgtccccataggaatccttcctgcccccactgtggccagcctggctaagcccagcacccctgcccttggccacacctttttcaggtgacgccttctgcgcctcgccaccacaaggccatggacgccccaaaccacgagtgccaggctgtgctggcctccagacagaagggagagcaagcagctcccttggcagggagggggcaagcctggctccctgcagtgggtgggggttgttcacgcctgtaacgagcactttgggaggtcaagatgggcggatcacttgaggtcaggagttcgagaccagcctggccaacatggtgaaaccctgcctctactaaaaattcaaaaattagccaggcgtggtggtgcatgtgtagtcccagctactcaggaggctgaggcacgagaatc

SEQ ID NO: 12683 - DNA, 1024 bp, Homo sapiens
agccgaaataaaacgtgcttcagtgcaactgtagacaacacaaccaactacttggctgcttctgagtttgttgtgaaaagaaggctaagaacataagggagccaaagggcgggggagctaggaaagccagcctggttccagatccacccagggtccacatggaaatgcagttccaggctcccttcaaatggccctgtgctgtgatcagtccccctgcaaaggtctctgagccacagtcccgtcatctgagaagtgaagatgaaacaccagcctcgtggggtcacgcagctctccctgactcccgcctacctgaggatccctctttatcccacctggctgttcagcccgcctggagggaatgtgacgggctggaggcaacagacccttcctctctaggcctcacttgccctcatgctgttacctggaaactgtcttgctacctactgccccttctgtgtgctgagggacaggggacctgtcttggcacaaacatttatagggccaggatggtccttctagagtcttccgaggtactgggccacaccccaccctgccaggtcctcataaccagcttgagtggggtctgttactggctttgccctcaggcatccagcagagacaggcaagtcggggcagggcagggctggacacaccagtcaaaggccagagctctggtggcgtgaccacacctacgtggagagcaaggctgatggcatggcctcccctggtgagagagcaggaagaggcacaggtgagcctgccacagcagcccccagaagccaccatggggcttcaaggctgtgggaatcagcttgagctttttctaaggtggggaagctcttaacaggagcaggcctgctggctgtccccctcctcctgggacgctggagggcaggacacagggcagcatctgacacaccccagcagcaagggcttggcccagaccagccttggggagagaccgcccacccccgggaacccccaggccacactagctccctggtggtcttaccttccccagagc

SEQ ID NO: 12684 - DNA, 1088 bp, Homo sapiens
cccctggcatgaagacgtcatatcccagatgtttaacttctggctggagggagggaacttaatttggttcattatctactgggtacctttcctgtgcggaggggaggaccagtgactttccataataagctttctcctttaaaaaaacttcagactcttacttactcttttggttcacactaattagcattcattttccagagaaagctgcttgactttgaggaaataaagacaggtgtccttaaaaatggactgcaaatctggatcagtgtcaggtctgctttagggtccatgaaatcacccaagagtgttggtactaaaagtggtgtaggctgggcgcggtggctcgcgcctgtaatcccagcactttgggaggccaaggcgggtggatcacctgaggtcagacattcgagaccagcctggccaacatggtgaaaccctgtctctactaaaaatacaaaattagccaggcatggtggctggtgcttgtaatcccagctacttgagaggtcgaggcagaatcgcttgaaccaggaaggtggaggttgcagtgagccaagattgcaccactgcactccagcccggttgacaagagaaactccatctcaaaaaaaaaaaaaagaaaagtgcataggggtttgttcccccaccctctgaaagaccccaaggaaattctagaagcaaaaatttgacctcttggagcacagagactaagtataagtggaagaagcagacctaaccctcctcccaggcagtcagtcctatgagttttaggctgaggtttcattttagcctctgatcgatgtatctgtaaagctgatctaaactcccagtttcctagaagccactgctgtgagcctgggggttgtactgaatggctctgctggcacccaagagcagctgactccactgtcactgcccccgtttctgagcctccagacaggttctgggaggagccagccccctatgaattgtatcacttgtatagatagagatttgacttcaggacctccctggatggtggagattgtgtgtgcccatgtgtgcaaggagatagatagattctcaatccagtgaagcagtagcca

SEQ ID NO: 12685 - DNA, 1049 bp, Homo sapiens
actcaggcctgggcaacagagagagactctgtctcaaaataaaaaataaaaataaggctagtcttggactttggtatttaaataggaaggagtactaatatttgtagaaatcctttagaaatttgtgccattaatattgtcaccttgtatgaaatgttgtgttctagaggatattaaggattcaaattttatgttaggcacattttgagttattttggggtgactcaatgtctgactctactaaatgccatattagcatttaaaatgcatttgaccttaaatctttgttaattatgccatgacttggtatccaaaaataagctgatacatacatacatacatatatgtgtgtgtgtgtgtgtgtgtgtgtatatatatatatatgtatgtgtgtatatataatttatttggtgctaggaaatgttaaatttaatcctttaatagatgctctttaaaaaggagtcttgctgtatgtatatactattaaaggggaaactatgtctgtgattgtagtgtgtaaaagatagtaggtgattttattatgtactcaatttgaggtctcaaatgtagttatcctcaccatcttactgtctctgttagtagtttggtgttgttttcctggtaagtagctaaggtccttaatcattaacacctaagccttaattgccttagcacaacttcccctaaaagggagtatcagtactttttaaaagaaactaacagttgggctgctaatttaatctgctgcttcatttccccctgttctaagccattttatgatggtttggtcaagttgccttttattccccttttagagttttcaactttccttcacttccctttttctgaatttaacatcagatttacaagttggaagattttgttttgttttataagttttgcaatgctggtgatctcttatgacttgtgcatccaaagtcaaaatgacaaaacctagttacaaattaaacacacagctttctgtacttaatttgcttcagtgagatcacagctgaggaaactagttctggaatgtggttagtgttatt

SEQ ID NO: 12686 - DNA, 1035 bp, Homo sapiens
catacaacaaggagacaagcccttctttctactttgccagtgagttgggttttttatactaatttttaattgtacagtaaaacactttttaaaggatacatgttaagggagtagacttgttgaacaatattttccttgtgccagtcaaattattgaaagtacttatatatataaataattcagtttttaaaatggaaatacccaatttaagaaggctggagttaatgaaaaatggagttgtttcagaaatcaatttttgcataccaagcaaatgtgactgggaaatgcctaatattttccttgttagagaaacttcctaaacagctttatacacacacacacacacacacacacacacacacacaaacacacacacccaagccacaagcttggtataaatttaaaatgtttatttatacacacacacacacacacacacacacacacacacaccccaagccacaagcttggtataaacttaaaatgtttatttatattctgataagatgaaatttatgcctaccaggatttttaattgaataggattgatgaaatactaagggaaaaacttttcagtcctgtgcatggctaaaggtttaaaatactcaggaagggccaggcacggtggctcacacctgtaatcccagtgctttgggaggctgaggcgggtggatcatctgaggtcagcagttcaagaccagcctagccaacatggtaaaactccatctctactaaaaaatacaaaaatcagccatgcatgctggcatgcgcctataatctcagctactagggaggctgagacaggagaattgcttgaacttgggaggcagaggttgcagtgagccgaagtcgtgccactccactccagcctgggtggcagagcgaaattctgtctcaaaaaataaaatattcaggaagcagacccctcaggatatcttgagcttaagcaagagatcatgacctctcaggtcattatcttggacagcacaggtcccctctccccacctggcaaaaagtacagaaatagttgctcct

SEQ ID NO: 12687 - DNA, 1076 bp, Homo sapiens
tgcctacgacatgcaagagaattttataataataaaagcataaaggtgttctccagcatgaaaacattttgcttcactacttgatctgagggtcactggcattacatattttttttgctgtttgttataatgataatactatgtttctacatcatgctgtattttaatggttgaatattatgtcatattagatatattttagacatgagtcacactttaaatataaccaatgtgaacagaatgctgaaatgaaaatgagaagtattttatgtaaaactaagcagtatttatatgtgagaataataagcaaaaaaacccatcttcgttttgtgactaaacagagaaatttgtgtagatcaacttagcagctgtctaaagtaccaaaataatagatttttcactgttgataatttaaaataaaatgtccatttgtatatcttatgatacagaattaatggattgcttcaaatgtttttcagaatatgtttttaaatagtactgatttcattaagatgttttgttctgaatatttctgagaactaccgtagtgtcgtttagttttcctatttgcgtttttggttgtttggagtaggggataattttggtttattcatacagttgaaaagtgtactgctatgagaatgagattatggttacatgtaactacatgggcatttcatttttaaagcctctttgaactttttgaaatactaagaatataaaatttttattttttaagtttagatgtcctgaacgagtatgtttaggcaaaattgagttatttaagaatttataggctgggcgcagtggctcacgcctgtaatcccagcactttgggaggccaaggctggcggatcatgaggtcaggagatcgagaccagcctggccaacatggtgaaaccccatctctactaaaaatccaaaaaattggccgggtgtggtggcatgtgcctgtagtcccggctacttcggaggctgaggcaacagaattgcttgaacccgggaggcagaggttgcagtgagccgagatcgcgccactacactctagcctgagcgacagagtgagactccatctc

SEQ ID NO: 12688 - DNA, 1046 bp, Homo sapiens
agtagaataatttatacagaaaagacatttctcagtgcccaataattgcctttctgacataaagttttcatttttcctgaattaataagatttcctcaatgtgtttttttgggtgttttgtgtgtgtgtgtgtgtgtgtgtgtgtgtgtgtgtgtgtgtgtgtatgtgtttgatacagggtcttgctttgctgctgaggctggaacgcagtggcgctatcatggctcaatgcagccttgacctcctgggctcaagcgatcctcccttctcagtcccctggatagcgggggctacaggtgcacaccaccacacctagctaatttttgtattttttgtagagatgggttttgccatgttgcctaggctggtctcaaactcctgggctcaagcgatctgcctggctctgcttcccaaagtgcctgcgcccagccaattttctccatgtttgacctaattgtgatttcatagatgttaactaaaactcttaattttcgttttctcagtatgctattttttttttttttagccttggaacatatgaacctgttgaaagaactctgcctgaaataatgtaatcaaattatagagtttaatcttattttgagggcctttagaaattctgagaagaaagtgggtttttttttttactgccattttaatgtagtgttaaggtgttcatgtatcaccagcaggtgtagctgttttcaatgattacttaaaacaatgcaatgggaactttttgttgtcattaaaatataaaaggttactgtagtaagagcaagcatgacagtttggctatctgatgggagagtcacattctaacttcaggaggtactgtctttttaatagaaatgatatactcagagtctgggcacggtggctcacgcctgtaatccagcactttgggaggccgaggtgggcagatcacgaggtcaggagatcaagaccatcctggctaatacagtgaaaccgtgtctctactaaaaatacaaacaattagctgagcgtggtggcaggtgcctatagtcccagctactcgggaggct

SEQ ID NO: 12689 - DNA, 1102 bp, Homo sapiens
ttagccggacatggtggcacctgccgcctgtaatcccagctactaggtggggctgaggcaggagaattgcttgaacccgggaggcaggggttgcagtgagccaagatcgtgccactgcacttcagcctgggcaacagagtgagactccatctcaaaacaaacaaacaaacaaaaaacaaacaaacaaaaaaaccagactaattggctggacacagtggctccatgcctgatatcccagctggaggatgacttgaacccatgagttcgagagcagcatgggcaatatagtgagaccctatctcaaaaaaaaaaaaaaaagttaattccaaagctttttgatctgaaatctgatttaaatctgaacttaaatttgaagaagagggtttgctagattaatttactagattgctaaccttgctttatatatacctacagttatttccccaaagccagaatttcttttgaagcagaggggcaactaacttcaaccaatgttaagatcctattagaaggatgtttcggctaggcttggtggctcacgtgtaattccagcactttgagaggctgaggtgggcagatcacatgaccgggagttttaagaccagcctgggcaacatggcaaaaacctatctctgcaaaaaaaaaatagaaatcttagccagccgtcatggtgtgctcctgtagtcctagctacttgggagactgaggtgggaggatcaattgaaaccagaaggtccaggctgcagggaactgtgactgcaccactgggctccagcttgggtgaaagagcgaaaccctgcctcaaaaagaaaaataagatggatgtttctgcattaaaattagggagttgtcgtataatgtagttgcataaactagtattctgtgcttgtgtggttaaagagccttcgtagaaaaaatcccacatttttcttaaaaggaaatcttttggccaggtgtggtggctcacatctgtaagcccaacactctgggaagccgaggtgggcagatcacttgaggtcaggagtacaaaaccatcctggccaacatggtgaaaacccgtctctactaaaaatacaaagatcagctgggcatggtggtgcgt

SEQ ID NO: 12690 - DNA, 1106 bp, Homo sapiens
tctccccaagctggtattattccaactgaagctgttgccatgcctattccagctgcatctcctacgcctgctagtcctgcatcgaacagagctgttaccccttctagtgagggtatgtaacaaagggcttctggatccataatctcagctgtgaaattgaatgttagagggtgatattatatgaaaaaattctaggttatttttattcatagacaagtatttttagtgcacatttaaaagtttatgtaaattttgatgttgtttaatactactaatttaatatagtgtctgtgttacaaaggttaacattcctgggtgtcaaatacctacataaataaaattattggtgtttcatatgacatctgcaaaggaaaaaaagcctctgtttaaatgaaagcattattttccaaaaacataggaaatcaaaattattgttcagtgttttcttgttttgcttttctaacttatctgaattttttttaaaaaattgttttctagctaaagattccaggcttcaagatcagaggcagaactctcctgcagggaataaagaaaatattaaacccaatgaaacatcacctagcttctcaaaagctgaaaacaaaggttagagtttaaagagtcattaagcttaactgtaggaataggaagaagtatgtctaatttcatgcccatacagaatatttttgttcaacatttcttcttactattgtgatagataaatgtattgcttgacaaattccaaaatccaaatttaatatttgaaattattttctgatcttatatcttattctaatttctatcatctcatactaaaaagaatgtgatgttaaagtttaaaaataaacctgtgtcttaacagttcttaattttacaggtatatcaccagttgtttctgaacatagaaaacagattgatgatttaaagaaatttaagaatgattttagggtaagtattgtactaactgatgaatttgagttttagaaaataagcattactaaagatttatctatttataaaaatgcgttatgtatacagtcagaaacatcaaaccatatatgtagaaagcagaacatttttaaagtggtctttgcctatcctttaag

SEQ ID NO: 12691 - DNA, 1049 bp, Homo sapiens
aactatttccgtagcatttactttgtattaggtattataggtaacctagaggtttaaagtatgcgagagtatgcaaatactacaccactttgtatcagggacttaagcatccctggattttggtatccctagggggtattagaaccaatcccccatagatgctgaaggacaactgtagtgtgtgttggaataatttattttcaaatggatcatttggagaacactattctttaggaaacatagcctcctaagttctgttccatacatccctttcacctccacggcgttgtagcatcctgctttcatgactgtgtcatcactcggaaggaactgcttctcttccagaatgcttttcaagatctactctgaccacagctataaactttacacttctattctcttcttgcccctcacagtgttctctgttcctctaagatcttaaactctgtctactcctaatccagcctgctgggtgtggctggagaaagtcccactggggggctgattagttaggaatgtagggtttccagctcttgctggagcctcagaagagttcagcagacttttttttttttttttttccttaaacctatttctgcagccttgatgaccactccttccagtccctcacctatttgctttattcatggcagaggctctttcttcctgcttgtcagtacaaagaggcaggattcttcacctggatctgtggattctcaaagaatttgtggagagaattcagggcattgatgaccttggatgaagagaaatttacatctttatttacactaaccttcaagtgaaatttagcattttttgccatttaaaaatatgggcaacaaacaactagtagtattagcagtatttatgacttaagcacctatagaactcagttaatttcatatcgcttgatgttatgggtatctcaaattattattttatgtatatatatttttgagatggagtctcgctctgtctcccaggctgagtgcagtggtgcagtctcagcccattgcaacctctgcctcctgggttcaaacgattctcct

SEQ ID NO: 12692 - DNA, 1050 bp, Homo sapiens
ggtgattcaccttagcctcctgattaagctgggactgcagatgtgtatcaccactcctggctaatttttgttgttattttttgtttgatgaggtctcattatgttgcccaggctggtctcaaactctgggcctcaaatgatcctcctgccccagcctcccaaagtgctgggattacaggcatgaacctctgctcccagcccattttttaaaatatattcacagcattgtgcaaccatcactacaatcaatttacattttcatcaccctgaaaagaaactctgaaccccttagcagttcctctctgtttgtttcaattttccccagctccaggcaactattgatttattgtcttcataggtttgcccattctggacattgcgtattaatggaatcatataatatatagcctttttttttcttttttttttttgaaacagagtctcactgtgtcgcccaggctggagcgcagtggcatgattgcagctcactgcatcctctgcctcccaggttgaagcgattctcctgcctcagcctcttgagtagctgggactataggcgcctgccaccacacctactaattttatatttttagtaaagacggggttgcaccatgttggccaggctggtctcgaattcctgacctcaagtgatctgcccacctcggactcccaaagtgctgggattgcagccatgagccaccgcatctggccatatatattatgataggcttgtttcacttagtatgtttcttccatgctgtagcatgtattagtacttctttctttttcatggccaaatattccattatacagttacacaggtacactacattttgtttattcatcagttggtggacattttcattgtttccaccttttgatttatacataatcctgctgcgaacagtgacttttaaagtttttgtgtgggccgggtgtggtggctcatgcctctgtaatcccagcactttgggaggctggggctggcagatcatttgaggccgggagttcgagaccagcctgcccaacatggtgaaaccctgtctctac

SEQ ID NO: 12693 - DNA, 1032 bp, Homo sapiens
ttcatatacgccatgtactctattctaagcatttttagagttagagatagcaaagcacgtgaataaattcaagaaaaatggaatgttgtactgcatgacattgaatatcaaatggagtcagcgatgcaaataattgtctagattttacaaaaaaaattagcctggtgtgctggtgtgcgcctctaatcccagctactcgggaggctgagacaggagaatcatttgaacccagaaggtggaggttgcaatgagctgagatcgtaccactgcactccagcctgagtgacagagcgagactccatctcaaaaataaaaaataaaagaattgtgtagattttagtagttggaagaagttggagtgttaatgtgtaattagagaacagtgagaaataaaattctacagattgttttattctggtgtgctgttgtgttctcatatggttgtctttttggtcttgatagtgtatcagtaacagagtacgagtaacaaacagggatctcttctgaacggcgtgacattagaaaagctgtttacggcctcaactttgctgtggtttattaagacacagatatgtgttcattctggggccaagcagtaactggagagtggcacttattgaggccagtatggaggcagtacagagattattgagattaaaagaaagaaacaggtggaacggatctatgtaatggaaagctaaacagaatagttcgtggtacacagtagaaaagcattacatgtttattaagatatggtcatcttccatttattaaagttacatgttttataatttttagagtatatagaaattctctaccctatcatgtttgccaaagtcagaacaataacttcatttattaaatataaaaaaaataaaaacctctagcataaaatagaattttatttggacaaacgataaaaaaatactgtgtggtactagtaagagtaaggttgattcaagatacatgggagcagaatccaaagtgtagaaataggccaggtgcagtggctcatgcctgtaatttcaacac

SEQ ID NO: 12694 - DNA, 1491 bp, Homo sapiens
tgagtaaggtcagtgtgacttttaagttcttgatgctaacatcattgatttcaataaagtttaaaagttatattcatgcatatatgcaaatgaataaaaggctttgaaatagtgacttcttacggtacagtgaataagtttcctttggtctcttgaatgttatacatgttccagtttgatttactgagaaactgaaagtacctttacgtcatatgagctgtgagtcaccttggcacattcataattagaagagaccatcagattatcattggaaaatcagtttgtatttatcctttatttgaattccagtgcagacagatctgaggttctcttcattttgctaaaacttcttagggccttcagtcgcttttggctctgtattcgtgtatctttggaattgtcctgttatctctgcttgttttttacttgattttccatccatttccagtattcctttctcctctatttttttccttcattttctttctgctcttcctgttgcgccattattcatgttttcctctttactccaactcaactatggctttacttctgtttccttattccattgttcctcatactttttcctactgcttcattttctttgcagtattctcagcctagatgataggggtcagcaaatctgctcatcagtaaataaattttattgtagcatagctatgcccatgcgtttgtgcattgtctatggctgttttgatggctgtagccatagagttgagtagttgtagctgactgtaggacttgcaaagccagaaaatttgactgtctctttacagaaaagtttgccagctcttggcctaaatcatattttccgctgcatttagggctttttaggactgatcaaaaatacatgctatactggctttggtgaagtaacagaatgtgctctgtcctttaaacttacaactaattgcatgctttgattctaatactgtataatatcctgcgattcttattcatgaccattctaattggatttagtctgaagaattacttttgcttaacagattctttgtcacatttagtgaaaaatcataaaaggggaaggttggttaatggaaaagatctccatcaactaaccactaccttccttatctacaaatttatcttcttcctccgtgccatctttttttttttttttttcagatgatcttgctctgttgcccaggctggagtgcagtgatgcaatcacagctcactgcagcctcgacttcccaggctcaggtgatcctctcacctcaacctcctacataactgggactgtatgtgcacatcactatgcctgactaattttttatatttatattttttgtagagatggggtttccctgtattgcacaggctggtctcaaactgctgggcctaagagtcttcccaccttggcctcccaaagtcctgggattacatgagtcaccgcacccggcctcattattatttttcctctggttttagtagagaggatttttaagc

SEQ ID NO: 12695 - DNA, 1066 bp, Homo sapiens
attaatgtttgtttgtttgttttgagacagagtcttgctctgtcgcccaggctgggtacagtggcgtgatcttggcgcactgcaacctccacctcctgggttcaagcagttatcttgcttcagcctccctaataactgggattacaggcacgtaccaccacacccgggtaatttttgtatttttagtagagatggggttttaccatgttggccaggctgatttcaagctcctgaccttaggtgatccacccacctgggcctcccaaattgctgggattgtaggcatgaaccactgtgcccagccagtaagttccatggttgttaaaggatttctccacaaataaagctaaaagtaaaaaaaaaaaaaaaaaaaaaaaattctcaagcaatataagatgcagactattatgttgttcaagttttttttttttttttttaatctttggctttatttttggggaaaccttttttttcttttttgttttccttgggacggagttttgctcttgtcgcccaggctggagtgcaatggtgcaatcttcgctcactgcaacctccgccttctgggttcaagcgattctcctatctcagcctcccgagtagctgggattacaggcatgtgccaccatgcccggctaactttgtatttttagtagagactgggtttctccacgttggtcaggctggtcttgaactcctgacctcaggtgatccacctgcctaggcctcccaaagtgctgggatcacaagcgtgagccaccgcgcccagccagggaaacctttattttgaggcggagtctcgctctgtcacccaggctggagtgcagtggcgtgatctcagctcactgcaacctctgcttcctaggttcaagcaattcttctgcctaagcctcccgaggagctgggattataggcgtctgccaccatgcccagctaatttttatatttttagtagagacggggtttcaccatattggccaggctcttctcaaattcctgacctcatgatccacccaccttggcctcccaaagtgctaggattacaggcgtgagccaccacactcgg

SEQ ID NO: 12696 - DNA, 1070 bp, Homo sapiens
tatttctttttttttttttctttttttttgagatggagttttttttgctcttgtcacccaggctggagtgcagtggcatgctatctcggctcaccgcaacctccgcctcccgggttcaagcaattctcctgcctcagcctcctgagtagctgggattacaggcatgcaccaccatgcccacctaattttgtatttttagtagaggcggggtttctccatgttggtcaggctggtcttgaactcccgatctcaggtgatctgcctgcctcggccttccgaagtgttgagattacaggcgtgagccaccgcgcccggccgtatttcttaaataaaatggcttaaacgtcaaaattatcccttgatccctgggctatggactgattcttgtgttagcagttatgaaaacatttatgtccttgtacattcccatcatagctttttgtcaatgagaagtaattttttttttttttttgagacagaatctcactctgtttcccagcgtggagtgcagtggcatgatctcagctcagtgcatcctacaactctgaggttcaagcaattctcgtgcctcagcttactgagtagctgggattacaggcgcccaccaccacgtctggctaatttttgtatttttagtagagatggggtttcacgatgttggccaggctgggctcgaactcctggcttcaagtgatccacctgccttggcctcccaaagtgctgggattgtaggtgtgagccactatgcctggcctaattggcctaatttcaatattgttatatctcagggaatagagaggcacgaggagaaagagagacaagctgactgctggttcgtggagtagtcataacacacaacatttattaagattgctgtcttatatggaccgtttgtggtgccttaaaagaaatcagggtaacatcaacgattactgattacagattactataacagatacaataataattgtaaattattatttacaattgtaaaatacaatcttttctttattatttacaattattgtaaaatacaatctgattacagattactataacgtatacaataa

SEQ ID NO: 12697 - DNA, 1311 bp, Homo sapiens
tcgaactcctgacctcaggtgatccacctgctgcggcctcccaaagtgctgggattaccagtgtgaaccaccgtgcccagcccgatagtaaatattttaggctttgcagtccatatacagtcccatttttttgtgtatgtttgcacgttttctttacatattttaaaagcccctttttttttttttttgagacagagtcttgctgtgttgctcaggctggagtgcagtggtgcaatcttggctcactgcaacctctgcctcctgggttcaggcgattctcctgtctcagcttcccgagtaactgggattacaggcacatgctgccacgcccagctaatttttgtatttttagtaaagatggggtttcgccacattggccaggctggtctcctgatctcaggtgatctgcccacctctgcctcccaaagtgctgggattacaggtgtgagccaccgtgcctgacctaaaagctctttacagtgtaaaaaatattctgagctttaagccatgtgaaaataggccatgggcatttgctgacccctaatagaactccattttacctttctgatcatgtttcccattaactcttcaaaaatatgacctccatttaaatcaagatggtctccttcctcactgcttgtggaggtccagtgcccagtgtctgcctcttgcttgctcctccatcattgttctgccattcgagatcctcatacttaccctttaagatctagcccaaattttccatgaaactaattctaataattaaaaacttcctgtagaacttaactttgtctagtacaagttagctttcttattcagtagtagcttactataaattacaagaataaaaagattaccattttccctcacactgttttgtggagaatgcctaaagttactttttctttttacaggtcagtattcctatttggcatcctaatcccctttcccaaatctgaattttgggatttgaagcttgcatttgagattatgatttgtcttccttgttgtacacaggagcagggactttacaattagtattcgcatccctgctccttcatacttcgtgatgtaaggcaagttattttcacttatgcttaagtttcttcccctgtaaaaaggggatggaagaggattaaatgaattaaacatgtaacacgcttaaagcaatgcctggcaagtaataagtgctcagtaacttttagctgttcttattagcatgtttggaaaccagtagaaactacaccagcaagttaaggttgaaaagtggtattgatgggcttggggtagtacagtatgaatggctacagt

SEQ ID NO: 12698 - DNA, 1034 bp, Homo sapiens
ctcattgtggttttaatttgcatttccctaatgcccagtgatattgagcattttttcatgtgtttatttgacattcataccatctttggtgatgagaaactatgtttatgcattgcttaatgatggggatgtgttttgagaaattttttcggtgatcttatcattgtacaaatatagagtttacttacacaagcctagatggtatacctactagacacataggctgtcgtacagagtattactcttaggctacaaatctgtatagcatgttgcggtactgaacactgttggcagatgtaacataatgttaagtatttgtgaatctaaacatatctaaacatagaaaaggtgagtaaaaatacagcgtaaaagataaaagtggtatatctgaataggtcacttaccatgaatggagcttgcaggacaggaagttgcttgggatgagtcatttatcagtggtgtgtgaatgtgcaggcctaggacattactgtatgctactgtagacaaacactgaacagttaggatacactaaattgataaatatctttcttattttgttttttgagatggagtctcgctctatcgcccaggctggagtgtagtggcgtgatgttggctcactgcagtctctgccttctgggttcaagcgattctcctgcctcaacctcctgaatagctgggattacaggtgcgtgccaccacacctggctaatttttgtatttttagtagagacgggggtttcaccatgttggccaggctggtctcgaactcctgacctcaggtgatccacccgccgtggcctcccaaagtgctgggattacagatgtgagccaccgcacctggccagagatgaggtcttgctgtattgcccagggcgttgaactcctgggctccagcaatcctcccacctcagcttcccacgtagctgggactgtgggtgcacgccatcatgcctagccgttttgtgaactgttgaccaatgctcttttctgcagacagaaagttcactgtggttaggagttaagacttttaa

SEQ ID NO: 12699 - DNA, 1067 bp, Homo sapiens
ctgggactacacccacctcccgttccgttgtcatcttttttttttttttcttttttggagacagaatcttcctctgttgctcagggtggagtgtagtggcacgatcatagcttactgtaactgtgtaacctcgaattcttgggctcaagcaatcatcccatcatcccacctcagcttgctgagtacctggggctacaggtgtgtaccaccatgtccggctaattacttttcttatttttaatttttcggagataggatcttgctctgttgcccaggctggtgtcaaactcctgggctcaagtgaaactcttgccttggcctcccaaagtgttgggagggattacaggcatgagccactgcacccagcctcctctttcttcccatttaactcctaaccacaccgaactttctgtctgcagagaggagcattggtcagcagttcacaaaatggctaggtgtgatggcgtgcacccatagtcccagctacttggggagctgaggtgggaggatcgctggagcccaggagttcaaggccctgggcaacacagcaagaccttatctctggctgggcccagtggctcacgcctgtaatcccagcactttgggaggctgaggtgggtggatcacctgaggtcaggagttcgagaccagcctggccaacatggtgagaccctgtgtctactaaaagtacaaaaattagccaggcacggtggcgcgctcctgtaatcccagctactcgggggggctgagacaggagaatcacttgaacccaggaggaggaggttgcagtgaaccaagaacacgccactgcactccagcctgggtgacatagtgagactcttatctcaaaaaaaaaaaaaaaaggtcgtctgtactattgcatgttagtagtttctttctgcttattgttgagtagtagtctattgtatgcatgtaccagtttgttcatctagtggtggacattgagttagcaggttttggctattaaaaataaagctggaggccgggtgcgatgtctcacgcctgtaatcccagcattttggaaggccgaggcaggcggatcacct

SEQ ID NO: 12700 - DNA, 1075 bp, Homo sapiens
ttaatattgttttgtgaaactcatttcacttttgtgtgtgtcatgggtgtttcttactgtgggctaatgatcagaatttttcatttgttttttgagataagatctcactctgttgcccaggctagaatgtagtggcaccattacagctcactgcagcctcaggctcagcctctcatgctcaagcgatcctcccacctcagtctccctagtagctgggaccacaggagggtgccactgtgcctggctgatttaaaaaaaaaattttattcagatcggggggttggccgggcacagtggatcacgcctgtaattcccagcactttgggagaccaaggcgggcggatcatgaggtcaagagattgagaccatcctggctaacacggtgaaatcccatctctactaaaaatacaaaaaattagccaggcttggtggcacgtgcctgtagtcccagctacttaggaggctgaggcaagagaatcacttgaacagggaggcggaagttgcagtgagctgagatcacgccactgcattccagcctgggcaacagagcgagacgccatctcaaaaaaaaagagagagagatgggggaatcttactatgttgcccaggctgatctccaactcctgggctcaagcaaaccttctgccacggccctcccagagggctgggattacaggcgtgagccatggcactggaccagaaatgttttaataagcactaatttaaatcgttgttaacatttgtctgtagcaatattaagaacctttctggccaggcgcagtggctaatgcctgtaaccccaacactttgggaggccgaggcaggcagatcacaaggtgaggagatctagaccatcctggctaacacagagaaaccccgtctgtactaaaaatacaaaaaattagctggacgtggtagcgggtgcccatagtcccagctactcaggtggctgaggcaggagaatggcatgaacccaggaggcggagtttgcagtgagccgagattgcaccactgcactccagcctgggcgacagagtgagactccatctcaaaaaacaaaccaaccaacctttgt

SEQ ID NO: 12701 - DNA, 1048 bp, Homo sapiens
ccaaagttagtttgaagtcaaaaaagacttaatttagagtctgattctggggaagcctgtcaaagatgttaaaaggtttaaaacacttgctcaaaacaggatcacatgtcactatgaaataataatcatttatttaaccagagtgaccatcaaaagtctttaaaagcaaaaaaaaaaaaaaaagtctttaaaagcaagtacagaaatttatgtggatataaattttttaacactttaattaaaaacccaatataacaatatgaaacacaggaaattattttgattaaatgtaaaatctttggtttttttaggccagttatcaagaatttaaagaaaaacctgtaatatgatttttttttctttttatggaaagttcatttagatgacctgggagtcaaatctgatgaaaaggtacttgactttaacccatttatgctggaggttgcagcttttttgaattgcagacgtgtgaaaaatcagaccttggggatgaccttgagcagtaggatgtaacttctacatgcttagcattccaataatggaacactaggcataaatgggttttaatcagatactggaagagtatgtgttcaagattatgagagtgtacacagttttataggagaagtaaacaagaaaactagtatcttaagcaggggtgttgggaacaggcccccaaatcccaaactggccataaacaaaatctctgcagcactgtgacatgtttgtgatggccatgacgcccacgctgaaggttgtgggtttactggaatgagggcaaggaacacctggcccacccagggtggaaaaccacttaaaggtgttcctaaaccacaaacaatatcctgagcgatctgcgccttaaggacatgttcctgctgcagataactagccagagcccatctctttgttttggcccatccgtttgtttcctgtaaggaatacttttagttaatctataatctatagaactaatgcttattactgacttgctgtcaataaatatgtgagtcaaactctgttcagggctctcagctctgaaggctgt

SEQ ID NO: 12702 - DNA, 1050 bp, Homo sapiens
gtggctcacgcctgtaatcccagcactttgggaggcggagggaggcagatcacgaagtcaggagatggagaccatcctggctaacacggtgaaacgctgtctctactaaaaaaatacaaaaaaattagccgggcgtggtggtgggcgcctctagtcccagctactcgggaggctgaggcaggggaatgttgtgaaccccagaggcagagcttgcagtgagccgagattgcgccactgcactccagcctgggtgacagaatgagactccgtctcaaaaaaaagaaaaaaaaaagcagacatgttcatattgaacctagtgagtgaaaaagtacctcctttcaaaatgaacatgtctgctttctttaatgaagagtggggacatttgaggaagattaattggttttcaccaggtagaaagaaatgtaggaaaaggatcccaagcagaaggaggcacagataaaagcacaggggcaggaaagtgaattctgtggcgcagtgtgacacagttggcagggccagagcttatggtatacgggaagtactgttagatatgaaggtgataggcacaatagccctgttgtgactatcaagtggttgtttatgttaaaagatctgtctgcatcctggaatgatgagcaagagttcttgttttcagagttctagaggttatccttaacttggccatactctctggatttttcaagccctagcttctgttcttgtcttttgaccttgggaaagttacctaacctctctaggcttcaatctctttatctgtaaatggaaatgataataatgcctacttcataggattatggcaaggattaaacaaagcaataatcggccttatgttgttaaagtcatgtttcatatagttactgagcactaccaaatacctgatgcatatagttttggctaattgtcttttaaaggtaaaaatctcttcaattcagtttccattaggctcctctgctttctttcctccctttctaaatttgaaacactgtgaataaggcctctggactgtgacctctagtcctgattcccttt

SEQ ID NO: 12703 - DNA, 1020 bp, Homo sapiens
cggagtagctgggattacaggcgcctgccaccatgcacggctaatttttgtatttttagtagagatgggatttcaccatgttggccaggctggtcttgaactcctgacctcaagtgatccgcctgcctcagcctcccaaagtgctgggattacaggcgtgagccactgcgcctggccatatttttagtagagatggggttttaccatgttggccagtctggtcttgaactcctgacctcaagtgatccacccgcctcagcctcccaaagtgctggcattacaggcatgagccaccacacctggcctataatatagtttctttaggatagctcttagatctgaaattaactgtatatatacatttatacagttaataaatgtatatgcatatatacatttgtactcatccccaacagtgttgagtatgtatctttaaccatctggtaggtgaatattggtatctcctttttctaatactgatttttaaaattttattgatattgaactgtccaagaatacttcttgagtgaaaagctagctttattaattgattggctaggttttttagttgtatcacatgtttcttggatttctttgatatgtcttctattctttgtccaagtttcttattgtggtagtaatatttttcctatttatatgtgttgagctactgggttcttaacataataatgttactaatcccctgtcataggtgatgcagtttttttttcagtttgttatttgtcttttaacttgagtgattttttttttgtcaatgtagtaatatttttaaaaacaaggataatctttttaatggtttttagctttgtgtgatgtttagaaagggtttttcagctgtcagtgtcatgattgcagaagttgttacctaattttcttccagtgctttgatggatttttttttatttaagtatttaatctatcggaaatttattttaatattactgtgttattttgtatctccaaatgtctagctggttattttagtaccattcattcact

SEQ ID NO: 12704 - DNA, 1032 bp, Homo sapiens
gaaatttagcattgatacaatgatattatctaataaagtccatattcaggccggatgtggtggctcacacctgtaatcccagcactttgggaggccgagacgggcagatcacttgaggtcaggagttcaagatcagcctgaccaacatggtgaaaccccatctctactaaaaatacaaaaattagtcgggcatggtggtgagcatctgtaatcccagctacctgggagactgaggtatgagaattgcttgaacccgagaggcagaggttgcagtgagccaagatagcaccactgcactccagtctggatgacagagcgagactccgtctcaggaaaaaaaaatcagtattcaaagttttccacttatctcaattatgtcttttatacctttttcaaaatactagaatgccgtcagggatctgacatgacctttagttgtcatgtgtgtttacccttctttaatctagaacgcttccttaaccttttactttgtttttattgttgaagacactagcttgctttttggtagaatgtcccacaatctggatttagctgattgctaaatgtaagctgattgcttatattgaagttaaatatagacatgttgtcctttttagtgagttaaatcaggagtcactaatgttgttgtgtcccataattaaataatgaaatctgaaatcaccaataatgggacactaatgtgattaatgttgttgtgtcccattattggtgatttcagatttcatatatgattaaggacatatctaccagatttctttataaaggtgcctttttccctctgtaataagtaagctataggataatgcttgagtctatgaatatcctatttcccaatggcccttcacccactggttttagcattcattgttagttcagcgcctgaattagttattacattgacgtgtcccaaatgatgatttttaaaaattctgtcttttatcatttatcagctgctattattttgtaaaataagagatgtcccaacccattcatacatatttgaatatattc

SEQ ID NO: 12705 - DNA, 1079 bp, Homo sapiens
gcatggctttttaaagaacttacaatggatagtctatcctttggagtttggttcattatggaaaatgaaaaacaaatagctttctaaattaaatttttatttgcttattctttatttgtgtgttgtgttccttaaaatagcattgaaacaaaagctgaataaaactaaaatgttttttgttttcagatgtcttcagtaaatgtaaaggtgacctcttagaagttaaagatggtaacttgaaaacacatcctactcttttagaaaatctagttttctttgttgaggtaagtttttgttctcttcctaaaagacattgttgttcttaatggtctacaggattcatttttcaacagtgaacaggtaataggcaccttatacctgtaacttaaccctccatccctgtttttgttaattgaaaagcaatttaaatcattttctaaaccaatttcttccaagaattctaagatgatttcattcataatacttaggtaaaacttcttgaaatttgctgtactcatctctaaacttccccagattcacctcaaatctagctgttttcattctcctttctgactcactctttattatgtagtttaattcctccagcttcttttatttgttgtcatttattaattgctaagatattatgcattgtgatagtgtccagcaactgatacagcaaaactccctcctctttttttgccagagggaagagaaggaagattgcaaacactcataatctattatcttttcttttatttctgtcacatatttgttgactgttctccccttactactctgtgtggggagtgtacactgttctggtgattggcaaactgtaagtgcctaagagatttttattaagtgaatgagtaataagcggacatatatgtacatgcacacactgtagtataggagaagacatataaacagctaatttgatacagtgcaggatatgtactgatcaactgggtagattttgccatacatatgtaagttaagatttgcaggtaaggtggtatcttacctgcttggagagatgtgacgggagaggcatattgtaaagaacctttggattc

SEQ ID NO: 12706 - DNA, 1022 bp, Homo sapiens
acatggcaaaagcccgtgtctactaaaaatacagaaattagcgaggcaaggtggcgggcgcctgtagtcttatctactccagaggttgaggcaggagaatcgcttgaaccagggaagcagaggttgcagtgagccgagatggcaccactgcactccagcctggatgatagagcgagactttgtctcaaaaaaaaaaaaaaataaaaataagaagcactaaactttgtagagaagagatttcttttgtaagctcctagtgaaaatcacaaatactccatagaccttttccttttatttatttattttttaaatcataaggttagtagatcctaccattcagagtgtttgaagcacatagattttaagctctcttaaggaattttaggtagtacctctggcaaaaaggtaattagtgcctttctttttattcttccttttcctttcattatcattttctttttgtctcaaaataatgaaaaatgcataagggtctgtagagagaagaaaatgtccttgcccatgaacttcttgcaggtatttatcttgcttctttatcttactaaaaatagaattgaaagtttttcattttttgtttttcaattttagaggatacaatggagattcaggaacgaatagaaaatagttttaagtctttactagaccagttaaaaggtaagttttcctactgtagattcctgtatttgtatctggttgtatggcaatagcttcgaagttctttcccctattcccaagcccaatcacccagagataagtaagtagttttaacactttggagtcaatactcctagatgccacctaaacacatatgtgtgtgaatgaaaatacagataaaaagtaatctttaaacataggaaatggtgtaatccatgcttttttgactttaatttttttgttattttggatacctttccatgtcagttatatataccccatttattttcaagactgcgtaatattctatagtattgtattaacattttttatgttatcgcaattggtga

SEQ ID NO: 12707 - DNA, 1050 bp, Homo sapiens
gccggctaattttttttgtatttttaatagagatgggattttactgtgttagccaggatggtctcgatctcctgacctcatgatctgcctgcctcggcctcccgaagtgctgggattacaggcgttagccactgcaccgggccacacccgctatttttagttagacttttatacatccacattacaaaagtctaaaaagatctataccaaacttgataatactgtgagtattggttatcagggcaccttttctacgttttacatttttctatcatttgcattttttatgttgtgtattatttttattagagacaggatcttacccaggctggagtacagtggcgtgaccatatctcactgcagccttgaactcctgggctcaagcaatcctccaatctcagcctccctagtagctgggactacaggtgtgtgccaccacgtccagccaattttttgtatttttttttttttttttttagagactgggtcttgctatgtttaccaggctgttctccaactcctggcctcaagcagtctctcacctcagcttcccaaagtgctgggattacaggtgtgagccaccacacctgtcctcatgtattatttttataatcagagaacaaagtgtcacttataaggaaaatgacctgttttttttgttttgttttgttttgttttgttttgagatggagtcttgctctgtcgcccaggctggagtgcagtggtgcaatcttggctcactgcaagctccgcctccctggttcatgccattctcctgtctcagcctcctgagtagctgggactacaggcgcccaccaccacgcccggctaattttttgtatttttagtagagacggggtttcaccgtattagtcaggatgatctcgatctcctgacctcgtgatctgcccacctcggccttccaaagtgctgggataacaggtgtgaggcaccgtgcccagccaaaaatgacctgttaaataggttatcattcccattttattgatagtgaaatggggtttgagaacattttggcttgtcttaggtcat

SEQ ID NO: 12708 - DNA, 1035 bp, Homo sapiens
ctaaaaatacaaaaattagccaggcatggtggtaggtgcctgtaatcccagctactcggcaggctgaggcaggagaattgcttgacccgggaggtggaggttgcagtgagctgattgtaccattatactccagcctgggtgacgagagagactctgtccccccaccaaaaaagaaaaatatggtacagctaggaacatgtagcttgaccttaatgttgagtgccagatagagactgtggtgtgaactgtttcctaaagaaatctaaggctaagaaagattatgattgtagtgtcttactgtgtgtgttcaaccttgtgcttagagtatcagaaatatctctcttcaaatccagagctctatactatgcatcttttattcttggtagtttttgggatccccggatgctttttccttgggtgactgatgcatttcaattcccacctagctctttgacaggacacttttacttaaatggaaaatctagtgttttgcttagtaatgttttgtgctatgggattgaaagttgtatttggaaggtctgcatagggattttctttctagaaaggttattttctgttgtcatcttactttggaatagatttttaaaaatatgaaaataagcactagattttcatatctttaaaagtcacttacgtgtttttacttcttaaaaatttccctttaaaatctctattttatacaaaaattatctgggtgtgttggcgagcgcctgtaattccagctacttgggaggctgagtcaggagacttgcttgaatctgggaggtggaggttgcagtgagctgagatcataccactgcactccagctgtcactcttggatgacagagtgagactctgtctcaaaaaaaaaaaaaagtaaataaaagaaaatataatctctaggtattcacaaaggtcattattcaggggttttatgtccatatatttcactaatttttacagtgaccagggttcatttcaggaatccattcgggatctaaatagcctcattggtgcataaatgagtagaaaa

SEQ ID NO: 12709 - DNA, 1087 bp, Homo sapiens
agagcactcagttttgttttttttgagatggagtcttgttcttgttgcccaggctcgagtgcagtggcgtgatctcagctcactgcaacctccgcctcctgggttcaagcgattctcatgccttagcctcagagtagatgggtttacaggcacatgccaccaagcccagctagttttttttttttttttttttttttttttttttttttttttttttttttgtgagatggagtctcgctctgtcgcccagactggagtacagtggtgcaatctcagctcactgcaatatcctcctcccaggttcacgccattctcctgcctcagcctcccgagtagctgggactacgagtagctgggactacaggtgcccgccaccatgcctggctaattttttgtatttttagtagagatggggtttcactgtgttagccaggatggtctcgattacctgacctcgttatctgcccgcctcggcctcccaaagtgctaggattacaggtgtgagccactgcgcctgaccagtttttgtgtttttagtagagacaaggttttgccttgttggccaggctggtctcgaactcctgacctcaggtgatccacccgccgcggcctcccaaagtgctgggattcaggcgtgagccactgcacccagccttatcatgccattcttaaaatccttcagacctcaggaagccaaggcttgagcccagtagttcaaggctgcagtgagctatgatcacaccattacactccagcctgggtgacagagcaggaccctgtctctaaaaaatttaaaaagaaaaaaaatccttcagaggtaccctgttttcctgaggataaaagtcaagtgttttgggatagtttataatgctgtttataatctggcctgtgcccacatctccagattcttaggtatttatggtcttgaatctactttaaaatttttttgctactatcacttaacatcatgttgcctctctttgaaataactttcttacctccctcatctaagttttactcaaatggtgcctttaacaaagcctgtcttgattttaactccttccccactggggattttatgctcctc

SEQ ID NO: 12710 - DNA, 1035 bp, Homo sapiens
tcgctcttcttgcccaggctagagtgcaatggcgcgatttcggctcactgcaacctccacctcctgggttcaagcaattctcctgcctaagctgcccaagtagctgggattacaggcatgcaccaccatgcccagctaattctgtatttttagtagagaccgggtttctccatgttcgtgaggctggtctcgaactcccgacctcaagtgatccaccagcctcggcctcccaaagtgctggtattacaggcgtgagccactgcacccagcctcaacgattctagtttttaaagaaattttttgcacagcagtaaaactgtacagactaaaataatgagcagattattttgtaacaaaaccttgtcaggaagatgtttctttagaattcattaaagaaggccacagtaaacctaactaatatataaaatggcttgcaagaatagaagaactggcagtagaaactatagaagcatttaatcaaaaacatgaaaataatggctgggcatggtggcttatgtctgcaatcccagcactttggggaggatgagacgggcaacttgagttcaggagttcgagaccagcctggccaacatggcaaaaccccgtgtctactaaaaatacaaaaattagccaggtgtggtggtgcatgcctgtactgtagtcccagctactcgaatggctgaagcaagagaatcgcttgaacccgggaggcagaggttgcagtgagccgaggttgtactacagcactccagcctgggcaacagagtgagactccgtctcaaaaacaacaacaacaacaaaaacatgaaaatcagtgctgcagtttgttaaaattatgaaatatatatatctgatcataatgattaaaattaatagaattataggtaaattgaagcaaattcattacagatgttaaactgcaggatgagtaggattttgttttaatttttttttatttgtatcaaaaaattacatatactgaagctgggtgcagtggcacacacctatagtcacagctactcaggaggctgaagc

SEQ ID NO: 12711 - DNA, 1051 bp, Homo sapiens
agctcagaatttggctcactgagaaaaatatctttcttagtagtgagaattctctcaaatactgtgtgtgagcttcacgttactggagggattgaagtagaatgtagataaaccaggtgggagggattcattcagtaagtgtcgagcatattgtgtgctaagccctaagataaggaataactgatcttgtcttacagtgcttattgtcttgctagttgaagcatcaaatggtgggggtgcattagaggaacactttgctacttttagatgagatttatgaaggtttgctaccatgaatctagtaccagtaaccttttctgtacagctctacttcattggtgtgtttgagaatcttaggtcatctcatgtgatcccacatagtaagaatcgtctattcagatgacccttactggaatgctagcagtgataagctctagtcactgctctgtgagaataaggatttaaagctgttacattgagtttatagtcctagtctatgtaaattttacttgagagaggtaattttgctgccactttttgactgtaggataacttcagtagctaaatatcctgccagtcagcaagtatgtttgtcagaggattacgaactgtccaagtcaatctgagaattgtcctaatgaattatgaaccaaatctttctaaagtctgactagcccctaagagtgagccagtgagttcagttatcctgaagtggctcgccctgggtgatgttctaatcttttgtttcatttgctttggggttttagctaaacaataaaatgattctagttttttatttatttatttatttttttgagatagagtcttgctctgtcgccctggctggaatgcaatggcacaatcttggctcactgcaacctccacctcccgggctcaagtgattctcctgcctcagcctccccagtagctgggattacagacgtccatcaccacccctggctaattttttttttttttttgagacagtttcgttcttgttgcccaggctggagtgcagtggtgcaatctccactcactgtaacctctgcct

SEQ ID NO: 12712 - DNA, 1049 bp, Homo sapiens
catgtttatttgtttttgctaataactggttagtatggtatcttaagtaaagtttattgatgtacacttacaagccaaattttgtgtttgctttgtagtctcctagaactatattggattgcagcatattctggaaatgttggactttaattttagtaaattctggttcaaaaagtaaagtatcactcataacatgaaaattcacctttgtgattactgctgttgctaaagccatcaagtcactaggaatttacactaactgggatatgtaaatatattgctgttctcccaagaaactttttgtcgtgtatctagatcattaatccccttctgtatggtgttttctaaataaaatatttatggttctcttttaggctggcatggctctatataagattgtccccaaaaatccctactacttttggtctgtgatgagcttaattatgcaagtgagtatggcattcagaatgggattgaggtttggttttattttttatatagttattgtcctcagtgtgtcttctgaactggttttttttgtttgagacagggtcacgctgtcacccaggcaggagtgcagtggtgcaatcatagctcactgctgccttgacctcctaggctcaagcaatccctctacctcaacctcccaagtagctgggactacaggtgcacaccaccttgcctggctaattaaaaaaaatttattttttggtcaggtgtggtggctcacgcctgtaatcccagcactttgggaggccaaggtgggtggatcacgaggtcaggaaatcgagaccatcctgaccaacatagtgaaaccccatctctactaaaaatataaaaattagctgggcatggtggcatgtgcctgtaatcccagctactctggaggctgaggcaggagggtcgcttgaacccaggaggcggaggtttcagtgagccgagatcatgtcactgcactctagcctggcgatagagcgagactctgtctcaaaaaaatgttgtagagacagggtctcactcttttgaccaggctggtcttgaactcctgg

SEQ ID NO: 12713 - DNA, 1045 bp, Homo sapiens
gatactggtctgtggcctgttaggaaatgggccgcacagtaggaggtgagcagcagggtgttgtgggggagagcattactgcctgagccccgcctcctgtcagatcagctcttaggagtaggaacacaaaccctgttgtgaactatgcatgtgaggaatcgaggttggcgctccttatgagactctaactaatgcctgatatctgaggtggaatagttttatcccgaaaccatccctccctgccatctgtggaaaaattgtctttcatgaaatcggtccctagtgccaaaaaggttggggaccactgctctagttcataaatgaaaacttgcaggtcctcaatcaaaagtggtatttattctgacctcctcttggacagtgtggtagctttgtgagtctggtcctattttgcctcagaagtgacagggtaccttggtgagtgaagactatcttgcgtttctgtagaaaagtcacttggcacaacctatttttttccattctgaaaatatgaccatttaaaaagccctgacttactagaacttctctcaatgaatctagaacttccatcaccattggatggctgagaccacctctgccataccaaaaccttgctcataaccaaaacagtccctgttggtcttttgccctggacctgtgacattctggactatttttgtgttcagttttggccaagtgttaacaagcatacaaagctgggcacagtggtttggctgggtgaggtggctcatgcttgtaatcccagcactttgggaggccgaggtgggtgggttgcttgaggccaggagttcgagactagcctggccaaaatggcaaaaccccatctctactaaaaatacaaaaattagccaggtgtggtggcaggcgcctgtaaccccagctactcaggaggctgaggcagaagaatcacttgaacccgggaggcggaggctgcagtgagctgagattgtgctactgtactccagcctgggggacagagcgagacttcatctcaaaaaaataaaaaatagggctgagtgcagtggct

SEQ ID NO: 12714 - DNA, 1097 bp, Homo sapiens
ggcccaggctcaccttcttaaccactgtgctagaaactacctcactttgagctgaagacactgatttgcctgaggtcacacagatggtaagtggcagagaaaggactctgatttcctatttccccggggctgcatattctcatgcccttgccctccagtgtatattttcagagggcagagatatatatacaaggtgggtgatggaaggtgagaactgaatccagggttcatagtttgtgactcattacagctttgtgcagcagctgcctgcagacttttttttttttaaactaaaaacactcaatactttcaagaataatttgatttttaaaattgttcttgaggaccaaagagaatttctttggtcccatagttatttagaattaatagtgttttgactgtctaatgggaaacaccatgtccatttcacatcactaaacatcaggatatattaacaagttatattctcaaaactgaagtcagaattatgtagcttttgtaacatgtacatgggaagaggattagaagaggctttcttcagtaattctaaggcgattagtataaactggcaggactaggaaaagaacggtacagactgtccgtgaattcagcacttaagcacatttgacttttgaactccacacttttgttgtttaaatacattactacccccaaacaaccatggttccttgaattcagacattctgacaaatgaacaaactcatctatggtggtacttgcccaccagccaaaaattcaacaactatcagcattaattagtgtttactggtgggctgactgccctattaggtaggtaagattattgtgatcaaactgaagcctagagattaacttgctcaaggttgtagctaccaagttgtagagctgggatttgaacatagacattctcactgagagctcagctcttcaccaagttcagattcagtagcatcactgtctttgtacaacagtatttgtactgccaaggtttcaggatttattttacaattgtgttggaaaccttgcttggggcctcagctcttgctggaattcattgagggtatatgtggacagggctatgtggtgataaattgtgg

SEQ ID NO: 12715 - DNA, 1059 bp, Homo sapiens
gagttaggcatgaatttttcctccctgggaatcagagtaaagccacagacctggctggggtttagtgacagagatttcaggttgagtcatttgctaaaagtcactgttgttggcctgtgggagaaagtttcccaggaggtccagctcaccagagtagggcagctttcacatctctgcagatgaatagagggtttccaggaaaaggtgggagggagaagttcactcacactgaatgactggtcaagctactcaaatcctgaccctgttctctgttcacacagataagatcccgagccaaaattgagaaaattcgagcaagtttatttaacaataatgacttgattggtttgtcaagtttggatggtgaagatgaattgatggaaatgtcaacagaagagattctaaccgtgtctgtagtaaatcagagtctctttgatactcaagggagcccagggttagaagattatttcaatgataagtcaattaaaggtgggttctggatttgtttttaatctgtagactttttgtggagcaattttaggctcacagaaaaaaatctgcattaaaatctcctcccctccccagtatcccctatttttaacatcttgcattaaagagaaatttggcagctactcctgggttgcagattttgaaaacaattcagagagtgttggtgagatggcacaagaggctccattgtttgtcagtgggggctggttatgtgcatctttgtatgatgtgaaaagaaatgttcccccttctcccagctgtcagggcgctgaaggccgtgggggcagcccctgccacaggcctgccgcgttccagctggagaggctaccaggggtggctttgcgccgcctgcaacaggcttgaatgtgggcttgtattcaagtcattttttcctttttgtctagccagccttcccctggttcaagtgcagtgtatttattttgttctgtcctgtgcagctagaacattgctggtaattatttcatcatatgcttgaggacagctcatgcgtcccccttgtaaactgactcctgggaaagaaacagttcc

SEQ ID NO: 12716 - DNA, 1041 bp, Homo sapiens
cagacaggtcaggctctgggaacccctggatccaagcagccccatttgatatatttcgtagacctgggcctctgtgtagattttattttaggcaacagtttcacagctgaaaagaaagcaaaagtatgaagcccattgatctcctgggtccccctccaccatcctggtgcagaggatctgattgccggcatctgttatccaggacatcatatccaggataaccctcccatctggggtttctggatgggttattcattttctgttacttagactctcacagctactggctgctttgattcttgtcaacttctgtttcctttccgtccccagacggcaccatcagctccagctcgatcctcctggcgcagtctttacagcattgcatccattcccagaactgctccgccacggacctcttttaccagggcaactcccagacagtgagagagtggctcaacgtggccatcacccggaccctgcaccagggcgaggagagccttttagagctgacgaaacagatctgctctttcctgcaggtagaagtctaaagctcatgttcctgcagtgtggttaccatttttaactgggagtctcactggcttgctgaaaatgactcccctttcccttccaagtccctattcctctcgatttccttttcctagaagcttttctgctttatctcatctgtagcttgcttccttccagagggctatttagtcgtttggctgatttcctgggccatgtgagatgagaagatgaaatgctgtccctgtgtttagcccgtggctttccttattcagtgtctctttgcagacagcaccagagcagttcccctccgaagagttcccaatttccgaatccaaagtcaacatggacgtgaatttccccggggcagcttttgttgttgtgtcttgtaaagaaagtcaatctggattccgcaaagagtaagttgcctgttctcaagaagatggtgatggggagaggaaagctaaatgaattctggtgaaactggccaaggaaaaaaattcaaatcactgattc

SEQ ID NO: 12717 - DNA, 1068 bp, Homo sapiens
gaaccccagagacagaggttgcggtgagccgagatcatgccatggcactccaacctgggcaacagagcaagacactgtctcaaaaaaaaaaaaaattacatcatctgactctattttgtcagaatgtaatttaactcattagatttttttagaggggctattgactggtggtcactgaggtgaactttcaaatggaaaattccatcaataatactgttaatctcccactgccttctgatgcaaacttctgactctgattgtaagaaaatacattaggatgatatttttgagcaatagaaatgtgtgaaaataaaaattagaaaaatagaattgtccttattataatcattctgttatttctaaggtaatttctctccagtttaataatccctaaatgaaaattgcattggtatttgcatccaaaatacatatgtatgagcttactttttattttcctagaaataaaatacagctatcagacagattccctgcttttaagatattattaacataaaaacaatgaacataaattttacctagcaacagtttgcgctggaaatatagcactattctctttaaattgctaacttatgattacattgaaaatctttattgtatcaataaaaattttccatctggtatggaaaaactaaaacactcagtactaagcagatgtctttgaacttagactaaatcaatggcatgaaactagcatttattgctataatctggttatatatgtataaatatatatatattagtctggttgtttgtgtgtttatgtatatattatcctgttctttttttattttgattgaaatttttttttttcagtaattggcttttggcctttctagtatgtcattaattcacatttatatttaagaattcatttaaaatctctctgattcctggctgggcatggcggctcacgcctgtaatcccaacactttgggaggccaaggcaggcggatcacttgaggtgaggagtttaagaccagcctggccaacatggtgaaaccccacctccactaaaaatacaaaaattagctgggcacagtggtgggt

SEQ ID NO: 12718 - DNA, 1026 bp, Homo sapiens
ttatgtttactccatgaatgttaaaattaactgagtctagagggcccaccaggcagtattccagactaggggctctcaaaatttggcccaccagtcagcagcattggcatcacttgggaacttgttggttcttggaccccattttgcacctattgaatcagaaggtctgaggatggggcgcagcttaacaagtttcccatttgactgatgcatgctaaagtgtgacaagtgctaggtttatctctagtattttgaccttctactagcagtcagcctctactttactttccagagtctagagacatgtgtttatttttgatgcctagagaaatggtgaggagttctctaatgtagaatgtacatacagttacaaatgtctgtggtattcttgcttaaagtcaagtctgttttgcaggcctctgctctgcctcctgaggcaggttttcagagagaaaactttagagaatatatgaaatttaaaatgaaaaaaatacagaaaacactatcgtttttagcccaacatccatatgtactgaacactgcaggccataataccgcataaaattaattagtggatagatgctgctgaagatcttttcttagccttagccctcttccagctctaatatgtctctaactcaaaatgtagcaatcatagaaaatgaagtctcttttttttttttttttgagagggagtctcgctctgtcacacaggctggagtgcagtgatgtgatcttggctcactacaacctctgtctcctagtttcaagagattctcctgcctcagcctccctagtaactgggattacaggcacatgccaccacacccggctaattttgtgtttttagtagagacggggtttctccacgttggccagtctggtctcaaactcctgacctcaagtgattcgccagcctcagcctcccaaagtgctaggattacaggctgaagtctctttactcttgattttcagctttatcagccaatgtcagttttatcagtcaatatactaaattatttgcca

SEQ ID NO: 12719 - DNA, 1030 bp, Homo sapiens
tagatatgagccactgcgccctccggtgctagaatagtacccggcacacagtagaagcttattaaatatttgctaaatgaatgaattaattaattaattaaacatcacaagagactggaagtattggtttccccggggaaggcaactggttggggcaagacttactttccaccattgatcttttcatatgtttttaaagtttaacaatgggctttttagaaaaattaacttttaaaaaaggaatttttttataaaaaggagaacttgtttaatagcattgaattctgctggagaagtcaaggtcagactgaaagaggccttttgaatgtataatatggaggccgttgcagcgctaacaagagctgttttgaggaataataggagtggcagccagatggagttggttgagggtaaggtagggaggataagatggaaaagaatagatctttctctccaggggtttgatgtgaaaacaggagagaaatcggagggggatgatggaatggactgtggggacatggaaatattttaatttcattttttaaaatttaagttattgaatagattttaaaaagtacctgtttctaaattcacaaatgatagggcttagccatagacctcctatgatttgctgggccaaaccaggcaaaaaactttatgaaataatgctttagatgaaatgattcatagagttctagccctgaaattctctactgagttatgattaatcttgctttctaaataatgtagatacttgtcacatagatgtggccaataataattactggaaggaattagatttgctggtaattatgatttcactccaatacttaggagtattgataagtgctcacttcagcagcacagacatcaaaattggaatgatacagaaaaaattagcatggcctgtaagaaaagaaaaaagaagaccagtctgagcaataaagtgagacctcatctctccaaaaaataaaaaaaaattagccaggtgtggtggtgcatgactgtagtcccagctacttagggggct

SEQ ID NO: 12720 - DNA, 1033 bp, Homo sapiens
gtttgtttgtttgtttgtttgtttgttttttgagacagagtctgtctgtcacccagcctggagtgcagtggctagatctcggctcactgcagcctcagactcctgggctcaagtgaacctcccacctcagcctcccaagtagctgggactacaggcacgtgccaccatgcctggctaattttggtatcttttgtagagacgggggtgggaggtttctccatgttgtccaggctggtcttgaactctgggctcattggatcctcctgcctcagtctcccaaagtgttgggattacagatgtgaggtccccacatctgaactcagtctaatttttaagtatggtggtgaaatacataagaaaatgtccgtatttttaaagatgcttagtgaagtattcagaatattcagaaatggaattgcgtgatgtctgggattcaccttaaaatagttgagcaaaaaagaaaaaataggaggctaggttaaacaggtgtggcaatagttgaatctgaatcatgggtacatggaggctcattgtactattctcttttttgcatatgtttgaaatttttcatcattgaaaaactttttaagtgtcactcagccactaatttagcaactttccttaaacgctaacttgggaagctaaacatagatatctggcttactgcctatggtactttcacagaatggaacactgtgaaatatatacggcagctgggcatggtagctcatgcctgtaaccccagcactttgtgttttttttttttttttgagatggagtctcactctgtcacccaggctggagtgcagtggtgtgatctcggctgactgcaacctatacctcccaggttcaagtgattctcccgcctcagcctcctgagtagctgggattacaggcgcccgccaccacactggctaatttttgtatttttagtagagacagagtttcaccgtgttggccaggctggtcttgatctcctgacctcaggtgatccaccgggcttgacctcccaaagtgctgggattacaggagt

SEQ ID NO: 12721 - DNA, 1032 bp, Homo sapiens
attatcataaattcatttactaaagaaatttcagaaagtgttgcttctctaaaactttgtttttaataagtgttagatacaacacatatgcataacagattcaaagtgtttagtaaatactttttcctattaaaaagtaatttgaattgatcccaagaaccttttcatctgttgcatggctgttcatatttattctattgcccattgtatgaacttttatatttttgccatgtaatttgtgtatgttattattagagataaatatccattttattttgaccagaaagcctagtgaattctcatcttgggcataatggcattaatgatgagctgataggattaatcagaatttatatgtggctctaatggagatttcctccctttcatgcccaggtgtgccaggtggtgccaatgccagccaatcacctccccattggcagcaccatgagcactgtgcacctgtcttcagatggcacttacttctattggatctggtctcctgccagcctgaatgagaaaacaccgaagggacattctgtcttcatggacatttttgaacttgtggtaagtttgaactttctcgcttgtatctttgcagaaacatttctgtttgctttctttttatattggtgtgcaaagggcctaagaaccttgcagcgtgtatagtgtgttcagtgtttccttaaaattgatttttctcttagatgtctttgaaggtttctttgtttggagttgtatgacaataagtagagccaagctttctgaatgttaatctgatgactggagataacattatttaatgtgtagacagaagggtatttaagtagaaatgctcacagtctgttggaaatgtggggcaacattacagtagcaagaatgggtctacagatagaaattgggagtctctgagagagataacaacattgtgacatgtcacttaccttttagatattagccaaatgctcactgagagccaagtgtgttctgtctaggtggtgggagtacagagatgggcagggtgggcagggttct

SEQ ID NO: 12722 - DNA, 1024 bp, Homo sapiens
gaagtgcagtgacatgatctcagctcactgtgatcctcccacctcagcctcccgagtagctgggactacaggcacctgccaccatggctggctaattttttgtatctttggtagagacggggtttccccttgttgcccaggctggtctcaaactcctgagctgaagcaatctgccggccttggcctcccagagtgctgggattacaggcatgagccaccctgcccggcctggagttgcttttctaggaattttatacattcttctacccattgacccgtatgatcactggcatctgtttgtgagaaagaagtttcactacctttgttttccagtagactaattgcctagagaacagttaggaccacagcctgacagattagtgtcagtattctgtctgtcttccgtagaattttttccttggttgggatcttctttcttttagccaaacatctgtgggagaattcttcttggataattatgaagttcttagttataagtcttcttgccctgtttttctctgtatagtttcaaagttgaccttcaaatgattgaatctcaagggtttttttaaggcaaaatggcaccagtgtttattgtaagtttctttgctctgagcaagctgtcatagcctagttttagatcccctaaaactgtggtttgtgaatcctgacatgtgcttaattctagagtcattgtgtggtactgaaacaagtttccttgtaaaggctttatattggattgatttattttctgcatatgcagagacaatttcaagtccaagatctgttatcactgtgcaaattccatttgagaaaatgtgcttttagacagtactatctttagacagatttaggatgttaggaataattatcaactctttagtttcaaacagtttaagttattaattgttggttcataaaactcacatttttattgtgtacccaaattcagcctataccaaaaatagttattgaacttacttcctgtgctggacattctaaatttcattcagcagaaatgttg

SEQ ID NO: 12723 - DNA, 1024 bp, Homo sapiens
aaattagccgagtgtggtggtgcaggcctgtggttccagctacttgagaggctcaggctgcagtgagccatgatcgttccactgcactccagcagcctgggtgacagagcaaggctgctggagtcaacctgtctcaaaagaaaaaaaaaaaaacggcaacaaaacacatatgttatgtgtgattaaaaaaaatacatgaaggctgtgagttactttggcagtcactcccttaattagggtaacgttagcattatcaccaaagtacagttagtaacacttctgattaaggatgacagggatattcccttttccttaaatagctttccacttttttaaagagaaaaatattaatttctaatgacattttggtcaagagcagtggttttatgtgaggatctgagacaaatcatttaatattcataagtaccagaatagatatgccatagctgacttacaaaaacccaaaggtatgatgtctttttataaaatgattttaggccatgaccttcaaactttagaattctgaaaaaacagtggcatagcaaacagttctgagttttcataaggggcccctgaaatggataacgctgagtagcctaatggatttctgaaagcatagtgtgctttagatactgctaaatcaataaacacaacagtcatttaagtgtgtatgttatataatatttggttaattatattataactcaaattctttcagtgcacttgtcttttaaattgaatgctaaatataactggagtacttgtaaaaatagaatggtcagaaaaatgcagagtatattatgtcatttttctaagctatattaagttaatatttggagttagcaacagattttgtcatacacatcattttatgtaccatgaaatgtcatatttcagaagtactcatgtttaataataaaaataaatagccctgttttatgttactgagttgttcatcatttgagttcaataaaagactatattgaatttttttagtagttgcttcatataacataagtagatg

SEQ ID NO: 12724 - DNA, 1030 bp, Homo sapiens
cttagaattttacgccggtcgcagtggctcatgcctgtaatcccagcaatttgggagaccaagacgggcgaatcacaaggtcaggagattgagaccatcctggctaacacagtgaaaccccgtctctactaaaaaaaaaaatacaaaaaattagccgggcgtggtggcgggcgcttgtagtcccagctactcgggaggctgaggcaggagaatggtgtgaacccgggaggcggagcttgcagtgagctgagatcgcgtcactgcactccagcctgggcaacatagcgagactccgtcaaaaaaagaaaaaaagagtcttagaattttagagcagaagagactttagagataataatgtccctcattttagaaagaagttctctgagatcaggagatctcagtgatcagaagatgaggttatgacttagtcactatagcatagctagttgtggcagggcaatgactagaccctagcttttctacctttggattccagtgttctgttcaccctgtaagcgctgctcaaagtcaatctaaagaaagaatccctcctaagaagtagatcaacatgaatttagtattttaatttaagcagatccagagtatttgaattaaaatttttcttcccagtaaattctttttctttctttctttctttcttttttgagaccgagttttattcttgttacccaggctggagtgcagtgatgcgatctcggctcactgcaacctccacctcacgggttcaagcaattcttctacctcagccttccagttagctgggattacaggcatgtgccaccatgcccagctaattttgtatttttagtagacactgggtttcaccatgttggccaggctggtctcgaactcctaacctcaaataatctgctttccttagcctcccaaagtgccgagattacaggcgtgagccaccgcacccggcctcttcccagtaaatttctaaacagatttttttttaaagcaataaataatgtttaatcaactaattcattcaacaagtattggt

SEQ ID NO: 12725 - DNA, 1063 bp, Homo sapiens
tccatttttaaatgcttgcagtatacacgtttgtttgctactgcctacatggtagacacttattgccacaagtgtctgaggcccatttcattgccttgtgtgcaagtgggttagacaagtggtcttctttgtgtagcaacataacaagtaatggtcacctaaattgcaggatgatgattcttcccccttttccttgctaaattaatttttcccccttaggacctctggtcctcaatcgagttcctctacgaagaacacaccagaaatttgtcattgccacttcaaccaaaatcgatatcagcaatgtaaaaatcccaaaacatcttactgatgcttacttcaagaagaagaagctgcggaagcccagacaccaggaaggtgagatcttcgacacagaaaaagaggtaagtttctacttgtcatctcctgtgttagcactggcccttctacctgggagtgaaaagaaacaggttgcacaaaaagaagaaaaatgaaaggttaaataatgaggaatgctgggagatacttagtattccagattcttctaaattgagtagttcttttggcagtctgggagctcaacttagaatcctaaagtttggtggaattgtgtgggaattaactgctaccatcgtattgggaatgtgcccttacttatccttgatgtgtcctaaagtatacaaaagcttaagagctacttttattacattaaaaaatgggttgtgtttcacagcattccaaggaaaggattgtcaaaattgtctttaatgttttctaaatattcttggggattagtacttgtgagacaggactccttagttgacctacaagtaatttggtatgtgcctgttttaaaatgtttgattttctctttatttagaaatatgagattacggagcagcgcaagattgatcagaaagctgtggactcacaaattttaccaaaaatcaaagctattcctcagctccagggctacctgcgatctgtgtttgctctgacgaatggaatttatcctcacaaattggtgttctaaatgtcttaagaacctaattaaatagctgac

SEQ ID NO: 12726 - DNA, 1051 bp, Homo sapiens
aatcttgctggccccagatggaggctgcaaaacaggtgaccccagggccaaatccagccctctagcttgtttgcctgcatttaaaaattgggggattttatcttaaaatctggattttggcttctcaagatctgggccacattcctgaaggcaaaactggctggagcagagaaggggcaccccctatggggtgcctgtggcctaaatcatcacagtcccctccattgcctgttgggtgccccttccctcgtttatgtgacctggctggtccccactggcatttgaattttccccatctgccccagaatgtccttttctttcttgtcctgctctggctgaggaaacgcccaggcttgtccaacgtcttctaacttctgctacccagatttcttcctgttgtctaactttagtatctcatgctgtctgtttcctatcatctaggctcctccccctcagcccaggggcttcgcctggaggtgggggtaggactctggtgcagatgcatggctgggcatggtgttgtgtgctgtaacagtgtcgggatgaaactccatcgggatgaaacagcctccttgccacattccctgtgaatttctcccccggtttgtgggaggatgcagacatggagggaaggagataggaggagagatgattgatagagagtgactcagagctgaaaagggccacccactagggccgtctggttcatcacagccctccattctccatccattctctacggagcggggaagccttgcctttcaggccagggcaaatccagggacttgctttcacaagcgttgtggcatctttatttatttatttatttatttttattttattttattttgagacgtagtctgactgtcacccagacccgagtacagtggcatgatctcagctcactgcaacctctgcctccagggctcaagtgattctcctgcctcagcctcccgagtagctgggattacaggcacctgccaccatgcttggctaatttttgtatttgttgtggcttcttaaaagagtgattcccacacatcagtcattc

SEQ ID NO: 12727 - DNA, 1050 bp, Homo sapiens
ccagggctggcgattataaggaaaccaagagtgtctaggaggtcacaaggaaggagaggaagccggagtccgagccccgggccgccagcccccaccaccccagcccaccctgtccccctctcccttttcatgattaacaatgatgggtagagctgcaaggccttgaggctctcaggtggcaggcaggtgggcacctcccgcaccttctgcacgctcaccatggggcaggctctgccgtctctctctcacccttgctccgtccgctcattcccctttctgggatatttcacaagcacttgctaggcaccaggcagtgtgctaaggccagggacacagcagtgagtgagacaacatcccacacaaagaaaggcctgcggcagtgtgggtaataaaaagtgccagggggtggggtggcattggagctcagaggtagagggagagggagatctgggtgctgccggtgcaaaggtcttgagcagggggaggtgggccagctccagtgatgcctccagaggaacttggggctttcttagggagtggtggatctgacgcacatgttttagagggatcccttggtgggaggggggtctctagtgaggggctgagaggtacttggattggggtgcagccgtggagatgatgagaaacgggttcaatgtttgaattgatttgggagggacgagattgaagaaacaggctcagagaggtgaaatcgctcacccaggaacacgcagagggaaaccaagtcttcatctctgggccaggcactgtgctagccctggggaggtctcagtagaaaaggctaggccgctgctgtgagctccagggagctcacagcctgcggataaatggaggtaaagggcctcagggtggtttatttggggaggtgtttgagccatggaaagggaggggatttggacagcctctttacactgcctctgtacaaatcaagccttatctgtgagcaaggctgctcatcgacaagtggttagactagcagagggactgacagaggaagccagcctggattccaacctcgctcttttcctg

SEQ ID NO: 12728 - DNA, 1063 bp, Homo sapiens
cggccatgttacttgcccaagatcgcagagatcctaagtgtcggatttggcattcacacccagcttgttaactcccagccttgctcacttccctaccctgttttggtggagtgggaggtttccctgggagagcagggagacaggccaggtagcactgcattggggatggccttgaacctgggctgagagtgtccttgctcgccacctggtccatctgcatggttaggcccccgcatgttcctcctcgggttattgatgaagtgtcacaagacctttggaaaccaactggggtctttctttgcaactggagagaaagacacaatggagattgggtttggtgagaaaccagccccacccttagcggggctccttaagtccctggtggccccggagtctctcaaatgaaggtcagcagccacccaagcacggatgtgtccccctgacgtctgcagctgttttgggtcctatcacctggtgggagacggccttcctctcctttcacgttggtcccgcaccccacgcacactccttgaatccatcacctgaatattctgatggaggcgtagtggagtcaatgttgggcaggagctgctgaagctccgaataacttggaccctctccccccaccactccaggccagccgtgacattggctcggaagaaacaagttcccagaaagcagaccacctccaagatcctggtgcggaacatccccttccaggcccacagccgggagatccgagagctcttcaggtgagaacttcaggtttagtccaggggactggcgtgtgggcggggagcctgcccgagtctcagggaagatggcctttgggtcctggatggttccgttgcaggccggcacagtggtctttcaaaggtcatcttttggctgcttttgatttatctcccttaatctcagatgtggctccccagagcactgtgcaggaaaaaagtcaaaacagccaggcttccccctctccgaggcagatggagaaagggcaggcaggcttccctgtccccatccacaacgtgcaagaggggcaggggccccagtggctaaaacc

SEQ ID NO: 12729 - DNA, 1126 bp, Homo sapiens
ataaggctggcagtccagctgtctctgactagatccagcctcttctcctgcttttaaataaaatttcacagcccaagcaaatgccttttcctaatgaaaccccatcttgaataaatgcaactgaagcctccttcctttctccctaaccctctgccacactcttcagcccagttagagggtcaaggacaaagcttgggtctatgtggctgccctggggcaagcagatttcagtgaattagcgttgtccctgggcagcaggcagggtgtgaggtatgtgtgtgccgctttggaaagggtaagggaaacaaagaggggaaatgtatgttacattctgtaacctgggtgtgggcttctgccacagaaaacagctcaccctgcagtccatgagggtgtttgatgaaagacacaaaaaggagaatgggacctctgatgagtcctccagtgaacaagcagctttcaactgcttcgcccaggcttcttctccagccgcctccactgtagggacatcgaacctcaaaggtaaaccatgtcacctttgtgatcactggactccagtccctcgtggcctggaagagttgaagggggatggggcaccaaccagggcacttgccctttaaaagctagaagccttctaaacatccttaaacagaagccagagttcaaaaagggctatcaggtgtgtctccccttccccgctaaggcagtagaaggagagcacagaggcctttctcccagatccttatttggctggtggggaggggaggtgggtgtctgtttgcatactacctcttggcaagcagctttgaaaacttgcttgaagcgcttctctcttttctctctgtctctgtttctttctcctcccattctctccaaccaacagaggctccaactgctgacttttcactgtctttgaactctaggttacaatgtgttggactgggtgggggggaagcaagggactctgccacctggaaccgagaaggtggcctagaaaacatccagctataaagcaacaattgacctgggagaggaggtggagcactggggatctgcggtgggggtagagctgggggaggtgggtgaggagtggacaagatggctcaaatcccccctcagttacctgtgt

SEQ ID NO: 12730 - DNA, 1068 bp, Homo sapiens
tcactttgctttgtaggggttgttactcaatgcagacacacctacttggtctgtttgtgtgccatctctcctactagaatgcaggttccatacagcaggaactgtattcccagcatgtagaccggggccttccatatttggaaaaaggcctgcaacttttaaaaacgttttattttgaaataattttgcacttacagaaaagttacaaaggcagcacagagattcctgtatacccttcactcgtctccccctggtgttgacatcttgcatcgtcacaggacaagaatgaggactaagaaatggacatttgtgcatcaccgtaaactcgacctcagcctttgctcagattgcacgttttcccatgaggtcgttttcctgatccagggtccaatctgggaccccacatggcgttcactcatcacgtctccttcgtctcctctgatctgtgaccaatcctccgtctttccttattgctttgtgactttgacagaactgttcttgtttgagctctcgtttgggtgaacagcccaaaaccgactggtcagttattttgtagttatttggtctctcaacttgggttagtctgatattttctagtggtgaaattgtggttatgcatcttgggacaagaacaccatggaagtgacaacgtccttcccaatgcattagtgttgggagggttcgagatgtcatcgtatcatcttacagatgacattaaccttgaacccttggttaaggctgcgtcttctggatttctccaccgaaaagttatttccctcgcaaatattttggaatgaataaattctaggaaataccgcagaagctcagatacatatttgttatgtcctagattttccaccaggggacgatgttcactgacaaatcttaatgggcaaaagtcaagggatttgaaagcagggggccaaggccctggggggctggtctgagtccactctcccagggcagccctcgtttaggtgaagagccccaggggacagattcccggttgggcataggtgccaggtgtaggggtggctgagaagagcaatctggcttggcaaatttata

SEQ ID NO: 12731 - DNA, 1029 bp, Homo sapiens
aaatttagcagcacaaaatggtatagggtgagaaagtaagtcttctatatccactgcctggccacccagtttttcttctagtgttaatccctattaccagttcatttccatcctttcagagattagtctgtgcatatgtacacaaatacatatgtatatattccctttcttatgcagatagtatatccagtggtatacataactctgcccattgttccattcctttatttttacttaacagttatgacattcagtccaagtatatgcatatatgactgtcaactgaatataaagaagatactttatattcactctaaatacttggtctaccttatttactaatttcctaatatatttgttttgttatctatattctatgagtagctcttcttaacagtagtttttcacaaagaaaaatgatcttgctttggccattagtgggcgtgagtaaaataactttccgaagtcctgccgaggaactcagtattattatgaagataagacataagcatttaaagccattagaggtaagacattgttataattagtatcttgatctgttaaatagctgataagaagtaaaggtgaaaacaggtagatactgatatgggctctagtaaagaagagatatttatgaagttaaagtgggctttgacaagcctgtaaggtttggatgccttggggtggaatcaagaggagggaagcagcagtaagacagacacatgtcaccgtggtgtctcaaggaaagactgcactgactggagaggaaagtgcttgcttagcagccgtggaagatatgaagaggttgccctaaaaatatgactcctgagacccagagagtagcagagacattattttatgtccatttgtgctctgccctttgggcccaagatgtataaaagatggtgaattgctttcccaaattggcagtaatgactgaaaaattgggattgttgcttgttagaattatgtgattccagggctacagataaacatggtcttgatacttaaagattaaaaaaatagctt

SEQ ID NO: 12732 - DNA, 1047 bp, Homo sapiens
taaattctttttcttttgctctaggatacatatcatgagattttatattcttagacaatttcaaagtagatgtggtttgtatgcattttacttttaggaggggcaggtgaacttttattgtaaaggaccagataattagtatttttggctttgtagggtatatgggctctggcaaatctagtcaggtctcacattgtactgagaaagcagccatagatgatatgtaagcaaagaggcataggttgttccaataaagctttatttacaagaaatgggtggcaggatgtaatttgccttggggttataatttgctgaactctggtcttaagagggatattagtgttcagagaagttaagtcataagctgagaaccacgcatctacaaagtctaggatcttggatttaaattcaggcctttccaggttcataaccactattttttcagttatttattctgctttcactaataaagttaatgtttataattatatgtagaaatgattatgtagaaattatatgtagaaattaaattatatgtagaaatgattatgaattataaagtgttaaaataatttatctctttacaaaattgcatagagactggcatttagaattacccaagaaatgattggatgaatgtttgagtctttatcataataattcatatgcacagcagagcattttaattgtttttcttccttcctttttttttttttttttttgagacagagtcttactctgtcgcccaggctggagtgcagtggtgtgatctcagctcagcaacctctgactcccgggttcaagcaattcttgtgcctcagcctcccgagtagctgggattacagttaggtgccaccatgcccggctaatgttttgtatttttagtagagaccatcttggccaggctggtcttgagctgctgaccgtaagtgatctacacgcctcggcctcccaaagtgttgggattacaggcgtgagccacagtgcccggccaattattttattaatttactaaagtatgtatacctaaaaaatgttttcctttca

SEQ ID NO: 12733 - DNA, 1046 bp, Homo sapiens
aacctaacatctggttattgtgtaatggtagctgtttgctattagtagtgaaactggtggtagtaatatttagaaaaaaataaggagaattttttatgatgttggtaatttcttgtactagagaaagcttgccaatcaaatatttgtgaatcagtttttatatacacaatttgcattaaataaggtaggtgtttctactataaatctttctacataatggcaatataagaaatgtcatatcgtatactgattttacccctaaaataatgacatcagctgttttctaattttaaagaagtagtcttaccaaatgtttgaaatcaccatgattttggtatgaatttgaaaatatggtgtttactagcattgtggttctgttgctatccttttatggagtcaaaggaaaaaattttgaaaatgcataatgtatattataacaatatgactatttgttgtggagtgttaaatgatgttataaaaataaagcttttaagtatggttcgtagaaattattagatctgtctctgagaacctgttaagtgtggcttgcatgcttcatttaggattttattaacagttgtataagattgaagtataatagcttgatatttatggttaaagaatatcatggggcgggcacagtagctcacgcctgtaatcctagcactttgggaggccgagacaggcagatcacttgaggtcgggagtttgagaccagcctgaccaacatggagaaactccgtctctactaaaaatacaaaattagctgggcgtggtggtgcaagtctgtaatcccagctagtcaggagctgaggcaggagaatcgcttgaacccgggaggcggaggttgcagtgagctgagatcccactgttgcattcaagcctgggcaacaagaatgagactcttgtctcaaaaaaaaaaaaaaaagaattatcgtggaaaactgctaaattaaaatactacattttacggaaactgtggagctgcctccttgatagaatgttaggtctgtttttgttgtcttctgcctatgtctcttgacttg

SEQ ID NO: 12734 - DNA, 1048 bp, Homo sapiens
tttttttttttttttttttttgagacagagttccgctctgtcacccaggctggagtgcacaggtgcgatgtcagctcactgcaatgtcctccaggttcaagcaattctcctgcctcagcctcccaagtagctgggatcacaggcatgcatcaccaacacctggctaattttgtatttttagtagagacgggatttcaccatgttggccaggctagtctcgaactcttgacctcacgtgatccacctgccttggcctcccaaagtgctgggattacaggcatcagccactgcgcctgacctataccttgttttttaatatactggagaggttgagagaataccattattgtaattcctttttaaattcctgctaaataactgaaactaagctcaaaacaaatctctccttgttcaatagaccgttcatccggaaatgtagatgatcttccattaactatttgaccttgtgggacctagtgaatcctttgggacttcagttttagcatttatttctaagttgtcttttagctttctgattctctgattctctaagtgaagtgaagttggtgaagtctggacatgtcctatccatgtatgtctctgtatatatccatatcttttattctttttttctctaccactcagagcatgttaccttcattgtatttagttctgctgtaagcagaaagtaactcttgtattcaccactgcaagagatttgatatcattcttcccaagagttggaaaattttaaaagaacatgtttgtagagagggaaggattatgttaacttgagtaacgatactcataatcagatcaagaaatggaaggagaaattgtaggtcccaaatgggagttgaggtgttaatttcagttttttattacagaggtgaccacctattcacctttgcttaaggtgtcttagccaaaagccactttccctgttggaaacaaagtcagttgaagcttcagagcatgaatgaataaaggttcaaagtttaaccttttggtagcatgagggaagtactgttcagtttactcatatctc

SEQ ID NO: 12735 - DNA, 1031 bp, Homo sapiens
tttgtcactgagatcctcatcacgtaaaaagtattgcctatcacatgcaaagccaaaaaataaaaaataaaaatttaaaaagccagcattaaaacttgcaagatgggctgggcatgatggctcacacctataatcccagcactttgggaggctgaggcgggtggatcacttgaggccaggaattcgagatcagcctggccaacatggtgagaccccgtctctattaaaagtacaaaaattagccagacatggtggtgcacgcccataatcccagctacctgggagattgagacaggagaatcacttgaacctggggggtggcggctgcagtgagccaagattgcaccactgccctccagcctaggcaacagagactctgtctcaaaaaaaaaaaacttgaaagatgggtgttagtggcttggatgaatatctctgaagttctcttaagaaatgctgtattcctaacattcttgatgatgcaagaattgaaattatgcagaagtgtgattttatttgaagtaattctgaagcgtaagatgttttagaaatacatcaatcaatttattttgcttacttttgtttacattttcttttttacgtgggcataagaatctgtgcccagtgtcccagagttctttcggaaagtataacgtaaaaattttaagtgataaaacattttgatagtttaattggtggtgtttttatttttggtgatatatctcatctggtgtattgcttcagcgacttactaatttgttactgatactataaaagtaattcttgatgtaattattttaggtgcctaatggataagaacttcgttaggattgggaaatggtttgtccgaccctacgaaaaggatgaaaagccagtcaacaaaaggtgagcctttagaatgctcttggctttttggtttctttggccttgtgggtgggtgaacagcttattgatttatttatttcctaataatgttagtagtttagatatactcaaatagatcctggatcacagtgttcttaaatactatatta

SEQ ID NO: 12736 - DNA, 1029 bp, Homo sapiens
cagtgtttgacgtgactccatacctgttacgtgccgtattgcttttattctcagcattatcaattttaagatataccttcaatgtaacaatggcttttggagactaaagaagcattatcacgttaaatagactgtaatttacaaggtacatttggacttgagaaataaggaaagaattgggaaaatgtgacagcatgagagttggtatatgctaattattaaatgtcctggctctgtgatcagatatacctgggcttgtgtgcagctctgctgtttattatctggatgacattctcactgtgcctcagcttcttcatctacaaaaattgccattgtaacactcatcttttattactgctacaagagttaaataaggtactgtgcctggtaatcaaccaggtagtggtggtatagtgattctggtagcagttattgataatattattgcagaaacttggtattaaacactagagttctagtggaaatatgtttatatgtactctaataaaaatataattaagtctgttagctggtgaataaactgtggagatgctttttcagttttgcttcttgaatacttcctccttgggtgggtgtgccatatttcctattttctaaatttaatggagtcacagtccttacccctaaaaagcatttttttttaaacttataagcttaggaaaagagatttggttacgctgaaaatgattttcttcattgtgaacaatggaagatcgcagtagaaatttattttctaagtaaaaccagtggagcccagtgactttttggtacattggttctccgaattgactgcccaaaaggagttccattgtggtcatcagaaactattaccattcactaacccatctaacctgtaatgagttgggtgagggcttgaattgtttccatcctctttgatggtgtggaaattacagaggcaaaagccatgtgcagaattgcctcaatatggaataaagaattgctatataactcttttgctggtaggtaggaccctgtatagaagaatta

SEQ ID NO: 12737 - DNA, 1051 bp, Homo sapiens
attatgataacaatagcattatatttgtctattcctatctttcaatgtgttgtgatattgtaatagaggtgatgcaatagaggtgattatcaaagggcaaatgaggccggacacatggctcacacctgtagtcccagcactttgggaggccgagacaggtggatcacctgaggtcaggagtttgagaccaccctgaccaacatgatgaaactctgactctactaaaaatgcaaaattagacaggtgtggttgcacatgcctgtaatcccagctacttgggagactgaggcaggagaatcacttgaacctgggaggcggaggttgcagtgagccaagaccgtgccattgcactccagtctgggcgacaagagtgaaactccgtctcaaaaaaaaaaaaaaaaaaaaaaaaaaaagagcaatgtccttggatgtggtggtgaagggatttcagaataacatactcactggagcatggtgggatgtaccgccctagttgaagaaatcgtgatgtaacattgacagtcgttgggtataatgtgataacaggagcaagaaatgagtaatcaataaataccaattttattgaaataacagtgtttatttctctaaagaaagtaggagaatgagtctttagacttaaggagcatatactttaatgaaagagacagtacagatatcgtagaacaagtgactgaaagcacatgtctatttgtaaatgtctagaaagaaacattcaccctgagactaatcagtctgtgtagctatttagtgaatatttttcagtcaagggaaggaattaagactttaaatttaaaaaacaaaattgatctgggagcagcggcttgtgcctctaagcccagctactcaggaggctgagtcaggaggattgcttgaggccaggagtttgagaccaggctgggcaacaaagcgagacccccatctctaaataaaaataaaagtaaattaaaactaaagaaataaaaaataaagattagctgattgtggtgacatgtgcacttgtagtcccagctatttgtggggccaaggcagg

SEQ ID NO: 12738 - DNA, 1047 bp, Homo sapiens
ttaaactatggaaagaagaattaatatactcaagcaccagttgacaaactattgatagcctatgtttcaaaagataatttgtaagttaattatttggaaaatatatatattttttaacctatgaaaaatctattctgaatggtgggtagattctaaggcctgcctatcaaactgatttagtctgtaatgcttgaccagtgttggtttgggtcctgggttttgtaactagaaggggtagattggttaggacttcactttataaacatttaaaatcctcagaatctgtcttggaaggctttcccacattctagtgcagtttgttagaattatgcaatatgagtgggaaagaatctcaaagaaagtaaagataactataaaagaagcaacagagccagtgaagtgttagcattgcccagtggctcaggctttttgggtttttggtttgatttattctttcaacttttctggtaatttgcaaattctatcctctttgcaaactctttgtatttatttgtaataccttttcaagtgagctctctgtagaacttcctaagttataatggctaaaactacaactggataaaactgcagctgtcctggttgagactggagatggaaagggccagagggactcactggggctcttgcacaggactctagtactccaaggaccacaggaagaaaccactgcaccttgtgttatgggagccgcccaggcctgccctactccagactgtgccctatccaaaacaacggtgttacttaactttgcaaccaaaatgccattctagccagatttcgaaagaacataggattgaactcattcacaccactgcgactgtaaataactgacctttatttcctaaaggacttgcagttttcatattgacttgttaatgcaaaggaatcttgtagagttgaaacaccaacatgaagtaaaaatattggcagtgttggtgtgtttaggtcatttataaattttttgcttatgagttggaaacttcttggcttaagttttggataatgacaacttttcctggatatatt

SEQ ID NO: 12739 - DNA, 1035 bp, Homo sapiens
tttttttttaaatggcttagatacttgttcagagcttatattgtacaataatccacatatattcaacacctacaggctgttagaggactgcatgcagctacttactgaatgccagtattgcttgcattgtctgttgtagaacttctgtagtcactaaattatcagtccccatacagtacatcacaggaagttggcagatacaatgatccatctgttatcacacccatcaagtgcattggcttgaagggaaaaggctgcagattggagctcagtgtgtgagagaagtgagattccaagatgcttatcattctttccagaaagtcctttttggccttttgtcaagcttgacttgctcatttctaaaacagcctttcagtttatgataccgttaccttttcattaatatttttggaaaaactagacatgttgtcagagatgcttatttttcttgaatgaggttttagggtatcagcttttctttcccctcctagcgggtggctgtggggaattcttggtcagattgtcatagaaaatgagcagtggaaaattgaagctgcacaatctggagagttttatttttaaaatagtcattcttaacctgaactaaagtaaagcaagtataaaacatttttatgttattccagtgtggccaagattttttttcttaaatttatacaagtatgatcactttcaaaggagagtatgattttcatagttaatcaaaaatgtttaggcagttttttgtgagtttaagaaacctgttggtttcctggaaagtcatgaatgtttatgatatcaagggtctgttatagagcctctgagatcttttagacaaaagcattgatgctgttcttaatggcactttgaagttttggtgactactcttgaggtaaatggatatgtgctgatcatttcattctttctttctttctttctttcttttttttttttttgagactgagtctcactctgttgcccaggctggagtgccgtggcacgatctcggctcactacaacctccacctccctgtttca

SEQ ID NO: 12740 - DNA, 1042 bp, Homo sapiens
gtgtgaaattatacttaagctatagtggaaaactagtgtcctcttccttggcaactgtgaccaagtgtgggagataagcctgaaggctttaactgaatagccatctgtttaaagcgtctggttttaaatgtagcagctcatgtcacatcagtcagaaaaggctcctgcagctgcagcagcctctgtttcagttaaataaataaacaaaatgtgtttcttttttgtattttgttattatgttcctaagtctccttttttgttgttggtttttttctttcatacttacaagattttggttgaggaagttgaattgttgataggtggggtcacctcatgagttaattatttgagattgtttaaatacatttttatatctgtctctgaaataacaaaagtgaagctttgtggtaagaaactattcagtttttttatttgatatgcactttcatgtgtcttggtgcatagtgctgatgggaaaagaatgaaatatatgatgaaatactgtgcttgaagagcagcaagcattgaacccagtcatagctcgtgaacttgtgaatggacctgtttctttttaagtatgtgaaaatttctgggaaatattctgatgaattttacataggtcatctcttactattgaacttaaaatatttccctttttctcccaagaagaacattttcagttttacttcttttgtcctgtgctgccttcagtgaatgaagaaaattactgctttattcatttgatattatggcattgaagtataccattattgtgaatttgatttctctagtataggcttagcaatttgaagatattactgggagattggcttatattaggaaatagtctcctttataaaaaaattcaaaaacgcaatttcagcttaattcatctctaagcagttattatgtatgatatgtgtacttctctatttagaagggctttactatgaatttttgtaaatacccttttcaatacacttaaaaattcttcaccttggccaggcacagtgtaatcccagcactttgggaggccgaggca

SEQ ID NO: 12741 - DNA, 1031 bp, Homo sapiens
ggttaagtttttgagtttttatttttattgattgatagacacagggtcttgctctgtaacccagactagagtgcagtggcatgatcatagctcattgcagccttggactcttggattcaaacagtcctcctgcctcagcctcccaagtagttgggactacagtgctatcacactgggctaatttttacttttttgtagggatgggcatcttgttatgttgcccaggctggtctcaaactcctggcctcaaggtgtcctctcgccttggcctcccaaagctcagatttaacatacatgtttgcactgggttatcctggcttttccattcttctgtttctcctttatggtgtaatatgagaatatttacccagtcgacctttcatgtggatagtcctttgtgctcctgattccttataaattaaggcaacttatgtgaatttctcgttttgttatccagcaaatgcatgctctgtaaggcagttgaggaaaggaattgcagtatgttaaacatctcggattgaaatgcttttaccactgttgcaaggaaaggagacaagtttaatagaactataaaacaaaaatgtataattatttttcattataacacatttttcttatgctataaagtgcccgttttattgatttatatactgtcatcttaaaataagacagtcctgtgccttattaaaatacagtaagtcctatctatgtccttacctttgtctctggatcactgcaacatagtttcttgagtttgtctctgtctgtaatggttttatatatattgatacatgtgatagtttcatttgaagaaaacctacagtgccatacctggtcaagttatatttagccattgaagtttttattttaaagtagtaatgtcattttttaaacatgagaaaggagtttttgattgaaaatattttattcttaaacctatactttatgtcttttttccatgagtgatagtttttttagattgatgatatagaatcaccaatttggcagactttttttttttttttcctgag

SEQ ID NO: 12742 - DNA, 1061 bp, Homo sapiens
aaaaaaccaaagcacgagaagcttaaggaacttgtccaagttcacacaggttaagtggtagatctgggattcctttccaggtagtctagctttctttctgttacacaggtagtgagtccttatccagttttattcctgatccactttttttctcctctcactccacttgatttttcagtggtctcttccactcccatagcttccctggttgcctgtctgggatcgagacttttgataccatctctagccagactgttttcttgagctccattctgatattttcgatattatgttggactcttccatatgaatttttcaccatctcatatttgacatgattttgttaatcatctgcatttattaatgaccctcctattattattatgcattactgtgtttcctgtcaaggtttaacggcatcatttctcagttatttacccatgtttgaattcctccttctttcttcacttgtaactgtagttacttaaagttctgccagttctccttctctaatgtttagtatgctgctctgtttccttctcatacctgcttttctgggtcctcatcaaggacgtcctgacttgtctccttgtttttagccttttctgtctctaatctgcatctttcaggtaacctgaagagttaatgtttcttaaaagttaaggtctcaatattcctgggttcagaaactgaactccattttatttagaaaagtagaaacttctcagcatgccgtttaaatttttctctttgttgcatattcagatacttcagtgtcttagtttttgttgttacctctacctacaatattcttttttcgtcagaattaagctttttaagaatgtttttagggtcagggaagggggtgtgggtatgtttcccctgtggagtgattatacctttataaaaacctcacataataggggactcaggaaatatttgttaatatgtattgaaattatttcaaatggaatttagtcatgacccaaatcttgcttgagataaatcttaacacttttggcgggaaggtgctggttttcttggggtaaattatataaact

SEQ ID NO: 12743 - DNA, 1091 bp, Homo sapiens
actgtactgtttatttggccacagcatggtttgtgtaaaactcaagttttggcacacatacaatctgcagagtagctttaaccactgtgaatttatttcccagtattttagactcaggtaaggagttgttataaactgctgtcagttctggactcccgttgttttcaaatttctctctgatccttttaaaatgtggctttggtacatttaaatcagcttttctcgaagcaatttttggtcatttttttttcaaatttgtaaactcttaagaaatacatgcaaaaatacattcattctttcttttgattaacattcactgcctgtctgctgtgtggttactaaaacagtctttcacctcaagtagcttaaaatctcaagaggggagataagctgcatacctttgtgtagcacatgaagagcagtgtgttagcagggtgatcaaagtgctctggaagtgtcctgcaggaacttcaggtgggaggtgggagggcgtccttgaattgtggctaggattttggggtggggagagtaaacatgtaatatatgttagagtccattagtttccaaattgtgttctttgggtctccaagtttatcacccttctactttttcacttgttttgtgttggtattgatacagtggagagtgagaaattgacatgtcagagagaaagagagagtgagagagtagaattgctggagcagtgttcttcagtaagctgtagcaaatgggaaacagtacagaagtgtagggcactggcaacaggtaacagcaaggatatatcttctctagtgtaagagaaaagagagagtatggagtacagaggctgataggtgttagatgtggaatgtggcatttctctttcagtggtttctgtcattgaaaaaggaaggaaggtcatcagttgagaccaaagataggagaagtgtcagagatttgtggggaatgcctaagaaaatggttagttttggaggagagtggctaagggaagggcttagggaagtgtgatttgatttctgcacgatgtcaagagcccacttgagttttggttattaaagtaagaccagtttgaatgggtttgggtttttttc

SEQ ID NO: 12744 - DNA, 1672 bp, Homo sapiens
gtgtgtcaggctttgtttaaagcactttttatgtatgaactcattttatcattactgtgaggtagggactatactatgatttcctgctgattgacaggaaactgaagcatggagaggtcaagtagtctctcaaaccaaagaacacgtaagtgagagaggaggggctctggctccatagtccttggtcttaaccactattttgtattgacttccatagagaaaatagcccacattatagctatgataaaatgcaaaatttcactttataggtaatagcctggaatcggtgagctggagtcattaaggcagttcggcaaaaacaaaaaacatgggggcaagtgtgggtaggaaagtgctagctgcctgagtacaaagcattgggtattaataaacatgctgtgtgcggcatagcaggaagcagctgtttggagttgaaggtttgtttgggagagcagtagaaaagatgggtttgattagttatagaaagaattttgaatggaaaagtgtggacttgggaacacattttctaggttgctgttgagaggaacaacagtggtacattaaatatggacttttagaactagaggaaattataaaagttattattggatctgtgctcttcagtgtttctgtgtctaccctgttttgtgttttaggttttgaccttttgctccagcttgtccagggacagagtggtgtagtgaaacaaaagcagtaaaccaagtatcacaaagcttggactttagtaccagcttttgcactttcctcactgtaaagatgttgtatgggttacttaaccagttggggtttaatttccttggctgtatagtggacttagtgtcacatgcctacctcaggatttctgtgacaattaaatatgatattttaaggcttctaacttactggatctaaataaattattcctggaaaaaaaaagtttgctgtgtaataaagcacctaaacaggaatgaaaaagcaggtatagaacttcaggtgttttgtcaccctccctcccccagtggtgtgtgtaggaaaactttgcttctttctgtaaatctgatgtctaatctcttctgactttacgttcaatcagttgattattttcattcagcagatgtgatcggtttgcagggttctcagtcaagtaggatagagaaaacatgaagatacacaactaaataaaatgctatatataaaatgatgttttatgcaataattatagctatgctatgttaattcagcaattattgctgctttggggaaatgagaaggctttgaggaggaggtagtatttcaaaatgatgaggtttgaaagaagtatatgatgaaatgcagaaacgaagaggtagcgtatttgtttcaggagaagggaatagaatgaataaaagcatagagaaagaaaagcatatgatgggctgggcccgtggctcacgcctgtaatcccagcactttgggaggccgaagtgggcagatcatgaggtcaggagttcgagaccagcctgagcaacatggtgaagccctgagtctaccaaaaatacaaacaaattagctgggcatggtggtgcatgcttgtaatcccagctactcaggaggctgaggcaggagaattgcttgaagggaggcggaagttgcagtgagcctagattgcgccactgcactccagcctgggtga

SEQ ID NO: 12745 - DNA, 1032 bp, Homo sapiens
ctggtcttaaaatttgatgactgtttaaccaaatgggaactgtttttctgaaagtgctttagggcaatcagtgctaatgcttttacatgcttactgaaagtagaaacctaggcatttgatcagagtattttctaagagatagaaaatgtttaaaagtcagatgataagcttgcataagcctcaagggtgacacaatttagtattcctaaataaggacttagtgtttcttgcagatgaggatattgcaataggaagctatttgacataaaaataaagtgtgcgtgaagtgtgctgtatcacttttgtgtaaactctctttttgattttcttaagcagaaatggctgagattgggtttacatagtctcttaaaatcaaagcttgctttactgcatagaataaaatgtgtttctctgactgactagtactgtataaaatagcctacctctctcatgcaaaaactgatattggacagaagatggaagagacaagataaaaaaaatgggaccagaatggaaagggaatcacagaggtggctagtattagattcccagagcaaggagaaagaacaagcaaataagaacatggtaactttttctctaaatgggtcagatagtaacctctactttatagtccctaatcagtgtgcccacctgtagacatagaaactttagtggttcctaggggcagagagggtgggaatcaggccttaaagagaggcagcaggagacattaactttgtgtaattgtactctgatgtactaagacttaatgacttaggttccttagcatctatatctttttccaaagctgcagctgtaattcattttactatttctcctaaagagtgtccattcagtgttattattattcatcaaataggttttgcatgcttactatgtggagggcaagtcataagatctgtaagaggaatttcttggatccctttctttatggcgctcttagtctaggggaggtgttagaggcaggatgatggacactaagaaagatgtaattataaaactgttaagtta

SEQ ID NO: 12746 - DNA, 1954 bp, Homo sapiens
aaattagctgggtgtggaggtgtatgcctgtagtcccagctacttaggaggctgaggcaggagaactgcttgaacccaggaggaggaggtcgcagtgagccaagatcacgccactgtactccagcctgggtgacagagtgggactccatctcaaaaaaaaaaaaaaaaaaaaaaaaggtaataatacttaagtatctctatatccgctgaagttaattcccaaaagtttggtaggtttcttagttttgtccaattaatcattgccactttgttttctttatacaaaggaagcaaaaaaaaaaaaaaaacaagtttttagttatgcagtgcattgtaaagttttcacagcagaaactgctgtatttatattaaatatattttaatgaagaagttaatatgtatggttatgattatcgcagtggtgaggcggctttcatttcctcagagcgggaagtgttaactgctttctcaagctccaggaatggcagaagatagatctgaatgaaaggataaggtaggaaaataattggaatcattcaaatggattagattggtggccatttaccaaaatataccttttttaatcattctgtttgtaacccattttcttctgaatggactgatagctcagtttctccctccctctggccaaaaacagtagggaggaaaaggacttagctcttctttttaaaagactttcctttttttttttttttttctcttcctttgttttttttttttaatggtagaacagttgagaaggtgattattgtagggagtggaccattgtgcttcttttatggggtggtgagggaaggaatcttctaataagaacttatgtctttggtcccaagtagctgatgagaagaggactagttctgtttgagtctcattgagtgtaaaaaagctaggaaaaacgttaaaaaaaacacgacttgaaaaaaatttgtattacagcacctctttttgaagtgccatctcatttatcgtgtattgttggaatacatagttaactggtgttttgaagtgcttttgccatcagagctcctagagcaaatggataaggataaaatctgacttctctttctctttaataggcaccgtttttgttcaccattttctgagttctggttaggatttggcgacagtatgaagatgaatttgtgtgtcccagaaggcaagccacatgagtagttgagtaagtaggaggccatgtacagttggaagaaagggtttatggtgttctaggtagccaccagaggagacagcaaagaagcagtatttgtcccagctgtgatcaccactgacactacactgctgctttttcttggcagcgatattattcttcttttatattagccattttataaattctgaaagggaacacatcttattctttgccaattctgaaaactctggccaggttagcttaagaaaataagataataataatacctaagtatctctatatctacagatagggatctacagacaagacaaggtaggtttaggataaagggcaggagccaggtctagggaaaacagtgggtcagaacaagataggggtagaccaaaggaggacacatataatggagagtgagatcaagaatgaccagatagcaactagaggaacttatagtggggaatgagacaaggcattatattaaaagtcatgacagcaaacaccagaacacatactagaagaaaggcagttggtgaaaggtttataatttaggaattagaacatccatctacgctgaaaaataggattgttgtaagaattgccatgaactgcctacagcatgggtactgagacagcaagcagtcttttgctagccaggaaagttcttacaagttcttcctgcgtagtagctactcctagctgatagcagtcatggaatacagcaattcagtttacgtctggcagctcctgactcctgagcagctggtctga

SEQ ID NO: 12747 - DNA, 1029 bp, Homo sapiens
tcattgtgtgaacaacagagtttgcttacacaaacacagacagtatagcctactatatacatctgggctttatgtagcttgtaggctacagcatgttattgcactgaattctgtaggcaggtataacacaatggtaagtgtttgtgtttccgaacatacctaaacatagaaaaagcaaggaacggtggctcacatgtgtaatcccagcattttgggagggtgaggcaggagaatctttcgagcccatgagtttgagaccagtttgggcaacatggggagaccccatctctgtaaaaaatcttaccaaaaaaaaaaaaggtgcagtaaaaattcagttttattatattatgggaccaccatcatctgtgtggtccatctgttgactgaaacgtcatcatggcggcatatgactgtattcgtatacctagagattttctttgttcttagtgtatattttgttatgaatgtgcctttactatgctttaaagtcactcagaataattcctctctgtggtttttgtcaccaactggttacacagtgaggtgcttttgtttcatcttattttggagttttgggggggatatataaaaaaaagttaatcattttataattatgaagtgtagttccaaagtcaaatctacaaaacaaggcataaagaagttaatgttttgttatttaacttgtaaacagtgaactctgtagagaatgcagattattttagcgttttatcttctttcagtatgtttaaatagaaacagatactcagttgtatatcagtgctttggtaactttttaatgctctggattcctagatttaataataagaggaggacaggtgtttgaaaaaaaaaggctacttgctgtttttcctcaacagccctttggcttgctaattttgtatattgttacctttttttccccgtctataacttttctttatccttcttcactgatagatgttcattcatgaaactgatagttcttaaatgtattggtgtaaataactttacttctggctcacatttgaa

SEQ ID NO: 12748 - DNA, 1048 bp, Homo sapiens
gtctgaattgtttaaaggagatcaagagaaaaaaagctattattgaaaaattatattttccttagacattgctggtgaatagtgggaaattttggtattacatatattttatccaaatttaggatgatatataaatatagtattaaaattttgattttgtgtttgattaggttcttggtttatattttgaaaatattcgattcagcctttgaaataggtcttctgaagcttttttttaaacctttttgtctaagtgaagagagaaggtttcttagaaaagaattccaggttcactgaatggctcttgacttcaagaactgagttactgcataacaagataagtcagatggtccaagaagcagtttacagtttttgttaccatgactacaacatattggtagaagaatattatattttatagttactgttaaacccaagttgtcgatgaaaaagtgaaaagttttagaactttgtgtccagtggatttatttatattactaaggaatcctaatttactgtgacttttttgttttaagtgaaagcaaagcaagtgtattagagcagcagagtacaggaaaatggctgcaccatagacagagcagggctaccccataggcagagtagctgtgacttaaattgtacttttaaagatacttcacagtttttcaaggggtgcgtgtgtgtttttgtgtgttttaagggaaatctatacaagatggatgtaacactgtgtttgctaggtacgaactttaaattctgggctgatgagcaaagatttcagaaagcatttctcagctttttctaactggtagctgaataattttctataaggatattataccccttgaaataaaaggattccatatttggtagtgatcagtatgtgtaggtaaattagaagcctcagataggaatttgggataatgaattacaaagtggtaaaaataaaaaagaccttttgctggatgcggtggctcacgcctgtaatcccagcactttgggagtccgaggtgggtggatcacctgaggtcaggagtttgagaccagc

SEQ ID NO: 12749 - DNA, 1895 bp, Homo sapiens
ttgtgaatatggtacacgagaaagtggatttaatttcctgcatggctttatgcttcttacattgatcagtaaagtgacctttcacagttttcccccagcagtcagtacatgtttaaactaaacttggtgttctctgtgagcagccgtcactttggttttcactttttccaaccactattggacctttgcatacatttcttccagaagcatctctgtccccttctttcttgaggcaagcattgattcttgaaggtttagatgctagtaggagtgatgactataagaaacaagatgtactacacttgtagtaggcacagtaatagagctacagataaagttctctgggaattgggaagagtagaggtgacctatagataccaggattaagcaagtcttatggaggaagtagcagtaaaaataatgcttcaggacaggtgtggtggctcatgcctgtaatccctgcactctgggaggccaaggctggaggatcagttgaacccaggagtttgagagcctggacaacacagtgagaccccgtctctaaataaataaataaagcttcagagagtaaattaggacgtgggtttcaggggcagaagagaggaaagatagcttagtaaaagtgtcacaagagcagagacgcagtggacaagtatagatcatagctagaatttcagcttgtctgttgagaggttgtaataaagagaagaggaagaaaaaagtttgaaaaggtaatttaaatcagatcatgggagaccttgaatactgggttaatacattaccaccattcagtagaccattagtggatctcttgagagtcttgagaagagaattaggtgaacagttgggaggattaatctgggctacaatatgttaaataaattggggctgggacattgatggtaaggagagtattaagaggtggttccatcattcttggaaagatgcagtgaggaccattaaattggtgttttgtgtatttttaatcacatctggtgttttgatccttaaatattgcacttttgtgtgaaaggagagctttaacttattggtattaaaattaatcaacttcactgtagggaaaggggcttggcttcattttatctgttagacatacattgaacaattactctttcctagatactgtgcgaggcattatggatgtagaagtaaggaagatacgatcccagcactttaggtttttgtattttagcacaataggagatattgaattggaatcttagtaactccttgtgttcagagtttataagatatcagctataagagaggcaggttaagaggatgtttgatgctggaaagatagataggaaccacactgtgtaacacttctttggcttaattccttagacagtggacaaaggctttgaaggttctatggaatatgtagtaacagatttctccaagacttctgagaaaaataggatgtaatatggttttgtcacctgcgaaggaaacaaagaatgttcacttagaggaatagaggaagtactgattgtcatttagactactccatttgtgggtgaaaaagcacaaagatcatattatgttatgctgggttattgatagtaactaaagcaaaaataagatattttacactgccacttccaaaaaacaaacctctttattgggacatttaaaaggaattaacctactgctagtttagtttatgcatatataatgatatcctttggaattttaatgcagattttgataatttgtaaatttaagggtgccctgaacattaggatatattagttggtagtagtgatgtgagaccagattgataggcttacattcttaaatagggtggcctgaatttatcagtccaatgaaagtgcatgtctgtgaggcaacaaagattattatgtttgaga

SEQ ID NO: 12750 - DNA, 1032 bp, Homo sapiens
accaccatttatttgagcctctattattttaggtgctatgtagaatacagaaatgaattggaaacatttttgcatttcaggagctcagaacctagtagaagagagagtatatacacacagagcattgttaaagggtagaaagtaaagtctcctatgtggggcccatggtattactggagttttatgtgagaggctgagccttgaggacgagttgatttttgggcataataaccttaaagggtagatagaatttggatacatggctatgtcaggacaagcatgtgcgtgtaactgcacattcaaggatctacagtagggaagtttgagatgtgtattggggaagagttaaagatgagaaattgattgaaaatgaacatttgggcctcttggagcttaaacactaggctaagtagtttgggcttcataggtagttgggatcttagagggtttttgaataggacttagatagaagctcccagcagattataaactgtatggggataggacctgcatctgacttttgcccatcattgtaattccaggaccatcgtaatgcctggtacatgtgctcgctttggcagcacatacactaaaattggaacgtaattcctggtacatatttgttgaataaaccagtgagcagatttaatgaatgtaatagaagtttgtgtaaagattatcagtctagcaccattgcatgctaggaagacttcctggtgtcctggaacacataggaaaacatgatgacatgatgttgttataggatattgttttaaggagagatgtggccacatttgaaagattttcttgatgcattgaattcttttttaactgcattttgaaaaaacagtgatataattttcttctctttttgcagtatcttattttttattttatttttgagatggagttttgcttttgtcgcccaggctggagtgcaatggtgtgatctctgctcaccgcaacctccacctcccgggttcaggtgattctcctgcctcagcctcctgagctgctgggactacaggcacg

SEQ ID NO: 12751 - DNA, 1643 bp, Homo sapiens
ctcgctggttcaagcgattctcctgcctcagcctcccgagtagctaggactatagatgctcgccaccatgcccagctaattttttgtattttttttgagtagggctgcatgttggccaggctggtcttgaactcctgacctcaagtgatgctcctgccttggcctcccaaagtgctgggattacaggtgtgagccaccacgcccagctactttacctttcatatttgtcattattttgtggataataatgaagaatacatttgtatttcatgagaaacaagtactttcaggaaaaacacatatccagtgataaatggcagctaggtctaagtagtttataaagtatacttttatttttcttggatctgaattattcaagttttgatgtaaatttcctgattctttaaataattacattactgttctgtttttctgttttatttgaaagaatgagtttgccaaagctataaagtagtaagtttttcattgggtgattatctgaatgggtctagtgcatacttactaaatattagacttaatgtgtaattatatacttgaaaggaaaaataacatacttattaagactgataaataatacattcatattgtaaaattatggtaagatcataatctcagttctttcagatgaagaattgaaaaagatctagtgaattagataaaattattaaggtaaatatgcttgaaattgagagaacaagctaaagtctatcttttgagtgtaagtaaaatcgatgtgttaccacaggcaacttactgaaccatgtaattagtttttttctatgaaaaatgagacatactgagattgtgttaaagtagcatgtaaagggcttatgttctaatgatatgaaaattaaagaattggtaaaaaaaagttataattttcagtttgttggtaagtatagttattatggcctaatgttttgcgttgatatgaaatcacctacttatataaagtaaacctgagtaaaatcctcttaaatgagatgttagagtcaccattggaacaaatagtgttgaaaattgtcttaacactagattaactgttatttggtatattgttttttaaaatgtgagtaatttttatgattaatacattgtgactggtagataagtgtttagtctaacatttttaagtgtagccatgtttgatgcccccctcaccatttgtgtatattttatttcaaaagcttgtactttcatagaaaactttaagatttagaagaggctgttgtggcctggtgtgatggctcatgcctgtaatcccagcactatgggaggctgaggagggaggatcgcttgagcccagaactttgagaccagcctgggaaacatagtgcgataccatctctgttaaaaaaaaatttaaaaaagaggttgttgatcattaagatggcatagtgatataggtaaagggtttttttgtttgcttagcaaaatattttcttagttttatttcttagggaggctgaggtaagaatctgaatgtggaaaattgaagaaaaggtttaaatattggtagaatttagggcctaaataattcgagaaagaattatatattagaacattaacattgaatggagtagagctacacatttatagggaataacaccttctgcttataa

SEQ ID NO: 12752 - DNA, 1073 bp, Homo sapiens
attttttagggtatttggtctataaataagagaaccattgtgggtgacattgcttgcttagctgggtaatcagcaaagtcccagaacttaacattcatctcaaagcctgttctatgtagttagcagttaacttaggtaaaattagagtttcagaacatctggattctgtttatcagaattttaaaaataagatgtcacctagaagataattacaacatttttgtttgtccattaaaatatgaaaacatatttttactttttttccctatgtagtagagaggtataaagctttttaaaaagtgtctttcttatctttcatgattgtttctgactgtcatcttctgtttctctgtattaatctcttacgttttagctttttggtctgctctttgttagtgtggtacatataattttgtaatgatgaggaaaccaaacccaactgctaatgagggttatttagttgataatatagaataaatttatttatctatgccaacggagaaaatcgtcagtgttcttagaaatagcttattaaattattgtgttatttttcatgggctttgttactgagttaacaaaaaggagtagggcatttaaattttgggatagttgctttagattgcatgtgtaaattaatatcttaagtattttttggtaaagagttaagcaaagattgaattatttttagatatttttaaaattacagaaacactacatttaagttagaaaattaggaaaacagtcatcatatggagagaacaaagaaataaaaatactgaagtctgaaagagttttagatgttttatgtgtaaatgaaattggtaccatacagtttttctaattttctaattaaatgtagtattgtgaatattttctcttgggaatgattacttttctttggagtttgatagtggtataaactgtttatattttgtattctatcaggaaagtattacagtaatggaataattataatttcattgagtgcgtctcctctttttaatatgaattttgagcaagtttttagattcatttatatgaagtgtccatttttgtaggtaaaagtagttgaa

SEQ ID NO: 12753 - DNA, 1072 bp, Homo sapiens
atgtaaagagctatgtagaaatcttgatagaaagtttctcccaccttaaaattcgagaagattgacatacattcttcactgggaggaatcttatgatatgaagtttcgtgtaaatatttattttagcacaattgcttttctgtatggaagactgtttttagtggtctgtaagtaaaatgagaaaacgattacaattttttgtctttttccaggctgaactcacgggaatcaaatggcgtaggtacaattttggagggcatggggactgtggacccataatttcagccccagcccaagatgatccaattctgttaagtttcatccgctgtctgcaagctaacctgctttgtgtatggcgtcgtgatgtcaaaccagattgcaaagagttatggatattctggtggggagatgaacccaacctagtgggtgtaatacatcatgaactgcagggtaaggtttctgtttttttcttaaaaattatttgcatcatatttttttgaacattgataaatttcaaacagattattaagacttgtctaaaagaacgatcttaagtgtttcatggatgtctctctcaaaaggaacattctcacccctcttcctcccatccctgtttttttttcctaactcttgtccttttccagttatgctgagaatcagaaccttgtgaaccgctgctgttaaatgagagtattgtgtctcctgggtgcggtggggtggaaaccaggctaagatccactgtttttaaatgatagtgaattgtgagtaactaacaagacagtgaattgaacagttactgtttttttccttggactgtggttgttatggttcactgccagctgaactctttggtggaaaattggagagtgatacagaaatttagttttgagcctaattggacaaaattgtgagattacattgaatagtattttgaggaaagatgaatatatgggatctggtctgaattgggtgtagcaaattttcttttgcttttatttctgtttttcatgtaatttggtgattccaggaaacattggctccggtgttgcctgatttttagcttcagattgca

SEQ ID NO: 12754 - DNA, 1058 bp, Homo sapiens
gccattctcctgcctcagcctcccgagtagctgggactatgggcgcctgccaccatgctggctaatgttttatattttttttagtagagacggagtttcactgtgttagccaggatggtctcgatctcctgacctcgtgatatgcccatctcggcctcccaaagtgctgggattacaggcgtgagccacctcgtctggccagttgggccttactttaaaaaaaaaaaggatccctcacgcctgtaatcccagcactttgggagaccgaggcgggtggatcacgaggtcaggagatcgagaccatcgtggctaacacagtgaaaccccatctctagtaaaatacaaaaaaaaaaaaaaaaaaaaaaaaaaggatccatgatgagaatctctgccttctaattgtaagatttagagaatttatatttaatataattatgttgatttacttgggtttaagtacactgtcttgtttttgtttttgttttcctccctattggtcccatctgttcttagttcctttcatcctctgccttttttttttttaaacctactttggattattttgagtattttttatggctccatttattatttatccaataattggcttattagatatacctctttcctttactttttagggattgatcaagggtttataatgtgcatcttttacttaccacagcttaccttcaaataatattaaacttctttatttataatgtaaaaacctcccattttctccttctggcctttgtgctattgttgtcatactttttttcttctttctatatctgacatgtagtccacaaggcattatcatttttgctgtaaacagttaataagcctttaaagaaatttaaagatgagaaaacaaatttttttttttttttttttttttgaggaggagtctcgctctgtcactcaggctggagtgcagtggtgcgatctcagctcactgcaacctctgcctcctgggttcaagcgattcttctgcctcagcttcctgagtagctgggactacaggagcgtgccaccactcccggctaatttttttt

SEQ ID NO: 12755 - DNA, 1062 bp, Homo sapiens
cccctccaggcaactaccaatctgctgttactgtagaatcattttgccctttctagaatttttaataaatggaatcatatagtatgtaatccttatttctggtttcatattattgcttaagtagggtttttttttttttttgctaaatagtagtctcttttttggatatgccacaatttgctgttggctgtgaaaattaatgtactgctttttgtgtgggacatatgtttttatttctgtaaataactaggagtttcactttataaagaactgccaaacttgcaaaaaataaaatgtttgtatcatttaatatcccatgagttttataggagttctaattgctctgcattcttgcagcatgtagtacaatgaatttttacaaatttcagccatccttgtggcgtgtagtacatgttgtgaatcttttatctaaaatgcttggaaccacaagtgttttggattttggattttttcagatttgggcatatttgcattatactggctgagcgtccctactctgaaaatttaaaatttggaatttcctttgagtgtcatgttggcatgcaaaaagttttgattttggagcattttggatttttgaattagggatgtgcagtatgtagtaacttatttcagtttgtaattttttgataacagatgaagtttaacatcattgcatgtgcatattaagtcattcgtatatcttttgggaaatatctcttcacatcttttgcccaatttaaaaattaggttgttttcttactgaattggaagaattcttggaatatcctggatacaagttcattggcagatagatgtattacaaatgtattctcctaatttgtggtgtgccttttcattttctcactgtcttctttgaataacaaaagctttaaattttgattaagtcaagtattacttttataaatctatacttttcatgtcctaagacatctttgccatcccaaagcaggaaagtttttttcttatgatttcttccagaagttttacagcattagttaattaggtttaggcttgcaatccagtaacttattttaagtt

SEQ ID NO: 12756 - DNA, 1103 bp, Homo sapiens
tcagagcttttgctgtttgtaaagagtgcttgctgcaggcgtgcactgcttaactaccagctacatgcattttctcatgctcacaagatccttttgaggtagagtctactattctcatttttcagataagaaaactgaaacaagaaatttaagtagcttgtccaaggtcacacaggagctgaatctcttgattcaaagcctgaacttttaaccagtagtacatttgtattttatgtttttctttcttctatctaaattcttttaggacttcagtgaagctcctcgtagctattccaaacattattggtctctttctttttcgagccttttgaaaattagcagtgtagaccatataatttagtacaagtgctaaggtagaaatcactggagcatatagatttgcctgagattaatggagtgataatacagtttacgtttttttaaagtttcatcagagattaatggagtaatatacagcctacaatttcttcccagagatagggaaatagatttttttttgtcttagactgttccaaattgaggaatcatttggaaaatgaaaaattataaagatagcttattgttttgattgatgactggggcaaggttaaaaaacctacataaccatgtgatctaaaaaataaaaatgatcacctcgataaaagtctttcagttttttttaaagtaaaagccagttattaaaataatgtcaaaatgatttagtatcacaatcatatgcttatttaaaaatagacaaatagcttaaaaagtaatctctttttctgtacaggcagcttggaggcctgcattttacaactgatttggttgtcaagggatctgggctctttctgtcttgttactacactgttcttagtttatggcatatagttcaagatggctattcagactccagtcatcaaggttgcattctaggttaggaggaggtggaaatgtgggaaggacacaccgtcctttaaggaaacctccaggaagttgcctacaacacttctggccatacttcaaggccttacttaactgcagggaggctgggagatgtagttctttaagtgggcatgttgttatccacagcagtgtaaagtgta

SEQ ID NO: 12757 - DNA, 1094 bp, Homo sapiens
tatcagcctttgttacctagagcatctacttttaatagtggtaagcccagaaagcagatgcattttcctactgcagatctgctttgggatattctcgtttaattttttacatgaaggttttgtttatattaatttcaaatcagtgatatttttggtaagagggtgaaatagacattccatctgttttccttcatgcctttgtggaaatggccagatttggggaaccagtggatagaatagcgggggcatttgtagagaccacaaaccagtgtttatcattggtacttattgcttgttttgattttggtttctttcaaatttttgttcctatcattctattctttgtttccgtgacacttagctttctgagtgcacaatattttttttgttattgagagcgtaattgttatgccatgttgtattttttgcctcacatgttggagaaatttttccttcctcgttccatgcctctctctccatacccccttttcctcagcacattcctgggttcctcgtgttcaggagtgcaaccctgactgttggactttatgtgcatcaccagtgctcagttaagcgctaaaatggacatatgcgcttcagaaccttttgatgtaatctccttggtgtggtggggaccctttccagttgttctgagtgcacttattggcacagcgtgtactatccattgtagattggctgtaaattaattcagccttcgtatgtggggaggtttttcacttggctaccctgaaggtaaagagttggctttcccgcagttgtcatttttctttactttctctccaagtgaggtagtactaatgaaataccaaatatttccaagaaatacaacttccaagaaatgaaaactgtaaaacatttgtccatgttccagccgctccattagatcagatttaccccaattcttcttctgttcttgttaatgtgcacatttttgtacatagatgtaatcacagtgtaaatagaattctttattcagctgtactcactaacatttcccatgtgcttataattttcataattacaattttagtggaaaagtaatttcttttaaaaattttatacaattttatgta

SEQ ID NO: 12758 - DNA, 1057 bp, Homo sapiens
catttagaatttatatcagagcatgaatcttcatcttagcaactaaagagcacaaatatttgcctcctgagatacaagttcttaactaacatttaagttactaaaaacacagtgttcaaagtatgtcgctttaacttgaaaagtgtaatcatctgcacagattgaatcaggtttcatgatcccaaatagactacattctttagttgtctacaaattacttgagagagatatgtatgaagatgatattttgttgctatttggtgataaggttgtgaaactgagctttgcaacccagacagatggtgctattcttgaatctgcaagatcctataacatttaattaaacagcggaatgattctcatgagaatccatagtttgttatatataagctaataagctgactttagtaaattgtataaatttgatttgaagtagaagaattacctattctaggaaactattctaatgaatgttaagatgagtagcttgtgttagtggtttatatggtaaactcaaggaatattccagatggaaaaacaagtgggactcactaaggtaggcgtttatcttctaaagtaactttgattttgttgccaaactttctcatatggtaggtgtgatatgctgttaagaacccacagagctgactttaacaatttccagaaagctgtgagaaatttagttatatatgttaacacccattttagaaaatatctattgatttagattccttgtaatctatcttatattttaattttggaattgaaaatagaaataagtaaaacagcccagtctagttttagtatgttatgtgaacataactctttagccatttgtaaaagtttgagtttggtggtaatattgtatgatggagatgaatgaattttttagttatataaataattatgtaaataatacaataacagaccatacatttttagacatcattgcaaatattcttttattaaatttaccttttctttaatacctattttttaataggtagaagataatgtgatgtttgatggccaattgaaggacatgaaggaattggga

SEQ ID NO: 12759 - DNA, 1027 bp, Homo sapiens
tctagcgattctcctccctcagcctccggaatacctgggattacaggcatgtgccaccacgcccggctaattttgtatttttagtagagacggggtttctccatattggtcaggctggtctcaaactcccgacctcaggtgatccacctgcctcagcctcccaaagtgctgggattacaggcatgagccactacgcctggctatcattttctgtaatgaaaatatttacaatttgttaatgtatgttttcggtttagcattttgttgttagtagcacatggtgttacagtatttatatatttttaatagcaataattgccacccggtaatagttgccatattaacctccaattgctagtaaatatttttaagtacataatagacagcaatttaaggcatagtgtagcagtttactggactgttttaaagagccatttgtatgtgtgatgagttcataattttaaagagacaataatgtaccttaggcctgtatgctacaaatattttgctgtggatgttgcttgaagtactcactgggaagaagttaggtagggcctattctttgtgagaagaatgggcaagggggtgtgtttaggatagtatgtatttattgaatttatgccaggtgcttatatagcttatcattttttttttttgttttggtttttttttgagaccagagtcccactgtgtcacccaggctggtgaagtcttggctcactgcaacattcagctcccgggttcaagggattctcttgcctcagcctcccaggagctgggattacaggcgcctgccaccatgcctgtctaatttatttgtgtttttaatagaaatggggtttcgccatgttggtcaggctgctctggaactcctgaccttgtgatccgcctgcctcggcctcccaaagtgctgggattacaggcatgagccactgcgcccggccagcctggtttttaattgtattccttaccactttcagagatctctctcaccagtttgtactagtgctataaattgtgataacta

SEQ ID NO: 12760 - DNA, 1048 bp, Homo sapiens
ttacatttaattatgggtggcatagatgcctttttgctatgagactaatggagaaatgcaaattctcgccaacttttcaaatgaaagtgttactttattaaatgtgttacaatgcagaccaaaaaatcaacacgtgatttttacctacaaagacatagtatcattgctcccactctagtaaaatcaggtaaatttttttaaatgaaatattttaatccagatatttaatcttaaaattcatttataagttggaattctttctcttagtattgtgataattttcccttgattttttggtatgtgggagtaaaacccccttttgcctcaactttttccctcctcagtcttatcatttagtatcagtcaggttcagggacttccatagattagcaaacatattgatcaaggggtatttaaaatggtttttgtgtggttactggtgaccacattgacacttacaggtaattaaaataaccaagtagagcgatctcccaaattatcatatattatgctgactggtaatggctgtgtatatacggattctgtagacaaatgaaagtatatgtatagccagtctttagggtatatcatttcttttatcttttttttttttttttaaagcttaagtaaggatgataacgttacagagataaaatgcttgagattcttttggagaagcaattttgtaggagaggattctgtactttgattttgaatgactaaaggtttgtgtttgagatatttctcccctaaacctctttaaaccaagggattgatttttgaatatgcttttttaaaaagaattattttttaagtagcaactttgaactagagaaccatagaaatgcttagttgatttttttttttaaaggaacgtagaatgtcttcattctcttgtacgtggagtgtggataaggtgctattgaagaaatgtaaattaattaaactgctgacttgtacatttttctgattccaaattgagattttttttttttgaaaatgctatacagcagtagcaacctggaatattaaaaatatgttgcccaaa

SEQ ID NO: 12761 - DNA, 1028 bp, Homo sapiens
tcccccctttttttccccccgtaaatgtggaaggctttgccttgtgctgccgcgcctccgatcggcaacctcttcccccgttgttggatcagctgcctgcccgcccgcctgccttttgaatttttttaaattccataatgacacctgcaatttcgccctaaaatagttgattgaatgcgattgtgtcaggaaaggactcttgcacccgaagctcccgcgattgtaaacatcgacagccgcctgcctctcggggcttactatgctggagagccgtaaagccattgcaccgagccgacggaaggtggagaaagctttttcttctttctctcctcctgtgtcttttaaaaactgtttttctctatcctaacaacgaatccgcacacacacacacacacacacacacacacacacacacacacacaaaagcaacaagctggtcggtttgataacatcgcttttatctgccttcgcctctctcgcgctctctctttctgataattgacaacttttccttcggatttgaatcgcctgccttaatcttgaagcagttagggtgtcaattgttctcgtggaagcctggcacccgccgacggtgtctagattcatcgaaattaaaaatgtatagggctccagcaactcttttcctggcggtgtcagtgacatttggtggtaaatgccatctttgctttttattgggtcgtattacctacctctgaaaacattcacgttgttaaacctggcgtttaggctaataattgcagtgcgtggtctttaaatatgtgctttgtgcatgagttactgtatgtatagctatgtgcccaggagagtacgaatttgtttaaatattgagcaaagatttgtaaacagatgtaaggcaattacgtttcaagcgtagaatataattggaaaattggctgaacggtttatttaatttagccttaaaaacacccaacttgttttaagttgtgtaccctgttttttttgggggggaggtgagtcccttttggagagcatgcattttggaaatt

SEQ ID NO: 12762 - DNA, 1049 bp, Homo sapiens
agacacaaaagggcacctattacatgattccatttatatgaaacattcataataagtatattcatagagacagaaaaagcagatttgtggttgccaaggactgggggaaggggaggttggaagaatggggagtgactgcttaatgggtatttcttttcagggtgatgaaaatgtcttggaactagacagaggtggtggtggttgtgtgacattgtgaatccgctcaatgccatttaattatacactttaaaatagttactggaggccgggcgtggtggctcatgcctgtaatcccagcactttgggaggcagaggtgggcagatcacttgaggtcaggagttcaaaaccagcctggccaacatggtgaaaccctgtctctactaaatatacaaaaaattagctgggtatagtggtggatgcctgtagtcccagctattctggaggctgaggcaagagagtcacttgaacccaggagtggaggttgcagtgagccgagactgcgctaccgaactccagcctgggagacagagtgagactctatctcaaaaataaataaataaaataaaataaaaataaaacagttagtggttaatttcatgtcgtatgaattttccctcaattaaaataaataaataaataaatcagcatgggtattctaggttgcccaggagccccctgaggcctgactagtgaatggggccctccttaggccggccctccagccttggggccacctcaccttgcagaggctgtagagaacgatcaggaccccgcccaggaagtagctgttggaggagtcgtcacccatgatgtatttgtaccacagctggatggggacaagggatcggaacagctggctcagctcctcgatgaccagatagaactttccctgcaaccacacagagaacatcaattattattagcagtaaagacccaaaggacccagctggggggccccccgccccgggcagtgatgacattctaggtcacaggcaggccattaatcagctctggaaagcactcaggccagctcctaatggggctgcga

SEQ ID NO: 12763 - DNA, 1028 bp, Homo sapiens
ccttggggtctaggagggaggatggcattgagaggcttgctggttatgaggcagaaagctgacctcatgcatgacttggttgctatctcccccacccccacaaaagtgtcctcggagttcagcccacagcctcctccactccccaaggggatttcagggtttaggttttatggattaaagagccaagaaatggctacattctgttcaaagatgatttataaccgggggatgttgtgggagggagtgggccatttaaatgaaatgcaccagcatctcactgattgacagaggtctgatttttttccccccaaggataagctactattttcagaagtttctagaagggctaaaaaaagatgtgtgctggacggagacttggctgcaaagactcttcagggagcagtgattattttttgctttcattttcgaaaaatccaacataagcaggtattcttcctctgtgcaggataccacacactgccattttcaaagccgaggtggcgaggtgtcaggctgcagattcggacggtcattctccaaggctggatttgcaggtcaccacccggtacctatagacagagggtccagcaggctggttagcagacaccgctccagttctaagacgccagcagtgggatccatgtttaaggtggatgcggctgaaatgggaattatccccccacaggctttgctgtacagttctaagaagccagcagtgggatccacatttgttaaggtggatgcggctgaaatgggaattatccctccataggctttgctgtaaatgaccaggtcctttagaatgtacaacctctcagtgctgctgcaagctgggagctggatttctttctgtcttccttttaaaatccgttccttgtgttttcctaaatagccctttaaagagaaatgcaaccccagggctgctgaatgccagggaagactcccccaccccgcagctttgaactcagcaaaccaaaaaaaaaaaaagaagaataatgcttattttgggagaacgtgtttctcctcat

SEQ ID NO: 12764 - DNA, 1106 bp, Homo sapiens
tgaaaaagaaaattgtagtcttgcctctggagaaaggaggttcagctttgagcagaaggtctgagtagcagaagattgcagtcctttcccatgtaaagaccagacagattctaagcctttctacctttccattgcattagatttgaccctttagtgatgtgattttctttccttctttctgccatttctctttcctttctttcttcctttctctttttctctctttctttccctccctccctccctgcctgcctccctccctccctctcttccttccttccttccgtccctccttcttcctgtctctctctgtttctgtctctgtctctctctctctttgtttttttgagacggggtcttactctgtcacccaggctggagtgcagtagcaggatcgtagctcactgcagccttaacctcctgggctcaagcgactctcccacctcagccttctgagtagctgagactacaggtgcacgccaccacacctggctaatttttgtattttttgtagagacagggttttgctatgttgcccaggctggtcttgaactcctgagctcaagacctcctgccttggttttccaaagtgttgggattataggtgtgcaccaccattcctggctggataggtactttaagacttggaatcactataaatatattatctgtaacctgaccttttccatatatcacaggcatttgttcaacagcttaatatttttctatgagacacttctttttgtttgtttgttttgagatgaagtctcacactgtcgcctgagctggagtgcaatggcgcaatctctctgcaacctccacctcccaggttcaagagattctcctgccttagcctcccgagtagctgggattacaggtgcctgccaccacacctggcttaatttttgtatttttagtagagacagagtttcactacattggccatcctggtctcgaactcctgaccttgtgatccacctgccttggcctcccaaagtgctgggattacaggcgtgagccaccatgcttagaagttggttggtattgctttatttggttagtccatcatttacattccccatccatcattgtgaagtcacttgagc

SEQ ID NO: 12765 - DNA, 1048 bp, Homo sapiens
aaagaaactatgcaacatagtcactattgtttcccaaattcaggttcttccacttatacaactgctaattattgagtaccttctgtgtatagggcactgtggatacaggaaggaccaagacataagagttccctgctttcatggagcccacattttagtgggaagagacagacaataagtaaatattgttcttgttactacttctgtgtaacaaattactccaaaactactaagttttgcttcaaacaactagagccatccctctgtctctgggcgggagtggttccaggatcccactttggatcccaaaatccaaggatgccaagtccttgatataaaatggtgtagtgtttgcatataacccacacactgtaggctttaaatcatctttagattacttataatacccaatacaatgtaagtgctatgtaactaattatactgtattgtttttatgtgtgttttttatacttgtgttatttttaaatttttttttccaatagttttgatctgaggttggttgaatccatggatgtggaactcacctatatggaaggctgacatatttgaccatgctcacacattctgtgggttaggaatttggtcagggcatagtgggggtgacttgtctctgctccaggatggctggggactggagtcatgggtggggaggcaaccttatttacatgtctggctgttaatactgggagtcagctggggctgtcaattggagcagctatactcagcctcttcgtgtggcttgggcttcctcacagcatggcagccggattctgacacagtgactgagagctccaaaagcaagtaccccagggaactaggtggaagctgctttgctttttctgtcccagcttccaaagtcacttgggtcagaagcaagtcacaagctgatacagattcaaggtggggcggaattagactccacctcatgggggagtggtgaggttctagaatagcatgtggaatgggagatattttagtggccacctttggattatgcaatctaacacagagataattttagaaactc

SEQ ID NO: 12766 - DNA, 1050 bp, Homo sapiens
tcatgtctatttaatgtttaatattagaagtgtttggtttaaagttctaaagtttggtgaagtttttatggccagcaatatgccgtgggaacttaactcttgtttacatccattagcctatagtaaaattagtttcattatatatcattttgcttaaagttgccatttctttttttgagacgaagtctcgctctgtcgcccaggctggagtgcagtggtgcgatctcagctcactgcaacctctgcctcttggctgcaagcgattctcctgcctcagcctcccgagtagttgtgattacaggcacacgccaccaggcctggctaatttttgtatttttagtagagatggggttttgccatgttggccaggctggtcttgagctcctgacctcaggtgatacgcctgcctcggtctcccaaagtgcagggattacaggcctgagccaccttgcccagccaaaattagtttcattatacctcattttgcttaaagttgtagtttctaagaaaacctattgatgacggttggtgaagagttactgtaccatgttgcgggtctcctggatcctgggctgggagcgcctgtaggggaggttctgggcaaatccaattgactgtgggtttacaaaaccaccacggtgggaggtaagatttcaagggggtgggaagagctggaatcgtggcatgccaggggattatcactgtatgccttgcccaagttaaaataacttgaccaataaagaaattcaaagcatttaatattagaacaactacggacatcataaagcagaaagcaagtccgacagtgttttgagaggcgatatgagatcttcaggtgtttcaccatccagctcccctggcagcatgctcgagtatcttctacctttaggggagccggggatggaggcgtccctgagagggactaaagaaggaaagtagaggatcaattggctaaaaactcagaacttgtttgtgaaagggtctggataaaggtaagggggcttaatttggatacatgttggcttataaaggagcatttatcctttccct

SEQ ID NO: 12767 - DNA, 1088 bp, Homo sapiens
tttctcaggatttttcagaacttttaagtggtgcctggttcatgttttactcaattaagttttgtgttacttagatttatcatttttcttacaagtaaactttgggaaaatcttcttagtggattggcatttatttttctttcataatacatagttgccaacttcattatgttgttaattttttcctgttctgcttcttagcaagctaggagctcaggccagtaaatgcaccaaatccagtccttgctcctctctaacagccaggagtggggctgggagcaccctcgaggactgtcatttacttcttgcctggtttcccaccgttcctgcctggacttctcatgcatcttgttctgggcccatgttcagaattctgtgtagtagctgttgggtcctgttgccctggcacatctgtgtttgataacctgagtttccgcttctttcctcctcccaacagaagccgaatgttaccaacaccaggctgtccctcgataatacatagaaaggaaaaagtggaggagaagggaacaatgctgaaacacagggctgggtctctggagcagggcttgtcagcccagcactagtcacatgttggtcaagataaccgtttgtggggggccgtcctgtgcgttgtagggtacttagcagcacccctggcctccacccactgcaagctggcagcagctctcagttacaaccaaacatgtctgcaggccttaccagatgtccctttagtagcaaaagagcccccagatgagaactgctccagacgaactggcaacaaagcagttattctaaactacctgcttgaattctgtgtacttcagatacctatgtcctgtttaccaatgacaggtaacagtggttcccttagagcaaaggggatttttgtctcgatggtattcccagcttctttaccctctactatttctgtgcagctctgcaagaaaatccaaacatggccaggcgtggtggctcacacttgtaatcccaacactttgggaggccaagacaggaggatcatttgagcccaggagtttgaaaacaacctgggcaacgtagcaagaccctgtctctacaaaaaagaa

SEQ ID NO: 12768 - DNA, 1062 bp, Homo sapiens
aatcagtatccaaccagaattcattcactgcatttggttgttttttttctctttagtctctcttattaaagacagttcctcattcttcattttttttcccccctttttcatatgactttgactttttgaagaatccagactggttgtcttgtaaatttttttttttttttgagacagggtgctctgtcacccaggctggagtgcagtggtacaaacatgagtcactgcagcctcaacctcctgggctcaattgatcctcctatctcagcctcccaagtagctgggactgcaggcatgcaccaccacacctggctattttttgtgtttttgtagaaatggggtttcaccatgtagcccaggctggtctcgaagtcctggactcaagcattctgcccgcttcagcctctcaaagtgttgagatcacaggtgtgagccaccgtgcctggccattgtcttgtaaattgtataacattttggatttgcctcattggttccttaactgtatgatgtctgccagctgggagtgaagtctgagtcctgattagatcgggataagaattcttggggaggatacttcacatccctcgccccgtgcttcccactgggtctcatcaggggccccctgtgagtgatactgagtttggtcacttggctaagatagtgactcactatttcaattaagaaatccacgtggtcactctgtagcatcctgtaaagatcctgttccccagtgaccttgaacatcatggttttagcactttttgaatatccttgcctaaatctttgtatgagaattgccgagtggtgatttttccaccactgttattctctctacttcaatgaacaagagccgccttcttcctccctgcctctcccttccccctccctctctcctcccctgcccttgtctctgccatagattcctggatttttatttattcaatgtgttataatcacgtgggacaattttatgctcacatttgcccatttttagccagtgagaggccaaattttaaaaacacatattaaatattttttgaacatttctgggttaatgtgttt

SEQ ID NO: 12769 - DNA, 1082 bp, Homo sapiens
ctcccaggtagctgggactacaggcgcacaccaccacgcctggctaattttttgtgttttagtaaagacagggtttcaccatgttggccaggcacgtcactaactcctgacctcaagtgatctgccgtctcaggctcccaaagtactaggattacaggcgtgagccaccacacccagcccatttcgtgtatttttttctattgagttattagtcctccctaatatgatatgtagttgttcttctgtgtatcagtatctacatgacgataagttgcaaatatcttttcccagtttttggctggtggttttcattctttattgcatttttttaaacttttaaatggaaatttgcaaagatttataagagagaaaggactataaggaaccaggtggtgttcctgtcatccagcctcaacagctgccatacggggtgaatcttactgtcccctgcaccctccagaccttcctccctgggttaattgacgcaagtgccagatgccatttcacctgtagcgatttcagtatgtacctctaaaaggcaggggtgctctctccttctctgtcttttcatatttaacatcttattatcacatctagaaaaccccagttccttaacttcatgcagtatctaatgagagttcctatttccccagttgtctcatatttttacatgtttggatcaggatttgttagtctcttggttttagtgatgtcagattggttagtcttttcctttacggctgtatttttagtgccttgttttaacaaaccttccctatcttgagtcatgaagatactttctattttagaagttctgcatttaacacctgagtctttgctgtactgagaattgaatttggtgtgctgttgtcaggccaggtccccatacctttttcttttgggtaaccagttgtcatctaatcactttttgttgaaaagtttattcttttccagataaagtgctatgttgataataagaggtgtttataaaaggggttaggggtgtcctgaaaaatgattcaccgtggagtaaagcaggtaactgaggatgtgagctgagaagccacgcggttgtctggagg

SEQ ID NO: 12770 - DNA, 1049 bp, Homo sapiens
gggcccctgagacagccaaggaaaactctgggactcccagtgcggaagaagccagggggtgctgaagaaatcggacaaggttcctctccagaggaagggtttcaggtgtgaccttgaaaaatgaaaaacaacttcagagggcagaaaagtacgtgactccagtcagtgggaacagcctgcacgtggtccaggggtgggagggtgtggcgcctgcagatgtcagcctagcacggatttctatgctgatgagtgtgcagtttgaggtgtatttttacatatgtgtgtataaaattgttacggagtgtgagaccagtttgtggaaggctttgagtttatcaagtgaaagggagacattcctgagctgggaaggcctgaaggttgtcttgttattgattgaattaaatcaggaagagctaagaaacatcagccgccttggtcactgtcacagtaatgcagggttatgacggctgtatggacatagagagggcgggatggtgagattttaagtcgggagtactgactgaacgcctccttccatcttcttagcagccctatagggtagatattatttttctttttgccatatgggaaataatgaaactgaggcagggagaagttaaataacttagccaggtctcctgcacatgccgtgacggcactaggagttcagtgcaggcaagctgatgccctagcccaccccatgcggcatcccgtggtacagtgggccaaggccagagcgcttctgaagaagccagcacacaggcaccttctccttcctgctgccagaccttcgtcctcatcatgatccatagttctcctttccctctttctcttcctttcagtggaaaaggtatccctccaattttccaaggcaaacacccctctcttctattagaagaaaaacaaaaagcactccctgtctgccctgcaggaatttccctgggttgccacctttcctcctccccaagagctgaagctcttagtctgcctcccactcactccccaggacatcaggacccgttcccatgcctcctccataggcactgttc

SEQ ID NO: 12771 - DNA, 1337 bp, Homo sapiens
agcctccctagtagctgggaccacaggcatgtaccaccaccacctggctaatttttttgtagagacggggtcttgccatgttgcccaggctagtcttgaacgcctgagttcaagtgatccgcctgcctcagcctcccaaggtgctgggattacaggcgtgagccaccgcgcctggctgtgtttatttccatgcaaatgttgatggttcattacttctgtgtgttgccttaaatacccatacaggcttcccttgtgttccagatatgtgtttctgaggatgtactgcatggtttaatttttggatagtggggacccaatttccattattttaagtgggaaaaatgatttttcatcccattccctctccccaaataacccaaccaatctccccaagtatctccaaaatattcttaaatgcctatgtaataatccaccaaagatttctgtacactataaaacatttaagacaccaattaccatgtcatttgccacgataacttactacagggtaggattgtatgcagttaacatcatttttccttcgtgtgctacagcagacatacactataatgcaaatgaacaatgaaataatttaataccccctagacatgtgacagaaacaagcactgagccccataagggactcagccctcagggacaaggcaggagctgctgggctatggccctttctgtccttttctcttctctctgcctttggccacttttctctgtccctgtaccaagaccatattttcttaagcactgtaactttataattatccctgatatctggtaggatgaaactccagctagttcttcaaaattgccttggctgtttttagcttttgctctccgtatagatttagaatcagttttgtcaggttctttggaaaccctatgtgtctgttgattggagccagggattactttgaattggagttctagattaatagggggacatcgccaatgtctcactatcagtctttctgtgaacatggaccactctgtttaggttgtcattactggccttaaaaagatgttatctttttcttcatcaagctaacatcttgttagatttattctttggtaccttccttttttttttttttttttcagttgtaaatggtaatttttaagattacatttttttaagtattaatgatatacagagatgtggttgctatctagatacagtttggatcttcagtgccttggctgaataaatcgttagtgctaataatttgtccattcctggcttttctctgtggataatcatagtatctgtgaatagtgacaatttggtttcttcttttttgtaactatatatatttgtttct

SEQ ID NO: 12772 - DNA, 1051 bp, Homo sapiens
tatagtaactttttttttctgtttttagagacagggtctcgctctgttgctcaggctggaatgcagtggcgcgatcatagcttaccgcaacctcaaactcctgggctcaggcgatcttgccgccgcaccctcctgagtagctaggactacatgccaccacacccggctaattttttattttttgtagaaatgaggtcttgctatgttgcccagcctggtctcaaactcctggcctcaagtgatcctcctgccttggcctcccaaagcgctgggattataggtgtgagccactgtgcccatcctatatgtatttttttaagcttctctctgatggaccgtacattcttgaaggtcagtactatgccttccatctctgagtgctcgatgaaacttatttttccttctgctgtaaggatattgttgtggagtttatctgtttcctcatggagtatcctccatatgcaaacccttgagataaatttttgactaaaaatagatatttctctgactctgtttggtcagtttgtatcttgtgaacactaaactgtaaaactaatcagggtcctctttgcactggcctctagccatttgggagaacctgtggcccagctgtgtcaagtttgcatctgttatatttattttttatttgctttctgcctagttccattttcatatttagtttgttgccctgtctgctactttcattttattttgttatatcgtacacacttttccttggaacagtcttaaatactttctggaagaaggagggcctaaatcagggcttgaccaacttttcctgtaacaggccaggcagtaaattatttcagctttggccaggcatgatggcttacattgtaatcccagcagtttgggaggccgaggtgggcggatcacctgaggtcaggagttcgagaccagcctggccaacatggcgaaaccctgtttctactaaaaatgcaaaaaaattagccaggcatggtggcggttgcctgtaaacccagctactcgggaggctgaggcaagagaattgcttgtacccgaaaggttg

SEQ ID NO: 12773 - DNA, 1035 bp, Homo sapiens
agtgagtgcccaggcccaagtggcccaagcagggggaccagcaaaaggttctagatgcctccccatcttctgaacctcccccagctcaattcctttttcaggctgctcttccatttccttttatgaaagatacaggcaagtaagtctgaagccaggcagataactgttcctcagatttcagtacaactaatttagtattatattacaattcaaagactgctatttccattataattattataagagaatgaaccaattatatttttcttgttaagcaaactacatggtatgttagtgtaatgtgaaaaatagataactgaaagttttcaaatcttaattcttactgactttttgtttccagaaaagctttgacctggaaatactacgcaaaaaaaattctttactacctgcggcaacagaagatcttaaataatcttaaggcctttcttcagcagccagatgactatgagtcgtatcttgaaggtgggtcttttcccatatatgtggacagtagtatttctgtaggtaactgattagttttttaagaccagcagagggaattgtgttccttgtggtaaagaagtgaaaaagcaaatcatgttgcgtgggcttctgcaggttggattatagggcctgatcaatgaggtagttcaaactattaaatttagagctaagattttatcaaagtccactaaagaaatagtgttttttaaagatgcatcattggcttaaaatgtgagagtgatactttagctaatgaagtaaattcctgtttttccgagctttaatgatcatttccaaatcagaagtaaatgtatccaattttgtctccctgtgaccttgagtaaatcccttaacctctcaggttggagtttattgaggacagaatgttcttgggcatcagtgagtctgcttgtccgtaatgaaaggtgagaaggaagaagttgagtggacaggcaagatgaagggagtggagaatctttttgttcttattaagttgaacaggaacaaagtgagacttccattttttttaaa

SEQ ID NO: 12774 - DNA, 1099 bp, Homo sapiens
accctgtttgttttcattcctggcaaatgcttatggtttggatatggaaagcatgggaaggaaaaagtgtagtttccataaatgccaaagtatcagcttgaaatcagtttgtgtttatgatgtgctatgtggtcttaaaaacgagtatgtcctacaataaagattagaaacagcatattaaaagggcatacactgggccaggcacagtggctcacacctgtaatcccatgactttgggaggctgaggtgggcagatcacctgaggtcaggagttcgagaccagcctggccaacatggagaaacgccgtctctactgaaaatacaaaaaattagccgggcatggtggcaggcacctgtaatcccagctactcaagaggctgaaacaagagaatcgcttgaacctgggaagtggaggttgcagtgagctgacattatgccgctgcactccagcctgggtggcaaagtgagactctgtctcagatagatagatagctagattagatagatagatagatagatagatagatagatagatagatagatagactgtctcagatagatagatcgatcgatcgatagactgtctcagatagatagatagatataaatagatagatagataaattcatacattgtacctgagaaaagtgtcacagaatgaccaatactgagacatactttagtaaaattgctggattttaaagacaggaaagtcctttgagcatccaagcaaaaaaggtaaagtcatttataaggaaaagaaaataagaatatcatcagacttttcaacagaattttttgtgccaaaggaaaaaatagcttaagatactcaatgatctaaggaaatgtcaaccaaggatttttatatccagccaaactgacttccagatacaaagactgcacagaaacttaacaacttaacaagaattcagtgacttttcagtccttcctgagagatctcctggaaaatgaatttcaaatgaccaaaaaccactccccgccccaaaaaaaacaaaacagagaaacactgatataaggactggcagtgagcactaaacatgtatttatttttagatttaaattcaaatgagggctctag

SEQ ID NO: 12775 - DNA, 1034 bp, Homo sapiens
tttttttttttttttttttttttttgagacagagtttcactcttgttgcccaggctggagtgcaatggtgtgatctcagcttaccgcaacctctgcctcccaggttcaagtgattctcctgcctcagcctcccgagtagctgggattactggcatgcgccactacgcctggctaattttgtatttttagtagagatggggtttctctatgttggtcaggctggtctcgagctcctgacctcaggtgatccgcccacctcagcctcccgaagtgctgggattacaggcgtgagccactgcacctgccgccgccgcctttttattttttttaaaacggagtttcattcttgttgcccaggctggagtgcaatggcgcaatcttggctcactgtaacctccgcctcccgggttcaagtgattctcctgcctcagcctcccaagtagctgggattacaggcatgcctggctaattttgtatttttagtagacatggggtttcaccacgttgatcaggctggtctcaaactccttacctcaggttatctgcctgccttggcctcccaaagttctgggattacagtcatgaaccactatggccggccagagctagttttctttacgttagaactgtgagttgtcagtttcagaaattccagtctatgaaaacatcattgattacaaacaacaacaaaacctcagtaaattattgttactttatgttattttctacccatgactggtagtgcaaggtagtgtagaataactgttagcactgtctttagtagtggacatctttatttcagctcaaatttgtgagagtgagagttgcatcaatactcataattgaggcctacttgtatatgtcttcttcataggttccttgtaatggcttcagtgacattgagaaccttgaaggaccagagattttttttgaggatgaactggtgtgtatcctaaatatggaaggaaggtaagccatagctttagcagggatttgtttgctttaataagtccagagtaaattgctgtaatttc

SEQ ID NO: 12776 - DNA, 1145 bp, Homo sapiens
ccagccttatctcaccttccaccattcccatccccacctacagctgatcatcaaaggtacacggaggaagtagtagacacggagctcaggccaatcattatcttgagaaatctaaacccagggctgtcaggctatgccccataggccatacccagcctgccaaatggtttttacatgttttaattgaggaaaaatcaaaagaataatatttcatgacatgaaaattctataacattcaaatttcatgtcaataaacaaaatgttattggagcacagtcacctctccatttacacaaccacggctgctcctatgcaactgtgacagagccagctatttgcaacagagacgatgtggcccacacagtcaaaaacttttacaatctggccctttcctaactttgctagcctttgatagagaggattggatatggctgtcaggggaggaacaggagcctttgatagagagggttggatatggctctcaggggaggaacaggaagttggagggggagagaacttgtttcagcggaagaaggccagcttgccccaagatgcagcgggctgcctccggaagtagagaactccctgtccttggatagggtggagcagatgttgactgcttggcctgtgtgatatggaggcaattcaggccctgaaggctggaccaactccctggactttaaaactcttcgtttgctaaggggggccataataacaaaatgtcacacactgagtggcttaaacaacacgaatttattcctcacaattcttgaggctggaagtcccaagatcaaggtgtcagcagggttggtttctggtgaggcctctttctttggcttgcagacagctgccctctgatcgtgacctcacgtggcctttcctctgtgactgcacatccccagtatctcctcctcttctgataaagacaacaatcttattagattagggttccaacgctctgtgattttattcccatccccggctttctttccccacactggttctcaatcttgagtcccgaaatatgccctccctatcctcatcctgtgcctaccttcacttcacccatccatcccctgcaggctggtcttgttccactgtgccaccatatccccaagcccccctcacctccgtgaggctcctag

SEQ ID NO: 12777 - DNA, 1045 bp, Homo sapiens
tcaccatgttggccaggctggtctttaactcctgacctcaggtgatccaccctgctcagcctcccaaagtgctgggattacagacgtgagccactgcacctggcctttgccattacttttaaaatggcaaaaactccaattacttttgcaccaacctaatacattttggtatatagtgtgagtttaaattgaaattcattttttgtgtgtgtgcatttaaatgtacaatttttttctacaccattcattgaaatggtgatttctttctccactgaattgcctttacacctttgtaagaaattaattgtctgtatttatagtctacttctggactctatcctgtcccactgatctatgtgtgtattcctttgtcaatatcacatttttgtggtaactgtagctttattataattttttttttttttttgagacggagtcttgctctgtcaccctgcctggagtgcaatggcgcgatctgggctcactgcaacctctgccttctgggttcaagcagttctcctgcctcagcctcccgagtagctggggttacaggcacacgccaacacgcccagctaatttttttgtatttttagtagagagggggtttcactatgttggccaggctggtctcgaactcctgacctcaggtgatccacctgcagctggtctcgaactcctgacctcaggtgatccacctgcatcagcctcccaaagtactgggattacaggcataagccactgtgcctggcctattgtaattcttaaaattgaccagtcaaatctaggtaaggaaagaaaaaaactgaatagtgtgagttccacctttattattctttttcaaaaattattttagctatttagttattttgtctttttatataaattttaggatcagcctgtctatatttataataaatatctgatttttattgccactacattaaatctgtctctcaactcagggaggattgacatattaactatattaactaactaaagtcttccaaactatgaacgtggtatgtctctccatttatttaagtct

SEQ ID NO: 12778 - DNA, 1032 bp, Homo sapiens
ctgtaatcccagctacttgggaggctgaggcaggagaatcgcttgaacccaggaggcgcaggttgcagcgagctgagattgcatcactgtactccagcctgggcaacagagtgagactcagtttaaaaaaaaaaaaaaaaaaaggtggtcagcctgtgaggacttggccctttccttttgccttgtgttcataaaggtgtgcgtgtgtgtgtgtgtgtgtgtgtgtaactcacaattctaagtcatgataaatgttatgtctgaagggttcactcctccctctgggttttgagagtggattctaccaggcaatttgtaatccatcacctttcaatgagtagaaaactaggaagtctttccacccccagagaatgggtcatttcctgggcttccacccatgtggtcccaactgttgggaagagggatagggcctggccttccttcttgcccaccgtgtgctgctctgggtgtggggacaggggaggtgttgagaggctgaggaggacaggagacacatggtggccaggaaggaggatggagaagctgaaagatgggaagggaaaagggacaaaaataggagaagaaagtaaaaaaatagaacgattttcttcagcagggcttctgtgatgcttggaatgtccttccaatgggtcgtgaccacaaccgtggttgttgctcctttacaggcaggtttattgaggtttagagtcaccaatttgacccaaactgaccgagtaaggcagccgcagacacaggaacagacagaggtttactgctctcctgtggactccccaaaggtgaaatctcctggaagagaagaaagaaagatgaggagaaacagagggcgaaggggaagtgtagacgttaatggtaatgatgtgattagaggtggcagccataggattaatgacaatcacgatgatggaatacttaatctgtctctaaaatgctttccttggtgactattatggatgacaattatttgagagaaatagaggactgatagaaacaaagtagaaacatagagacagg

SEQ ID NO: 12779 - DNA, 1038 bp, Homo sapiens
atggtgatagagctgtaaagaaaataaagtgaggggttgtgaaggagattgactaggggtcagaagagttctctaagcagttgtcatttgagccagacctgaataagagtagatgccagccgaggagaggcattccaggtgaagggcatggttggtgcaaaggcctagggtcagaactaattgagcattggcagagggtagagagaagggcaatgtgttggagccaggggcagggagagaagtacaagcccagggaagttcagattatgctggattttgagggcagggtgaggagctagagttttattctaacagtgtttgaaactgaccactctggaggcaaggagaaccgatggtgcggggctagaggggaagccgggagagcagctggaaggttgcctactgggccaggcgggagatgatgctgcatagatgagagtagagatggagaggggttagatttggcaagtcttttgtaaacagacttgatagaacttgctaatggatttggtttgggagatttaaaaaaaaaaaaacagacgtggtggtttacacctgtaatcccagcactttgggagtccgaggtgggcggattgcttcagtctaggagtttgagaccagcctggccaagatagcaaaaacctgtctctactaaaaatacaaaaattagctgggtgtggtggtgcacgcctgtaatcccagcttcttggaaggctgaggcataagaatttcttgaacccaggaggccgaggttgcagtgagccgagattgtgccattgcagtccagcctgggtgacagagtgagactccatctcaaaaaaaaaaaaaaaaaaaaaaaaaggataatgtagaggaagtgaaccaattgtgaatgttatcaggatggaaaaaaaaaagacattttcatcctggtcatttgatccggaattcctggtctcaagcaattcttccacctctgcctcccagagcactgggattacaggcatgagccactaccccaggccatccaggtcatttgaaaatgtttctctagatcag

SEQ ID NO: 12780 - DNA, 1075 bp, Homo sapiens
cttgctgttttggaatctctgtcattagatggcattctccacctttcagcaagtggcttagtttttaaaatttggtgttttgtttgtttgttcgtttgttttcatcctgacttggctgaaaagtcttgggaatggtgtggccaaaatggtgagagaatcagaacttcctggggctccaggctggcttcagatctttaaaagggagccccttctaaccagacaagaggccaaatacagataatgattactctttcacttaaatgggaaggattgccaggggcaagtggcagtttattttttctataacagctttattcagatataatttacatgccacaaaattcaccctttttaagtgtaccacccaggggattttagtgtagtccagggttatacagccatcaccactaattcatcatttttatcaccccaacaggttctgcccatcttcctattcctgcagcctctttgtattgggtcttgattgtggagggggctggacaattgtgaaacttctcagcaaaatgggttgcatttgcttcttgttacctagtgacagtctaatgcccgttagcacctgtcggtctttttttatgagtcagggttggctgggcgtggcagctcacgcctgtaatcccaccactttgcgagcccgaggtgggtctgagtggaatgcttgagtccaggagttcaaagaccagcctgggcaacatagtgagaccccccaccccaacccgccgcccctccaccatctctaaaaaagaaaaaaacagttttttaccttaaacaaacaaaaagagagacagggtatctctgctgcccaggctggagtgcagtgtcacaattgtggctcactgcagcttcagtctcctggattcaagtgatccgcccacctcagcctcccaaagccctgggattacaggcctgagcaggcacactcacacccggacacctgtcagtcttgaatgggcgtcagaatcacctggagggctcgctaacacacagatgctgggccaggtataatgaatcattcctgtaatcccagcactttgggaggctgaggtgggaggatcac

SEQ ID NO: 12781 - DNA, 1022 bp, Homo sapiens
tcaagaccagcctggccaatatggtaaaaccccatctctaattaaaaaatacaaaaattagccgggtgtggtgttgagcacctgtaatcccaggtactcgggaggctgaggcaggagaatcacttgaacctgggaagcggagattgcagtaagccaagattgagccactgcactccagcctgggctacgaaggaagactctgtctcaaaataaaataaaataaaaataaagctgctatcaaaaaaacttttactgaatgttacaaatctggataatcacaatagagggatctttattgttacataaactttaaaaatacaaattgccaggcgcagtggctcatgcctgtaatcccaacactttgggaggctgaggtaagattattgcttgacccaggagtttgagaccagcctgggcaacatactgagactccatctctacaaattttaaaaattggccaggcatggtggtgagggtctgtagtctcaactactcaggaggctgacgtgggaagatcatttgagcccaggagtttgataagtgtgccgtggcactccagcctaggcaacagagtgagaccccagctctctaaaaaaaaaaaaaactggaaaacacaagtgttaatggctgtatgatattccgacaggggcatattaggtaaacagtaaagactgtagtctatggaagttggtgagacagctcgtcactggggaagaagactaggggtttggggtggacaaaagggtttctttctctattttttttttcttttttttgagacagagtttcactcttgtcacccaggctggagcacaatgatgcattcttggctcactgcaacctccggctctcaggttgaagtgattctcctgcctcaccctcccgagtagctgggattacaggcacccgccaccacgcccagctaatttttttgtatttttagtagagacagcgtttcaccatgttggccaggctggtctcgaactcctggacctcaggtgatcctcccaccatagcctccc

SEQ ID NO: 12782 - DNA, 1084 bp, Homo sapiens
tgatatttaatgtttcacactcccttgaggtgtgggtaattcctctgtagtttcccctcttgttcacgttaataaatctagatgccttttctccaattaatctgccttttgttgagttgatctttctttctttttatttatttatttatttttaacctaaagctggcatctggttccaggcttctttcctcaaaaaatttctaactaggatttcttttcttctcttctctttttttttttttttttttgagatggcgtctagctctgtcacccaggctggagtgcagtagcacaatctcggctgactgcaacctcggtctcctgggttcaagcgattctcctgcctcagcctcccaagtagctgggaatacaggcgtgtaccgccatgcccagctaatttttatatttttagtagagacggggtttcaccatgttggccaggctggtctcctgacctcaagtgatccgcccacctcggcctcccaaagcgctgtgattacaggcatgagccaacgcgcctggtctgtaacaagaattcctatacatctctgaaatgcatgcatatcaaaactcattgtgcaaaccctggctgacattaagggaccaaaatgtctacaaatgtaatcacgtatcgtggcctacacagctaatatggtccaaattacccttaagctcctgctttaaggtccataaatacctggaaggaaaattcaccgcagggcactcagtcctctcatgctgaggagtcccgcagcgcttttatgcagtgttctttctaatatatttttttctttttcaaacctatgctgacatcagtaaattctttgtactaacctacgacctgcgagcccaccacttgccagtgccgggccctgacatctcgtccagcagagacggtcttgttctgttgcccagctagagggcagtggtgtgatcatagctcactgcagcctcgaattcctgggctcaagtgatcctcccaccttagcctcctgaatagctgggaccacaggaacgcaccaccacacccagctaattttataatttattgtaaagatgggtctaaccatgttgcccaggctta

SEQ ID NO: 12783 - DNA, 1008 bp, Homo sapiens
cttgaaactgggaggcggatgttgcaatgaactggggtcacaccactggactccagcctgggcgagagagcaagaccctgtctgaaaaaaaaaattataaataaataattaaaaataaaaattaaattaaaattaaaataaatccaggaagcacaatgtttagccaaaagaataaatctatggctgcagaattttgaacagaaacaggccagcaacaaaaattatttgcggccgagcgtggtgactcatgcctgtaatcccagcagtttgggaggccgaggcgggtggatcacaaggtcaggagtttgagaccagcctggccaatatggtgaaaccccatctctactaaaaatataaaaattagccgggcatggtggtgggtgcctgtagtcccagctactcaggaggctgaggcaggagaatcccttgaacccaggaggcagaggttgcagtgagccgagatcgcgccactgcactccagcctggtgacagagcttttttcaaaatgggggactcactgtgttgcccaggctgttctcaaactcctggcctcaaaccatcctcccaccccaacctcccaaagtgccaggattacaggcgtgagccagccagccttattgtggttttgatttacatttctctgatgatgaatgatgttgagcattttttcctgtttgttggctgctaatatgtcaagaagtgtatttatattaataattatcaattatttattatctcctccctgctggcaacttttactgactgccataaactgaagctcagagaatggaaaaatatctcttcctaaagacacagagaaacataaacaaacctgaccaatagaaggaccaaaacctctgcacagtgcctcacccctcggaggaattaacaaaaatgtaggtagctgttggaacaaagaaacagtagtccagagcattttgtgtgtgggataaaggtcctctaatctatctagttcccacagatagcacaggacagacaccaatgttc

SEQ ID NO: 12784 - DNA, 1088 bp, Homo sapiens
atattgctttaagcaatcactcattaccaccaatctgtgaaagtaaagcaaaaaataataataataaatgccaagggggagagagacacaatatccgcagccttacaccttaactagctgctgcattattttattttattttatttttttggtatttattcatcaggaataaaaaaaacaaagttttattaaagattgaaaatttgatacattttacagaaactaattgtgatgtacatatcagtggtgacatattattacttttttggggacggggggtgggtggggtgaagagatcttgtgatttttaagaacctgctggcaagagtttaacttgtcttcagcatattctgattgtatcataatcattttctgctgttgcagaggatgtgaatacacttaaggagctcacagaatcccagtagcacaaattgggctttggcaaatcgtgtattttgtgtatagaaggaatttaaggagaggtattacttattttcatattgtattttaactgtttctctgatcaaatttttttacttcctcctcctgttcctccccacctccctccttttccagttcagtatttggagttcaacactgtctctcaatcagatcatcttgatctttttctttatctcccttccccttcctaagtcccatttcttggtcataaatattgcattattcacactttcaaactgtgtattttcttacaataaaaaatgatgaaaaaaaaaaaggctttacttcttttgcatgcactttaaaaacaaaacaaaacatttttcaggttccaaggaagagcatgataactgtcagagcttttaattatatttgtaaataaaagtgttcatcacatcgccttgctgtgttattgtagcaggaagtttcccttctaggttcaccagttcacaactcagagggacagccaccctcctgaaactgttctccatagcctcggtcgctccaagaagagccattcaagcctttcaggtaaagctctgtcttccaagttcttctatggggctgaagatagtgttgcaccattcgatgtgggcacgtggtcaactgcacctttctgtcctaaa

SEQ ID NO: 12785 - DNA, 1035 bp, Homo sapiens
caaccctcattgggagccagtaaatcctttggcatttacctgtgagtctgttcctgccaaagactatgtattgtgtctagtgtctcttatcccttcattccttactgggaaaatgagaactgtctgtcctctttaagggttttaatgaaacctggttaggattaatttttagaaggtaccttggaaatatgattatgtaatttattttgttcctttaatctctatagtatgtttctccagaagtactaaaagaagatacatgcaaataactaaaactattttaatataacatttcaaaaagtaatttttcaatcaagatatgtatattgtcacaaattgtacataaggtggagaataagtatcttggaaaagtggtcaataaggaaacacagataagctcagggtaaatggactgattcaagggttctaatctcatagttctcagccaaactgtgggcctgccaaaattggaccaaaccaagcctgcaacccagggtcatcattcctaaacactgtcctgctgatggtccgaaaccttctactctgctttgagaagttggcgcttctacttggttcattctccacgcaggatctgggtatcttgtataagacaaagttcaggcactgcttcaaagcagttatgcctcttaaaattgtcaagcctacctaccctctgagaggaagagattttttttttatgagacaaagtctctgtctgccaagctggagtgcattggtgtgatcatagcccactgcagcctcgaactcctgggttcaagagattcttctgcctcagcctcccaaagtagctgggactacaggcacatgccaccatgcctggctaattttttaaaaaatctttgtatagatgggggtctcacaatatttcccaagctagtattgaatgccaggcctcaagcaatcctcacaccctggcctcccaaagcgctgagataacagaggtgagccaccagccagggaagagattttgaaccatttggagttttggattggctggctagcaatgtaactttt

SEQ ID NO: 12786 - DNA, 1048 bp, Homo sapiens
agtgatactctcctgtttctgatgattcaacatgcaactgtggacaattaatttcctttagctttgctttcatttcttcatgtgtaaaatcaggctaacataagctgttttgtggattttgtgaataattctattataaaacatttgtaggttgtgatgcttattgaattagatattagtaataagcctttaataagtaatttcaagaaacatcccttgctaccgtctacttccccagaccaagaaaaatcttaatttattttagttgtccaaggtatggttagttacaggttataggaacattatgggtaactattatctaaaatcttagcattgtttattttcagaattacacttgcttatataatttagccatattttttctataggctttaaagtagtcttaaattaagggactagatttttttttaatgtcaagcccttattttaatctttggaatttagtagcttaataaagctatgtctcaatgtttaattattctgtgcctgtttcccctggcttctgtgtgccttttcagtctgtagcttcaagtttattttcatttgtagaaagttttttaaaattatagatttacaattatatttctatttttcaaggaaactgattttgaatatattatctttcaaatctataatttactctagtttttaaaaactttattcaaggtgctgttgttttgctactttcctcaattctccacccatgtcccttaccacgtctccaccattgccagttctttgtgctgcttcttgccagcttcatttcattagtggttttatttttctccccacatctctcttgacttctgccaaatcatgttttattccctgttttggctcacgatatcttccattaactcttacatccctgctgtgagctcctgttttatataacagtaacttcattgagttccttttttcttaaagtttattggcagtatgttctgacacagcatccattgctatatgacaacttttattctctgaaaagagttcttcacctgccatttctttttcccatttctta

SEQ ID NO: 12787 - DNA, 1028 bp, Homo sapiens
gggaggctaaggcaggagaatcgcttgaacccaggaggcggaggttgcagtgagccaagatcgcgtcattgcgctccagcctggtgacagagcaagactccatctaaaaaaaaaaaaaaaaaaagttttatagctttatatcttatttaggtctcggatctattctgagttattgtttgtatatagtataaagtaagggcccaacttcatttttttggcctatggatatccagttatcccagtaccatttggtgaaaagactgacctttccctgttgtcttggcacccttgttgaaaatcaatttgctgtagatatgaatgtttatttctgggctgtcagttctattccattggtctatatatgtctgtccttaggccagtactgcagtgttttgattactgagctttgtaataagctgcaggaaatgtgagtcctccaactggtttttgttttttttgtttgtttgtcttttttagattatttttgctattctgggtcctttgaaatcatatggattttaggacaggtttttccatttctgtacaaaacaccattgggattttgatacaaattgtattggatctgtatattgtttggagtcatattgtcaccttgacaatattaagttttctagctcctgaacacataatgtctttctatttatttaggtctttaaaaatttctggctgggtgcagtaatcccacacctgtaatcctagcactttgggaggccgaggcaggtggatcacgaggtcaggagatcgagaccatcctggctaacacggtgaaacccgtctctactaaaaatacaaaaaattagcttggcgtggtggcaggcgcctgtagtcccagctactctggaggctgaggcaggagaatggcgtgaacccagaaggcggagcttgtagtgagccaagatcgcgccactgcactccagcctgggcaacagagcaagactgtctaaaaaaaaaaaaaaaaaaaaattctcccagcgatttttttttttttttttttttgagacaaactt

SEQ ID NO: 12788 - DNA, 1045 bp, Homo sapiens
tagatgtctttattccttgtaaaatgacataaaagcattacctacaataaattccaccccattttcttttcataaaaaatttttcttctcataatccatattccttattctctgctgtgagaaaagagctcttaaaattgtcacatgatgtcaaaagaaaacaagggggagaaggagtcactttactgtgcctacaatgaattttatataacacctttacttttcttccctttccaacctgattaaaaatttttttgctcttgggagggaaggtggggtgtccacaggcaagttattgttacattatagttaacattcaactgtatctgcatcttatcacaaacaaatacatgtatatatacacagaaatatgtggaaagtacttagtcactctccatatttcaggcatatggtttattctctccagagatcaatatcttagttactgaagctgtatctaattttttgctaaaatagttattttgtgttttaagagaaataagtgtaattcctcagtagcaggaatggtatgtggaagtgatcgttttttggtggttaagatattaataatttgacaacatgcaagattttgtgaaatatgaatagtagtttattatttcaaacttttaaaagttgggaaaagaggaatttcaaattaaaatctataaagtattggaagaatctatagaaaagagcaactaaagccgggcgcggtggctcacttctgtaatcccagcgctttgggaagccgaggcgggactatcctggccaacatggtgaaaccccgtctctactaaaaatacaaaaattagctgggcatggtggcgcgcctgtagtcccagctactcgggaggctgaggcagaatcgcttgaacccgggaggtggaggttgcagtgagccgagatcgcaccactgcattccagcctgggcgacagagtaagaccccgtctcgaaaaaaaaaaagagcaactaaaatgcttaataaatatctctctttcaaagccctctgatatgattcattacacagatttaaagataacaatg

SEQ ID NO: 12789 - DNA, 1032 bp, Homo sapiens
cacaaagccaaaccatatcaccttggtatgtgagaataaaaattttactggcatcagtaatattcaaagattgaagtaaatgcatcaatgctttcagtattcatagtaaatgttattttcaatgttcaattatatatctagggaaactgtctgttgagttcaaggatggaagaaggatattttaagatctgcaaagtatccaatatttcctaagtacctttctcaaaatgttgctaaaggaagtgttccaggaaaacaagtgggaaatccaaaaaagtgacaggatatttggataggagatccaggagagaagtgaaagcctcaggacaattacaaaggaaaatccgaagacaatagtcatgcttcaggccttaaatgaaaccaattcattttgaagcaggagaatggagagtccaggaaaagagaaggagagcaagaggaacaagggacactgaggagaaggaggaagaggaggagaaaggaaaaaagaaaaggaaagaagaagaatgaggaaagaaagacaaagaggtagggaggatgtgagaaagggaggaagagagaaggggatggggcagggtgaagagaaaggaaggaaggatggcaagaagggagggaggaaagtaggagctggtagattttatgatgcttttgagcaggtggaaaaatagtattgagatttttgcattgtagattttaggagtaactaataataagtacatagtaaataaaagcaagaggaaattattattattgttttagattcagggagtacatgtgcaggtttgttacatgagtatataatgcaatgctaaagtttgggcttctaatgatcccagcatccacatagtgaacatagtgcccagtaggtagtatttttggcccttgcctccctctctgcctccccacttttggcatccccagggtttattgttcccacctttatgtctgtgtgtacccaatgcgtagctcccatttttaagtgagaacttgtggcatctagttttctgttcttctgtgaatttgcttaggaca

SEQ ID NO: 12790 - DNA, 1029 bp, Homo sapiens
gtacacacacggctttgggattttccagtgagtttcactccctggcttccccaggctctggagcgggtgctgccctgccaagcactcactgctagctgctgaaggggatagcccaggggctgcagattcccatttgcatcatgcaaggtgagcacagcaacttctggcctcggatggctaacactcctccttatttcactcctaggtctgggaccagtcttcagtataaatctcagccagaaaaaccaactcctcatcttgatctgcaggaaaacaccaaacacactatggaactctgctgatggggacccaagcgcccacgtgctcagccaccctctggctcagcggggcccagacccacctcggcacggacacccctgtctccaggaggggcaggtggctgaggctcttcggagctgtcagcgcccggtgcctgccctgggcacctccctgcagtcatctctttgcactttgttactctttcaaagcattcacaaacttttgtacctagctctagcctgtaccagttagttcatcaaaggaaaccaaccgggatgctaactacaacatggttagaatcctaattagctactttaagatcctaggattggttggtttttcttttttttttctctttgtttctttcctttttttttttttttttttaagacaacagaattcttaatagatttgaatagcgacgtatttcctgttgtagtcatttttagctcgaccacatcatcaggtctttgccaccgaggcatagtgtagaacagtcccggtcagttggccaacctcccgcagccaagtaggttcatccttgttcctgttcattctcatagatggccctgctttccccagggtgacatcgtagccaaatgtttactgttttcattgccttttatggccttgacgacttcccctcccaccagctgagaatgtatggaggtcatcggggcctcagctcggaggcagtgacttggggccaagggacctcgagacgctttccttccccaccccccagcgtca

SEQ ID NO: 12791 - DNA, 1043 bp, Homo sapiens
gtcttgaactcctgggctcaagcaattctccttccttagccttcctaatagctaggactacaggcatgcatcactgtgcccggctttttcaaatatttttgaagagccttctttaggatccactgcaaaagtccaatgtgtccaacgttggtgtcagagcatgttagcagcaattttgttgagacaattagcacaaaacaaatcattctgtgattcatgcttggttcatttttggaatcagcatgtaattgcattgtaatttaaatactaaaaatatctagcataaaataagtttatattccaagataaagcctcaatcaaacaaaatatgttttcaagtaatattcactgtaatttttttcctccattttaagtagggccttttccaagcacaaattatgctgagataatagggaccctagtacttttagagctgatcaagggtgggaaagaattgactcagaaggccacatttcagttctctctgtgtttgtaggtcttactacatcttcagagagggagtttggcccctgggtctgctgaaatcttcatttgaaatatccaggccaggagtgggtggaggattgggttgggttgtacaaaaaggccgcagtgttttcaactgcttggttactaattatcaacctttgaggcctgggacgttttctgagcccgctttactttgtctgccctgctcagtttcctgactctatcaggcctgatccctacacctctcggtcgtcttattgtcatgactgagaaccatccaccttctgagcatctgcatttgcatcaggtgtcagagactcttggaaagccacatgggggcagaggtgaccaaacacgaggcccaggagtgggacagacatggcagttaacagtgatcagtacagggtttctccaaactgcttccttgcactgagggcctttgtgggtccctgacttctgggtcttagtaggctgacctcctagttgatgacttccttctgtgccttctaggctctgggaaatagtaggtcagtaggatattatatggggcttat

SEQ ID NO: 12792 - DNA, 1078 bp, Homo sapiens
ctcttccttattttattctttagagcagttttagattcacagcaaaattgaaaggtacagagagttcccatatacccccgttctcatatatgcatagcctcccccactaccaacatcccccaccagagtgatacgttcgttagagtcagtgaacctacattgacacattgacagtgacacatcattgtcaccccaagtctacagtttacattatagagttctttcttggtggtatacattctatgggttttgaaaaacatataatgacatgtatccacacatagagtatcatatagaatagtttcacatactataatttctgcatttaggaaatttacccttactataatacaagtatccgctatgctgcccataattggattttacctgtggcttctataatgtcccagaatttgcattgcatttaatcatgtctctctagtctcctttaatctgaacggttcctcagccttttgtctctcctgacatccacatatttggatagtccaagtctgttttttcatagaatgcctcctcattcctccctcacacattcgttctttactttgctggggagcatgtttgaaagtacagttcacattctccaattttatgtctgcagaattccaccctcctcagaatcttgactaaaaggccaaatgttattgtcttagatttaaatcatggacttgggccgggcgtggtggctcacgcctgtaatctcagcactttgggaggctgaggcgggcagatcacaaggtcaggagtttgagaccagcctgaccaacatggcgaaaccccatctctactaaaaatacaaaaaaaaattagccaggcgtggtagcatgcacctgtaatcccagctactcaggaggctgaggcaggagaattgcttgaacccaggaggcagaggttttagtgagccgagattgtaccattgcactccagtgtgggcaacagagcaagactctgtctcaaaaatttaaaaaaaaaaaataaataaatcatggacctaaaatgtgtttatatggatttgtggaaaactcagatcatctgtgtggcctcttgtgacttttac

SEQ ID NO: 12793 - DNA, 1047 bp, Homo sapiens
ttgaaaccagactgggcaagatagcaagatcccatctcttaaaaaaagagaaagaaagaaagttagccaggtgtggtgacatgcacctgtagttccagctagtagggaggctgaggccggcggattgcccaggagtttgaggctgcagtgagctacgattgtgccactgtactccagcctgggcaacagagcgaggcatggactgtaaaagcaaaggaaaaagaatgggggaatcggcatcagtagcctactctggtggcattgtagaccttggttgtggtgatgcagcagcaaatgtacttataaggaaatcctctctcctgtttactcaaatgagtttgtctggtttgaaggcttgagttagaagcactttggccacgaagcagcacaataggctgccggcagctgtgtcccctccaggaaggcttttcataagcatctcagttgtttttgcagtatttgctcttccgtaggcaggtttggagtcctacttatccttaagctgttagaaacgtaggtgtgctgtgattggcatcaccccacctaaaatgttccaggatacaaacagtgctcattgctcattgacgtttgctccagcgaagaccaaacagctcttttcagactcttcactcctaataaacactttatgtgttagcaattggcagattcttaaccacaagcctcctgaaaagggctttactcagtggttagacctgtttggatgacttgttggtcgtttcacacgtgagcttttactgaaatccttgttaatatgtgtacaataggcccgcgactgtgtttcttacgagcttctgcctgcctgggttcaggtaaagagatgcagaggcgtgctggctcgctgctaacacggcgcctttgcacttctgctgcagccttatgggggaaggagtctttcatgtgtcttattaaccctgcgcaggtgaaatctccttagcttcagcttatttcttattacagaatagctttccatgtctactaccctcccttatttctgcatcccagccaaattataactcagatgctaat

SEQ ID NO: 12794 - DNA, 1030 bp, Homo sapiens
caacactctgtactataactgggatcttcttcttttcccccaacgttgtagaaatatgtctcatgattgtggttattcatgtacttgttggggtctcttaccctaatgggacctttattaagtaagggatgatatgatttctctttgtgtatcccacactgcctgcatggagtaatttctcatagcaacaattaagatcttgaaaacagaaaataaagacattggaacttagttgtcatggcactgagtcgaactgccttagatgtcaactcagatggctcatgccatccaaaatatcctcaccttaatgtaccaaaatatcctcaattggaactctgtctgggaaggccatccctgcagcctggacttcctgtgacggtagggatcctcggacttgttggccagcagaggtttctgtgcaaattcattttaactgtgcttgcatccttttggaatagatgacaattggtaattctgaattgagatgatttcaaaagctgtacttctggtgccatgcctgaaattagtttgaaataggaacagcaggggaacaaattgtattgtgtgcagtatcaagcatttccctggcccttctccccactagcaagccaaattacagcagcagatggacctgcagaaaaatcacattttccgtctgactcaaggactgcaagaagctctagatcgggctgatctactgaagacagaaagaagtgacttggagtatcagctggaaaacattcaggtgaggactggcagagggaatctgcttaaaaatggtctgcacggctgggcgcagtggctcatgcctgtaatcccagcacttcgggaggctgaggagggcagattacttgaggtcaggagttcgagaccagcctggccaacatggtgaaaccccatctctactaaaaatacaaaaattagcctggcgtggtggcgggtgcctgtagtcccagctactcgggagactgaggaaggagaatggcttgaacccgggaggtggaggttgcagtgggctgagatcacacca

SEQ ID NO: 12795 - DNA, 1099 bp, Homo sapiens
tttggttgtctttggggtggggttatggtgaaattagtcttggagagtgagtagctgtctgatgcttcttttcctttttaaccagcaagagcccaaaccaaatccccaagctctgaatgcctggctgttcctctcagcctttctttgcttgaacttgacaatagtagggtagtaacaggaaacagcatgttaaagttttaaaaataaaatagatctcagctcttttccttcccattagcaaggggtacatttatttaggtttttccttctagattgaggcactgcctcatttaagttcttggtgaagccgtgcatttctgcaaaccataagtataaactctagaacgggggtgtccaatcttttggcttccttgggccacatgggaagaagaagaattgtcttgaggcacacataaaatacactaatgatagctgatgagctaaaaaaaaaaaaactcataaagttttaagaaagcttacaaacttgtaagttttgagccacattaaaaaccatcctgggctgcatgcagcccccggggccttgggttggacaagcttgctgtagaaggtaaaaatcagttggttttatgtttttgttttaaacatgctggttgtatgcttttggaagagttggggaacactgagggtaatgggatcttgatggggctggaatttgtgggaagatggtgtctgggtaggctgtttttaggaaggggcactctcttccttttgattcagagatttttcctttcttttcgggtggttctgaaaacacagcgatggatccaggcattcaaacaccatggaggaaggaagagtggctgttgccattgcttcccgagttttctgggaaccagtttttggtgcctcttccttgctctactggggcttctctgcatgtcagtttcttcaactgcgaagtggaaggacagcgatacttttcttacaggacttttgcggggatggatgaaatacgtaaaacacttggtctagtacctggcacatggaaaagccttggtaaatgttcactgttgttatttttgttattactaatacactagtccatgtatgtatagtgtcctcctatacacaccaagag

SEQ ID NO: 12796 - DNA, 1025 bp, Homo sapiens
gcagtgctcttctcaaatgaaaaccccttatggcttttttttttttttaaacaaggccacaggtgatatcatgattttgacattattttttcatttattttgtttagtgtcctgcctttagaattgcattatctcaatggcttgtgcatttagtgtgtgtgtgtgtgtgtgtgtgtgtgttgtgtgtgtgtgtgtgtggtatgtgagcacgcacatattcgttttgggccctttttttttttttttttgagacagagtcttcctctgtcagccaggctggagtgcagtggcacgatctcggctcactgcaacttctgcctcctgggttcaagcaattctcctgcctcagcctcccacgcagctgggattacaggcatgcgccaccacgcctggctaatttttttgtatttttagtagagacgggtttcaccgtgttggccaggctggtctcgaactcctgacctcaggtaatccgcccgcctcggcctcccaaagtgctgggattacaggcgtgatgttttgggccttttaaagttcatcttgtttgtgtattcatttgtttggggccttttaaagttcttcttgtttgaggcttcctgtcatttgaagggttatctggtcatgttttgttttctaagctagttccatgaggatcatagatatgcttctctgttaggcttggttggcccttaaacttgtcttccttttggacactcacttacttcaggggcaggaggaagtgaggaagaggagttgggtctgtttggagtatcagcatggacgggaaggggagcaagagggatgggatggtaaagtagtgatggtagaaattcaacttactagaccaggagcgtgtgggcgccacctactaaaacaaaaaaggaataatgaagagctatagtcagtagctcttataatctcttatgggatatgtaggcaaatatttatgtgtctcttgggggctgttctgtttttagaaggtaaatgattggtaagaaaaaataggccaaaaagagctaaatgct

SEQ ID NO: 12797 - DNA, 1047 bp, Homo sapiens
agctgcaacaataactatgatgttgcctgcagagggttagtttgcaacatgttttcacatatattctcccagttttcataaccaacctgtaggtgaaaggaatatttgtcatccccacctcacggataaagaaacagaagttgaggccgggtgtggtggctcatgcctgtaatcccagcactttgggaggccgaggcgggtggatcacctgagatcgagggttcgagaccagcctgaccaacatggagaaaccctgtctctactaaaaatacaaaattagccaggcgtggtggcacatgcctgtaatcccagttactcgggctgaggcaggagaattgcttgaacccaggagaaggaggttgcagtgagccgagattgcaccattgcactccatcctgggcaaaaagagcagaactccgtcacacacacacacaccacacacacacacacgttgaaagagcagaactccgtcacacacacacgccacacacacgttgaaagagcagaactccgtcacaccccacacacacacacatacacacacacacacacacgttgaaaaaggacaatactaaaataaggactggaacccagaggggatcaaaagcctcacacagcataaaggagctactcatcctttcccaaaatggcccattccccactggaaggcaggaaccttgtcctgctggtatagaagggattccttgtagttagcaatcccccttaggggaactgtcctgaagatacagaggtgtgcgaagatagccacacagtggtgatcactatagcttagctagtcagagtagccaagtggtcatgaatgatgggatggaatacagtcaccagtaaaaaccataaagtaggccgggtgcggtggctcacccctgtaattccagcactttgggaggccaaggcgggcggatcacgaggtcaggagattgagaccatcctggctaacagtgaaaccccgtctctactaaaaataccaaaaattagccaggcatggcggcaggtgcctgtagtcccagctactggcgaggctgaggc

SEQ ID NO: 12798 - DNA, 1049 bp, Homo sapiens
ttcctcttggtaggtgtcagttatggcagctggagttggcctgtgcaggctcccgtcacctgcactgatgccttggaagtgacgctgtctagagacgaacacggtgcatgtcagcaggcccttccctacccttaaagctgttcctgggaaatccggccgcccaccggttgcccacctttgtggctgagctgcaggccggggggaagctgggctcctgcgcagatgggcagtgtccttcggagcggctcctggttattgggttgttagtggagcaggttttaggaaagagcagggtctgaaggggccgatttggagctgttgggctgtgtgtccttaggcaagttgccgaagctctctgcgctcgtttcctggagggcctgcctctgggattggcttccatgtggagggtgccaggtgctctgctgcaggcgtcaacgtgcgtgccggggtgtggtgtctggcagctctgtgtgcttggtgctgctgtcatcccatttgacagagggcgccctggaggggtccctcccagcggccaagcctgtgctccacacagtggcctgtgcagagtgaggggcggctgtctggctccacgggcacctccttggctctctcgagcagctcctctggaagtgacctcaggaaggcgaatgaggaagtcccagccagcggcccccttccttcccacagcatgaaagcccggcactccccaggctggctgcccctgcccccgggcccctcggcatctcccgagggtgggaagtgtggggtgcagcgcccccatggatggctgggagtatgggggagagcagggctgctggagagggacaggtgtgctgggcgagcagctcctggggctggagccaaggcggagggcttgtcactgggttcaccctatgctgagcacatttgtgctgtggcccgtgatgcccggaatccctgggagctcccagtcccggggtcgccctggtgtggtgctgtgtggtgaccgttgatgagccctgtgagcgagggctctgtggcctgcatgtcttggcagctgccagtgagaa

SEQ ID NO: 12799 - DNA, 1030 bp, Homo sapiens
aaggttagagtgagttatgatcgcaccactgccctccagcctgagagacagagtaaggccctatctctccaaaaaaaaaaaaaatgctgtgggcttctcccatgaacagacacctaggctcaaatctgcactttgtttcagggggtttcatagctttcgtggcattttcattaaaaatctaacaggagtgagatgttggagcccccacaggtcattttttccaaacttcctgaaccagacgcaagactcccagcaatgtgtattgggaggagtgttagcactctggaggagtccggcctggatgcagatctcagctttactgctgctcacagaggcacttaggccggccactctgggcctgaggttcctcatctcaagagatgtggccagaattataatcaaagaggcatccaagggctcaccacacacacagcccgatgcatgtgaattctttgtggtcaattaacttggctggcctcaggggtgttggagattggggacaggataggaggacatggaacaggtgtacttggcaggctgaaagcactgtgagttgaagtcaaggggagaggtccaggcgcagtggctcatgcctgtaatcccagcgctttgggaggcccaggcgggagggttgcttgaggccagaagtttgagaccaacttgggcaacatagcaagacctcgtctctacaaaagattaaaaaaaaaaaaaaaaaaagcctgggcaacgtagccagactctgtccctactaaaaataaaaaaattagctgggcatgatggtatgcacatgtggtcccagctactcgggaggctgaggtcagaggatcacttgagcctaggagttggaggctgtggtgagacatgattgcaccattgtactccagcctgagtgactgaatgaaaccccatttttttttttttgagacagagtttcgctcttgttgcccaggctggagtgcagtggcatgatctcagctcactgcaacctccgcctcccgggttcaagtgcttctcctgcctcagtctcccg

SEQ ID NO: 12800 - DNA, 1003 bp, Homo sapiens
tttcatttttgaaaatacatttgttccaatggggagcttggaagatggcgttcccagaaagtattttaatatcaatagaccacagccaaagccttaaatcaaacccacacacaactgaaaattgcctcctccatctctcaccttttcctgtggagaagagaaggaaaagcacacgcatgcgcctcagcaaatggcagcccaggagctgtttgtccagtttagcatggctaggtctggaactataatagcagggtcagactgtgggttcctcttctcctgtgcttgagctctggtttgagagctggcgctaccaacctttttcctatatcccgagtggggcacagacggtggatctctgcccagtgtggtgtgtctggcttggcttttcaatattgtgaggtctgaatggatctgacccctgtcagatgaaaatgattcacagctctggcagttcccaagtctggggaggggtataggtttgaaaggctgtttgaaagaggaatgtttaataaaggctttgatttaatcttgatataaacagatttttaaaaatctccacccattaaacatgaagcttcctgcatcaggaataaggaaaggtttgtacctgtttttgtaagtattcacagttctctgatttctggacatatctctctcctgctttcgaaagtcttagcattccctgtagacgtctgtcctgaggttgggttttgagaggtgtgcagcctggcctgtgatctcccccagtgtggagaatgcaaaggtcgaattagccactttcctgttctgttctgacttggaaaggtagggagcttctggtactcaggttgtaaagagaaatccagcccctctgtgaataagaaagggccacattcctatagttgaaggacttggaagaggaagccaaagttgcatttcagcatctgcctcctttatgaatgacttccttcctcctgattcttagaaggctcgtgacacacacattctgtctgatggagcacac

SEQ ID NO: 12801 - DNA, 1049 bp, Homo sapiens
ttttaatttttttaaaatttttagtttaagacaatctcactctgctgcccaggcaggagtacaggggcaccatctcttttggctacagcctctgcttcctgggttcaagcgattcttgtgcctcagcctcctgtgtagctgggattacaggtgtgcaccaccacacccagctaatttttgtatttttagtagagatagggttttgccatgttgaccaggctggtctcgaactcctggcctcaagtcatccgcccaccttggcctcccaaagtgctgggattacaggtgtgagccaccgtgcccggccccttctctccttttttttatttcacagtaaagagttaagttaaaagacaagtcaggcaaagagagttagggtggcctagctgggtcagagtcccctgcctgtgcttcttgtctgcttctgctccttctttgcctttcctgcatctggtacagttgtagcttgccattgcaggtgctgtatttctctgaatccctcgtgcccacggcaaggaaggctttgtgtgacccactggaggaggtcagagaggcggcagccaagactttcgagcagctgcattccaccatcggccaccaggctctggaggacattctcccatttttactaaagcagctggtgagtggatctaccacacacctacctaccagtttggcttttgccgtctttgtagatggaaaatacagggcgattattctgccaaggcagtcgcaatgtgggccctccagagggagtgggtatagcaagatcagacttggctttgtgcttcgccttcggcagtgaggaaatgtgggtgcaacaggagggagggaaacaagtggagaaggaagttggcggtggctggttgagacagcagagatgcagattcctcagggttgtccccaacaccctctgcaggatgacgaggaggtgtcagagtttgccttggatggtctgaagcaagtcatggctattaagagtcgtgtggtgctgccctaccttgtgcccaaggtaaatcccaacatgtggtcaacaccctctggctcca

SEQ ID NO: 12802 - DNA, 1640 bp, Homo sapiens
tttcagcacgttagccaggacggtctcgatctcctgacctcgtgatgcgcccgtctcggcctcccaaagtgctgggattacaggcttgagccaccacgcctggcctctgcaaatatttattagcatctcctgtgcactaagcaggggcctagcacctggggacacaatggagaagaaaggcagcttcattccttatcctcatgagaggtagtctagtcgaggagatggatattaatcaaataaccacacaaagagatgtaaaatgcgactgtggccagtgctgcatggcactgcaaatgcttataatagctgcatttgacctgctggggagggatgggcctgtgttagtgaacacttctcagaagaaatgatgctggaagatgaaagataagtaagcactaaccaggtgaggaggtggcgaaagaccattccagacagagggaataaataatgtttcagatacaaagacaggatatgcagaggtcccgtggtgggcaggaacatagcaccagtaggggctgagcaaggccagtgtggctggagtgaggaggcagggaggagcagtgcggcatgagatcaggctggcgcgctggcaggggcagacagatcagtgggcctggaggaggtgcccagatgggctggtgatcatttctgcccatctcctttggtctacttccaaccccccatccttggcaagcaaattgtgtatttggctctaaagaagggtttgcatgaggtctcagaaagtagatgtttttttttccttaaagctttgttccagattcggctcctgctcagccatagcacagtgttaaggcttcagtcatccagggaaattggcccttgactgtgcagcagatgatgaattttttgtacatgtgtaaggtgctgctggctcttaatgttaggttgtgtaggtgtgtgtgaaacagataattttttggtagtgttttgcaagcactacagagagtatttgggggctctttaggggtaagagcatttggggaagttaagtcagtgattcagataaagcctgggaggtttcagggccctcattctggagtcctcctctgggtgccctgggctttgcagggactttacttcctggattggtctctgttgacagattgcagcgagaacattgggagatcttgtgcggaagttaggggagaaaatcctccccgagatcatccccatccttgaggaaggcctgaggtctcagaagagcgatgagaggcagggtgtgtgcattggcctaagtgagatcatgaagtccaccagccgggatgccgtgagtatcttccaaggatcccgccagctgtgcactgcagacgacctgactcagagggcgggggagggctactgaaggaggttcacctctagggggtttgtgctgccctcagggatgagccagtctcactctggggaggtgctggctgggccacatggacttgaggctccgtcttctcagctttcctgtcagttttgcaggctaagagctaagtgatttggatgcctccttgagtggcctttggaaactggagatgatcgctctcttacaactgtggaggttgctcaggatcagtctcttttgtgatgctatataagtccagttaaaatgtgtgcacctccttctggga

SEQ ID NO: 12803 - DNA, 1053 bp, Homo sapiens
atagcttcttccacccacaactcaaaaccggtttctttctctgctgggtgctggcgacagtgcacgtgtctcctctgctaagtggtgttgctggattccatgtctgtccctccacttccttgaagactgggacccatctagactcctgatagcaggcacagcgcctggtacagtgggacttctggggaatcatgacttgattgctgaattcagctttgggcagagcaggttctgacaggagcagagcacacaggactctttccttctcagcgtttgctcttctctctgtctttacaaggcaggattcttcttgtctttctcatctcagtccacatgtgtgcttctcagagaggtggccagcttgtccaccctatccaaagtagaccccacccttcctcccttttactaaacatcatatttgtttctttactaacatttatcataacccaaaagcatcttgtttatgtgcttgttgacttgtttattatctatcttcgcctgctagattgtgagctccgtgagggcagggactttatcttgttcctacgatattcctgccatctggaacagtgcctggcacaatccaggtgctcactaaatgtttgctgaatgagtgagtgagttctgtggcttgttgtctcaggccactatagcaggccttttctaagcttcagcttatcctgtgggagagcttatgtaggaaggggttggagaggaggaggctaaagttttgattctgaatccatttggctgtcagaatacccttttgagtacattgaggaacctttatttctctaacataaaaagccctcttagcctttgtcagtagagaatccagtaaaacaactacttctctattgctgtctccattctatagaaaccaggtggctgtggactttgtgggaggttgggggtgcacatggtgggttcaggggcccaactcacacttagagctggtatggtgctgtttgtgtggaagcaagctcaccttcctctgttggggagggaggtctgttccctggagatgggattggttggtttgcccatcctctt

SEQ ID NO: 12804 - DNA, 1062 bp, Homo sapiens
tctccacacaggtgctgcccttagaggctttggtgactgatgctggagaggtgactgaggcaggcaaggcctacgtgcctccacgggtcctgcaggaggctctgtgtgtcatctccggtgtgccagggctcaagggtgatgtcaccgacactgaacaactggcccaggaaatgctgatcatctcccaccacccatccttaggtccgtggctgcggtgggtgtgggagagcccagagctttaggggatggggtaagagcaggccaggcagaaggcctcaaagagctcccttccccttcagttgccgtgcagtctggactttggccagcacttcttgccaggatgaagatcgatcctgaagcctttatcaccaggcacctggatcagatcattcccaggatgaccacacagagtcccctaaaccaggtgacgggcacatgagctggtctggcctcaggtccgggagggggccctctcatcacagtgtacaggaagagaggattcaaagaagcaggtgaagatggatgaaatgtaggcttggacccttggttgcacgtgacagaaatgtaaactggtttaagcacaaaagggaacttactgcctcatttacctgcaaagtccaaggatatgactggctacaggggttcacatgttgcccttggaacattgtaggtgatgtctctcttactctgtcccatccatctttgtctgttgtctctgttttccacgatgtgggctccattctcaggctttccctttctggtagcacaagagctgctagagttccaggctttgtcttgccatcagctcctaggggaatagcttgcatatttcaataatgtctactggcttggggtcgctttgaccctgattaatctgacttgggtgccatgctcatctctgcacccatccttctgttctgggtcacatgcctacctctggaaaaagtgagggcagctccacctgaaccacggagattgagaattgggaaggagtgtatcacctcacgtcaggtgctgtgtcagacagaggagcactgcttggtgaggaaagcagacgcagac

SEQ ID NO: 12805 - DNA, 1064 bp, Homo sapiens
tatttcaggctttcttttcttttttttttttctttttttttttttttttttgagacggagtttcgctctgtcgcccaggctggagtgcagtggcgcgatctcgactcactgcaagctccgcctcctgcctcagccttccgagtggctgggactacaggcgctacgccgccacgcgcggctaattttttatatttttagtagagacagggtttcatcgtgttagccaggatggtctcaatctcctcaccttgtgatccacccacctcagcctcccaatgtgctgggattacaggcgtgagccactgcgcccggccaggctttctttatttcatctcccaatctctgcactgggacacacctgaacttaactcctttggttaggaatggagctcagctctcctcatgtaatatcgtgtgctcactgtggccatgcaaggcactgggctacctgggggaatgctaagatgaacatgaccttcttcagcaaatttcagggtgcttacttcacagtaggcgcgaggaaatacagaaatatatccgtagcttaagacaaaatgcggcattagagcagttttgaaggagagattgcttttagttgggggggtgggtattgggaagggcttcatggaggaagcatttgaactggtaccctgaagcctctgaaggatttcattatcctgaagggatggcccagtgtgagtccaaacagccccagtcagggaagggcagggaaagccagagtctgtaaacctcaggtattccagcttggcgcctggggtggatgggaattccggatgagaagcagttcacctaggatcctgtaggcagcagagagccaccgaagagtttcgtacaggaggtgataccagaaggactgaggtcagttccccaaatggaagagcactgagcctcctgctgcagaggagggtttgtcagcaaagcccaccccagcagcttcaggatggagtagatcagctctgggggatgtggtgagctgcgtcgtggggtaaccttttgtttcttgcagaggccaaactgagcagtttctggcagttgattgtgga

SEQ ID NO: 12806 - DNA, 1473 bp, Homo sapiens
ctatagttttttttttgagatggagtttctctctgtcacccaggctgtagtgtagtggtgcgatctcagctcactgaaacctccgcctcctgggtttaagcgattctccaacctcagcctcctgagtagctgggattacagatgcccaccaccatgcctggctaatttttgtattttttaatagagacagggttttgccatgttggccaggctggtcttgaactcctgacctcgggtgatctgctcgcctcagcctcccagagtgttgggattataggcatgagccaccgtgcccagccaaactatagttttaactggtttctctttttttttttttttttggagatggggtctcgttctgtcacccaggctggagtgcaatggcacaatctcggctcactgcaacctccgcctcctgggttcaagcgattctcctgctgcagcctcctgagtagctgggattacaggcgtgcaccaccccacccggctaagacagggtttcaccatattggtcaggctggtctggaattcctgacctcatgatcccccccgcctcagcctgccaaagtgctgggattacaggcatgagccactgtgcttggcttccttttttttttaaaagagtttagttcagaggtcagcagatttggacccaaatttagaatttgggtccgaaggtcatctgtatgggggaagagtaccagatgggaattgacaggattgagggtggctctgacttgcctcaactagccgtgtgaccttgagcaacacacctaatgtctctgcttatccatcaattgaataactggaccacgcccagctaattttgtatttttaatagagacggggtttctccatgttggtcaggctgatctcgaactcccagcctcaggtgatccacccgcctcggcctcccaaagtgctgggattacagacgtgagctaccgcacctggccataaggattatctttctccctctaattttgtggctgtagagtttgatttaagttttgatttcacttcacttctttttgagatatttgaaaaattaactgaagggttttagtcgtctggttcacagctggttagataaatcctttctcagtcctgtcatttccaaggatcaggatgtcctttaaggtgcttgtcctctctccacaggtgacacgctgttgcaggccctggacttactgcccttgctcatccagacagtggagaaggcagcctcccaaagcactcaggttcccaccatcactgaaggggttgccgcagccttgttgctcttaaagttgtcagtggctgactcacaggctggtatgagtccagaggtgtctaggatggtagagacaggggcctctgacaagagtccttgggaggtgtgtcttgatgttcaggattagcttggtcctgaccacactggatcagccacaggtttgcttgtcatctgcaggatgaacctcatggttgcatggg

SEQ ID NO: 12807 - DNA, 1230 bp, Homo sapiens
ataataatgttgctatatttgcttaacgtggtgcttttaatgctgtgaatctagccctcctcttgaccaacttacttggaacattccttttttatcctgttaaccattttagtgaatcagaagcatgcctggtaattgggaaaaattaaaaactaagtaaaaaaagaaaaaactccttgattgaatgtagaaacctaattttcagcgttcatacccagctagccaatcatccagtttggcagtgttacaacgtagctcccaatctccctctgacttcaaaagcttagaagaaagggagtgggatggaaacaaattgtggggttcagtttcttctggcattttttccctctctcttcctgttaaacttggctcctctggcttgttttttgtagcaactattggatgattatccgaaatgtttcattgtgggagcagacaatgtgggctccaagcagatgcagcagatccgcatgtcccttcgcgggaaggctgtggtgctgatgggcaagaacaccatgatgcgcaaggccatccgagggcacctggaaaacaacccagctctggagaagtcagttcccctggcagttttgtcctttctccccagtgcccgtctccctcttcctggagaatggtgctgaaaggtgattgtctcccataaacttctctttgcagactgctgcctcatatccgggggaatgtgggctttgtgttcaccaaggaggacctcactgagatcagggacatgttgctggccaataaggtaaggggacaattgggttggctaaagagactttgttgttgctccttaaagcaaaatggaccattctcaggttgtgtgagtggagaggcttttctcactgtttgttgtctttgtcaggtgccagctgctgcccgtgctggtgccattgccccatgtgaagtcactgtgccagcccagaacactggtctcgggcccgagaagacctcctttttccaggctttaggtatcaccactaaaatctccaggggcaccattgaaatcctggtgagtggacctggtttgcctgtgctaaccaggcaaatggggagctgcttttagtggccatggatctgctggttgtccaacaggtgtttactgccccactattatctggttcagagtgatgtgcagctgatcaagactggagacaaagtgggagccagcgaagccacgctgctgaacatgctcaacatctcccccttctcctttgg

SEQ ID NO: 12808 - DNA, 1039 bp, Homo sapiens
ccttgcctgtccaaatcactaggtgagaatgaagggtggagagagaggaggaagccataccagagaccctgtggctggtggatggacttgctggggtttttctctgtccctcaaatagacaaaactttggagaaaactgaataatgatgtgccttctccctgacatctgcactctatgatttgttcgtttgtttttaagacagggtcttgctctgtcaccccggctagagtgcagtggtgcaattgtagctcactgtagtcttgacctcctgggctcaagcaatcctcctgcctcagcctcctgagtaattgggactacaggcgcatatcaccacacccagctaatttttaaattttttgtagagatggggtttcactgtgttgcccaagccgatctccaactcctgttctcaagtgatcctcccacctcagcctcctgaatagctgggactataggcatgcgccaccacacccagctaatttttaaattttttgtagagacaggctctcactgttttgcccaggctgggacatgctacaatttgaatgttactttattacttttcttttcttttcaaggttgcccttttcatggtttgctcatattctacccagaaaagacttaggagacttagaagaagttagtactttgcatcctacctacactgctctccttggaggaagaccttattctggattttacagagcaaatcagatctgatgtttgtagcttccaatgtgctatggagcttcctcctgcagagtgacttgggtctggagagcctgatatttgcaactgatgtctgcagcttccagtgtacctgctagcccttataaacctcacaccagtactttgaggtcagagttattcaagagcttactgagacaacaggccctgagaagctaagcgatttgccctgtggcatggatggtagagaggggagctggcacttgaactcaggtctggctcgacctcagaatgagtgatcttgtgtctctgtgccccaggactgcatcctctcaccaatacttcaccagc

SEQ ID NO: 12809 - DNA, 1078 bp, Homo sapiens
gccaccgcgcccagccgtgttctccattcagattttgtcacagtgacgtcctaaaattattcccaactccccccaccctgctgtttccgcaccctcgagcacagctagtcgtccgtctgcgccctccaggctcgctttcccactgctcactctcctcgctcaaaattcaagtctcaaccgagtcatctctgtgacgtcacgttgatttgcataagattccccagcgtcccaagcgaatattcttatggttttcaaaacctgaatgtttgacacgggatgttccaacaacaagaaacctcctatgcagatgggccttaaatacggctggtggagtgggaacacgtcgtatacacggacacacgggcaggcactcaccctcaatgtaatggtagtcatcatccgtgggggagcggggcgcgaacagaacctttccagctttgcgcagtggcagtatcgtagccaatgaggtttatccgaggcgcgattattgctaattgaaaacttttcccaataccccgccatgacgacttgaaatatagtcggcattggcaatttttgacagtctctacggagactgaatttttaaaagtctaaagaaaagggttttaggaagttgtattatagcaggttgtgtcttatgtttggtttgataagttatgagctgttcctatgatagttttttggttgttgttcaggagtattccgtgattgaatgtccggggttctgtgcgggtactgtgagttgttttccaaaatgtatgacactatgttgggaactgggttctaactaagacagttatcgttaatcttttttatccaaatgcagccagcgagtgagctactccacttcctttgtcactgaaggtcacagattcccttaaagggaaggggaactctaaaactaacacattaatacatccaaagtcttcctttttttttttttttttttttttgagacggagttttcgctgtttcccaggctggggtacagtggcgcgatctcggctgactgcaacctccacattccgggttcaagcgattctctgtctcagcctccggagtagctgggattacggga

SEQ ID NO: 12810 - DNA, 1094 bp, Homo sapiens
caatgtgaacatattctatgccagtgaatttacacttaaggttaaaatggtaaattttatgtatactttggcataatttaaaaaaaagtttgaaaaagaaaaaagacaaaacaataatcgtctttggagaagtctgttacactgaatctggagccaagtgaacagaaccctgattttgatcccttttctctcaaaagcccttcgcagtctctgaattaagtctattagcatgttcctcccatagtgctttgcttcatatcaacaaaaacctagctaagtgaaatcagcaacgatatgcagaaaccacctacgcaggtcacaaacatctttctatgattgtataattttcaagcaagcaataagtgaagatttttccataggccctaaactcacctttgcgaaataggaagctggtttattgggagtgatgagcagggggcgtaacaaattagctttgcgcagtggcagtatcgtagccaatgaggtctatccgaggcgcgattattgctaattgaaaacttttcccaataccccgccgtgacgacttgcaatatagtcggcactggcaatttttgacagtctctacggagactgaattttcttgcagttgaacaacagaggctttttttgtgtgtgtgggggtgcttggttttgggaggttgaagagtacttgttcgcaaactctctaaatgagagatggggaagtgtcttaccagctgattcgcgagagcacctgcaagtttacctgttttagtgatttgcgtttatgaaagttggagttgctgattttgtgatctctacttttaaggtaaaagcagggcggtgttgacttttcttgccagttggctgtcctgttttctttctcgcactgttttctttttgagacgaagtctgtcgctcaggctggagtgcactggcgtgatctcggctcgctgcaaactttgccgaacccctgtttagcgatttccgtttgtgaaagttggagttgctgattttgtgatctctacttttaaggtaaatgcagggcggtgttgacttttcttgccagctggctgtcctgttttctttctctcgcactgttgttttctttttga

SEQ ID NO: 12811 - DNA, 1105 bp, Homo sapiens
ttttttttttttttttttttttttggtagagacggggtctcactatgttgcccagctggtctcgaactcctggcctcaagcaatcttctcacctcaggttcccaaagtgttgtggtggtaggcatgagccaccatggccagccagacccagtaatgctctttatagaatatttttgtccttcagaataagatccaggctagaatcaggtattgtagttagttgtcttgtctctttcactttgttttatttagaacattgagaaagttttattctaaggtgattcatgagctgttttcacccttcatttaagaggtggaaaaagaagttaggcaccttggctcacgcctgtaatcccagcactttgggaggctgaggcgggtggatcacctgaggttgggagttcgagaccagcctgaccaacatggagaaaccctgtctcaactaaaaatacaaaattagctgggggtagtggcacatgcctttattcccagctcctcgggaggcttaggcaggagaattgcttgaacctgggaggcggaggtggcggtgagccgagatcatgccattgcactccagcctggggaacaagagtgaaactccatctcaaaaaaaaaaaagtggaaaaagaaattatctaacaaatagtgagatcggtggttaagaggcttggagcccgtcagatctgaattttaatcttaattgcaccattattgctaactattggatttttctttgagaagacagaaaatcagcacttaaagaaatcatgagtactttctggccaagtgtggtggctcatgcttgtaattccagaccaaggcaggaggatcacttgaggctagtagttcgagaccagcctgggcaatacagcaagaccccatctctacaaaaaaattaaaaattagccaggcatagcagcacacaccttgtagtcacagctactagggaggctgaggcaggagaatcacttgagcccagaagtttgaggctgcagtgacctacaattgtaccactgtgcactccagcctgggcaaaagagcaagatcctgtctctaaaaaagaaaaaagaaaaaaaaatcattatataagttcagataatgatca

SEQ ID NO: 12812 - DNA, 1027 bp, Homo sapiens
gctctgtgggaaagactaaccgccaggtctcattgcaggtggaatgtaagaaagctcagccaaaggaggtgatgtcgccaacgggctcagcccgggggaggtctcgagtcatgccctacggaatggacgccttcatgctgggcatcggcatgctgggtatgcgcgagcctgcgcctgcggcttctttctgccagaactgctcccaggactagcaggggctgtgtgggtgttgcacctcccctgtggtctgccctcctcctgtctgagtcattgagcaggagtggggacaagggatctgtcgggtctggcagtcctacccaaggtggggtggtttggttggggggtgctgccctctggtggtagccagcagaaaggtccaaccatattcattggtcctgtcaatctgtccattctctcgtccatccatccctccatctgtccattcctctatccattcatccatccagtacacagttattgagcaactctatatgccagacattatgccaggaactgcaacaatgactttctttacaatctggcagggaaaacaagtaagaagataaaatagatttcagatgcagaagtgtagggtgccgagggagtgtggtcacagggaacttgaccgtgacttggagaagtgggaaaagaagttacatttaagttgagtctgcgggtggagtaggagccagtgatggggaggctggagagacgggaaggggaaaagtgttccaggcggagggaacagcatttgcaaaggccaaaggcctttggagggggcaaaaggaaggctgcctggtcttattcattcaggtaatatttattgagcaacttctgagaaggagagcctgctctcatggggctctccttcaagttggagacaggagtaaatgggcactgccactacagagtgactggaggctgtgggaggcccctaaacccacctggaggttgaggagacttcctggaagaggtgaaggctgccatgagccttgaaagctgagcaggagtcagctgtgctttgggt

SEQ ID NO: 12813 - DNA, 1051 bp, Homo sapiens
caccgtcccactaggggcctctccagccaaggcccaggttgaagggtgtagtggggccagggatggtggccttccttgcagggttgggtggaggaaggtgggagaagttgtggatttgggctgaatccatttgtgggtcaggcagggactcggagctgtaggattaggggggagggtgtggctggttcgttcattcattcattcattcattcaaaaaatgattgacctccagtcaaggtgctcaataggatggtggtcatggccctaaatgacacagacgatgtcctcatgcaaccttcaagccattagtatctggctgctctctccccagctttgccacgttccccccgtgtaactatgggcaagtccctcccttgtaaagataataataatagctattatttattaggcacttactatatcctgggtctgtgagttaagagtgttacatgcactatctcactaaatcctctcatagccaggcttggtggtgcacacctgtagtcccagctaccaaggagggtgagatgggaggattgcttgagcctgggagttcaagactagcctgggcaatatagcgagaacccttttccaaaaaaaaaaaaaggtgtctttcatttaacttcaacctgtgagatagacactgttatgcctatttcacagatgaggaaccaaagccagagaaacatcaagtcacctgcccaaggttacccaaccagcaaatgcaggatccaggattccagctcaggcccgtcctacccaaagcctgtgctatgaccacaatccttctttctgggtttctgtttttcattggttaagtgaggggtgggcaagatgtgctgaacctgaaatgattgtcccattcgggtggtccagctgatttgggattgggactcagagtgggtccataggatgggagtgagagtgccactctgttgcgtgggccccagtacaggcagctctttgagaagagagatgtcatgagattctccagggaccttgttgcctcctggctcagtggggtcctggttctcccagtgggagtcagagg

SEQ ID NO: 12814 - DNA, 1050 bp, Homo sapiens
gcacagcccaaggtaggtgtgtctatgtctgggaggagctctcttactatgggcaatgctgggcagtgattttcccagtatttcctgctctggaagatgcttctggaacctctgcttggagtgtttgtggaatgggctgggctgggaagaggggattcttgacgtccttgctctgtggcctgaagacactatatgtctttccacgtgagctctggggtggactggagaggggcttgtgtgtgttgggagaaaggggagctactcagaggattcatcgtcctgtatttgaacccagtagagtttggagcctgagtctaattccaacatcatagaccacagccttgatgtccaggcctctggaagtgaaatacaggacagacttagaccctaaggccgcgctacaggcaggctagggagctacccttggatccccccagtcaccctttgcagaggcagaggggaccacagactctgtcacctgttgtctttcagtttagatgtctgtggctgctttctcaatgctctcttaccctgctgctctggcgagttctcccagtgagagggtcaaggtgcgcagaaaatggatttctgagcagttgagtgatacaacactcaaaaaacttttggtgcagggcaggggcctaagagtctattctaggcctcagggcaactagccaggtcttccttttgaagcaattgaatatagaggacagaaggagagactgattgcggaacatggggtcaggacccctgagtttactgacttatcatgggtcctaggacgaggtccctctctaggagagttcggtttcctcctttgccaggtggaactagagctctttaagattccgggccagtgaattccatcaagtcccccaactcctgccagggctgaaggagaggaagagttttgggagacaggaaaggggcatctctggaagggtccagtagagggcctgaaagcaattatggagcaggtattcgaaggaagccgcaccagggagcacatggttggaactgggttaattccattaagcagtttggtgacag

SEQ ID NO: 12815 - DNA, 1047 bp, Homo sapiens
actttgccggctctgaaaggatcttcttggcgcagcctgagtgacccaagcctggaaatggagagacagtggcctattgtttttggtgattatctgccatcaagctgcctgttctgctaccatcccctgtcctcagaatgcactgatggcttctgcagtgctgaggaagctgagatttaggggctgggggatggaggagtggaagattgataaaggggaagagaatgagggaggaaggagggtgagatgagcatccttaggagatggggctgaaaagggccagggctttgtctgtgtttggcgtcctccagcctgggaaagggggtgggagggaggtttactgtggggagtctattttgagctctgactttcaccttttatttacttgttgggttttatttatgttgccagctgtgagtcacagtggaggtggggtgtgtcagggatggggtgtgcgtgggtctgtgggatcgtggcttgggtaccatctccccatcggggtctgtgtagggggactgtgtgtggtgcgctggtggctggggcggctgcttctgggagaaagagaaggatggacatgtccgtggaggtgtggaattgaaacttcaggcgggagaaatgggcagttgtgatttttccctggagcccagtgggacttggcaggagaggaggcattgccccagtgtggattttggaggttccatctctgtggacagattccagtgggggagcctgtaggaggctagttcctggtctgtgccattcagagagaagccagagccagctgcctagaacgaggctgagttttgaacagaaggaactttgggaaaagatagatcttccctgcgattggctggtgaacttatgaatgacgtccacccatgtgggtggcaaaaagctctggcctgacctggccctgtaggccctgcatggatcacagcgtctcatgccctgtcttttgctgtttgtcgtacagctatagtacccaggagtacacccagatgcatcttgatttttccctctggttgttcacagccaagggcaaaggtg

SEQ ID NO: 12816 - DNA, 1117 bp, Homo sapiens
agagatctacagcccatctcagtactgaaccacagggtcttacagataccagattccttgccaatagttaatcaggtaacttaaaaaatacaactttgggccgggcgcagtggctcacacctgtaatcccagcactttgggaggctgaggcggccagatcacaaggtcaggagatcaagaccatcccgtctaacgcagtgaaaccctgtctccactaaaaatacaaaaaattagctgggcatggtggtgggtgcctgtaatctcaggtactcaggaggctgaggcaggagaatggcgtgaacccgggaggcagagcttgcagtgagctgagatcccactactgtactgcagcctgggctagagcgagactctgtctcaaacaaaaaatgcaacctttgcagttggggggggcgcgggtgctggcctcatctgacatcattactgcatggtcatgtagcagctgtccacttaaggaacttaaggtagtttttgtagttccgctcttattgcgcctgaatacaaggcgccctgaagacaagtcagactgccatactcacaggaagtaggaatggcgggagacttgtgatccaggtttgatctgctacctactgacatttctgggatctgttttctccataatacaatggatgagactgaaagtaccatacacatttaacagaaacactggtgattctggcttcaacatgccccctcatctggaggccagaacaccctcatccatccaggaaatttcctgataggatttcttttaaaatggcaggttaaagctaagcccagctctagaaccatttaaacctgacaccagaaaagacagcctacaatatcatagtagctgtcacgttaacctattcaagaaataacttgtctagcttacctgtaatgaacttaaaaaaacaaaaagctcacaatgcttgtgcaggtgatttattgcaactatttgccttcgcattctaatgcacctagaggtcactttattaagcagcaaaagaattcacatcaaattcagctcaaaccaaggcataagaaaactgctctagatgagagggagatggtggcaatgctaccgcttcagatggccctgctctcctgcagctgt

SEQ ID NO: 12817 - DNA, 1031 bp, Homo sapiens
tagactgtaagctccattaggactcactgcatgtgatttaaatttttttcctcttatttctctagggcctattccctggtggattccagtcaagtgtctacatttctgatttccattcttcttatagtctatggtagtttcaggtaagatattctcaaatggggttgatacaagttggaggtggaagaaggaagcattgctctgaaagtgctggtaccaaaacttactctgtgaagaaaaacaggacttcggcaggatttgactcagaatagagagttctgctatttgttctttaattggctgctgttaaacacttcttcattgtgcttatgagtttagcatgttaatgcttacatgtaaaaactaattgcttaaaatgctggttctgaaattaatcacctaatgcactctttattaagaaggttaaggagagagtctttgacaatgattctagagtctcaaagggaacaaagagtttaaatggaaggacaatttgaaatatgaaaaaaaaactactaaatatccatgtaataaaatgacaaagagaacatttcattttttttttctaaccaaaaatgaaagtgtagtcacaaaactttagtaggcttacgaagaccagggaaaccaaagtaaaactgtacccaggatgctaataaagttcttaatctttggccgggcacagtgccatatgcctataatcccagcactttgggaggctgagacaggaggattgcttgagcccaggagttcaagactagcctgggcaacatagcaagaccccgtctctacaaaaaatattttttaaagaagttagccaggcatggtggtagtgcctatggtcccagctactcaggagactgaggcagaagaaggatcacttaagcccaggagattgaggatacaataagctatgatcacactgctgcactccagcttgggcaacagagccagactatgtctcaaaaaaaaaaaaatttttttatgttgtcctaaaatgcttgtaagtaagtagattatgtccttatggaaat

SEQ ID NO: 12818 - DNA, 1031 bp, Homo sapiens
aacaataaaattccctgcttttaatataattgaaaatctatttaaagagcccagcatatatctttgataaaattgccatgctaaacaaatatgtcattactgtgcatgtgttggaaatgaatttatgaagttagaaaattattttattgttactcttggaatgtccctacttttcaattattcagtcacttaaaatatttactgagctcttgttatgtatgtgccaggcactgttgtaacagtgaatgaagcatcaaggcccctgctctcacagagctaaccctaaaaaaaatatcagtaatgacaggactttgagaccagcctggccaacatagcaaaatcccatccctactaaaaatacaaaaatcagctgggcgtggtggcatgcacctgtggtcccagctacttgggggctaaggtataagaatcgcttgaacccgggaggcggaggcttgcagtgagcaagattgcaccaccgcactctagcctaggcatcggagcaagactgtgcctcaaaaaaatagatagatagatagatagatagatagatagatagatagatagatagataatggattctaagcaattaaaatagtaattggggtggctctgaaattaggtaggcagaaaatgcctgtctgagaaggtgacatttaagttgctgtctgaagaacaagaaagagccagccctggtgggagcaaaacagtacctggctcggagcagcagccactgaggtacccttcccagcgtccttccacctgtccacaagcatggggaacataacatctttgccaacgtcttcaagggcctttttgacagaaaagaaatgtgcatcctcatggtgggcctggatgctgcagggaagaccacagtccagtacaagcttaagctgggggagatggtgaccaccattcccaccataggcttcaacgtggaaaccatggagtacaagaatattagcttcactgtgtggggcgtgggcggctcggacaagatccggcctctgtggtgccactacttccagaacaca

SEQ ID NO: 12819 - DNA, 1032 bp, Homo sapiens
gccctgtgcatgtcttttatttttctgctcctgagttgtatcctttataataaaccaacaatagtaagtaaattgttttcctgagttcagtgagccatcctagcaaatggtcaaacctgagaaagggattgtggaaacccctaactttgtagctgatgagtcagaagtacgggtgacctggacttgataccggcacctgaaatagaggcaatctcatgagacctagcccttaacatgcagggcctgtgacacctttgggtaatagtgtcagaattgaattgatgaacatctaattattattggaaaattggttattgacatggaaaaaacccacacatttggtgtcagaagtgttaagagtagaaacagatcatagaaatatgtgtaatttatgttaatgtataatgagtttattttaaaatgaataaatatttttcatattcacagtttcaatgtctaatatggtaaatatcaggaagtataatctatataaacaaatgccctttggggtcctcaacaagagtcctgaactaaaaagtttgaaaactacttctctggacactgtggacattattttctgtagtactgcctacattgtaattcatgttcacttatttactattgttttggaatcttaataccttcaagtatgttgctcaaaattctagaattgaagacatgaagatgttgagcactacagcccaaagtgatattcccaatcctttgagttcccagtccctctcttacccctaactccctcacagcccttctgttctctccttttggtatctcagaaatcttgggtatcagaaatcatttcataatacaagtaacaaggaataagataacctgttagaagattggattggtttttatatgttacaatttcaggcatatgatttttaaatctgccagagaggtgattgtatactgagtaatatcagtcagcgtactcccctgccagataaaccaggactcagtccgctgctaggatgcgtttcaatgaagacatctgacctgtgtggtatgtct

SEQ ID NO: 12820 - DNA, 1032 bp, Homo sapiens
tctctgaataatacggccttttccttctggacacttgaagtttttctttttaccactgatttttagcactttggttatgatgtgccttgatgtggttttatgtatgtttcttttgtttggggctttttgagtttcttagatctgtgagtttatggttttcattatattatgaaatttgcagccgttatttcttcaaattttttttctgctttcccttttgcccttcctgtattctagttcagctgtgttagaccacttgatcgtgttccacaggttacttaggctttgttaatattttttcagtcttcactgtgggtactttttactgctgtgtcttcaagttaaaccatctttccttctgcagggggtctcatctgctgttactctcagccaatgtgtttttcatttgagatactgtacttttaaaatctttacagtttccatttgggtcagaaaaactatttgtctcctttccacatcacattcatatgaactgtatattgtttgttttaacgtccttgtgttctaattccattatttctatcatttgtagatttatttcaattaatttttcatctggatatgggtctttttcacttcttcgtatgcctggacattgtgaattttatattgctgaacactggatttgctgtattcctctaaagactgtcagattgtatttggtcacacagataagtaatgtttggatcagtttgatccttgtgaagcttacttttaaggtttttgtggctagtaatagcggcctttaatccttggactaacttggcccccctactaaggtgttgatccttctaaggccccgtgcttttttcatggtcagagtgaccagccctgtgggagctctgggaagtgttggccctattgctttccagtagattgttccctgaccttggggagacttcctctcaagcacttggagatccgagactgaaaggaacccttctgccagacctccggagccctctgcatgcagcccccgcttctccagtactgggtcctgcaaattctggc

SEQ ID NO: 12821 - DNA, 1089 bp, Homo sapiens
tctatttattgaataggtgtgacttgtcacccacttcacacaccattgttacctttctgaaagccaaaaaaaaaaaaaaacccaaaaaaaaaacccaaaaaaactctagccataattttgaaacatctccagccataagggtgtcagataaggaattatgaaactgtaataccatattttattggtgaaaatattgaaaagtgtagataaacacaaaaagaatagaaaaactacccacaattctaccaacacagagagatctttcattaaatttgttgcatatctttcaggtttaaaaaaaatccatatattgtgacagttggtttttttttttttttaaattatacaagttgttgaaacccagaaatcccaaatagaagtaaaaaaagaaaaatcctaattacctaatatttaacttacttagaaaatttatggtaacatttcatgttacccttttgggcattacatataggaactgtagatcattttttacacaaaagcaggaacaggtttatactgtgctttcatttttatgtgatatttaatgtctacagaagaatatatgatttgtatgtgtagcataatgaacgctcatgaacttcaccagttaaagaaactataggattaccaatgttctggaagccccctttgtactctcctttgtccttcctcatgcctctgtcccctgtccccgtttaggtgtaaccactgtcgtgaattttgtttaccatccctttgctttttaaaaaaactagatttacatctgcatttttttttttttttttttgagacatagtttcgctgttgttgcccacgctggagtgcagtagcgtgatctcagctcaccacaacctccgcctcctgggttcaagcgattcgcctgcctcagcctcctgagtagctgggattagaggcatgcgccaccacgcccggctaattttgtatttttaatagagacagggtttctccatgttgatcaggctggtcttgaactcccaacctcaggtgatccacccaccttggcctcccaaagtgttggtattacaggcatgagccaccacgcccggcttacgtctacattttaatgtt

SEQ ID NO: 12822 - DNA, 1031 bp, Homo sapiens
tcttgggtgaatactttggagtaaagttgctggctcatagtttctgtttttaacattttgataaactgccaaacagctttccaaaacggctgcaccattttacattaccaccagcaatgtgtgagattctaatttctccacgtcttcaccaacacttgttattgtcttttaaattatagctatcctagtgagtgtaaagtcatatctcattgtggttttatttgtgtagtgtttatatttaattaagggtttgtagaggaaaaaagcagtagtttaaaatgttaggtctgattgtttttagaagtgtactaccaaagttgaacctctgttttagtcaactaaaaatcttgtgtcaagaacaaaaatttagtacacctttggttcacagatttttcttcaggctacttcttatttcttttgcgtgctggaataatttagaaagaaattagcctcagataattgttaaactagtttcttccctttggttaagtgattaaccgaattactctggcaacctgctgcatcatcagtaagcttgggactaggagtggtttcatgactgaaggtttggtgggtggaagtggcggtgaggggtgccttgatgtgtcagttctttgccaggaggataatcactggaggagttagttgtaaaatactaccttttctagagctgcactgcccaatagaagtataatatatggtatatatgtaatgtaaagttttctggtagccacattaaaaagtttttttaaaaaggtgatactaatttacataaaaatacttatttcacgcctgtaatcccagcactttgagaggccgagatgggtggatcatgaggtcaggagttcgagaccagcctggccagtatggtgaaaccccatctctactaaaaatacaaaaattagccgggcgtgatggtgggaggctgaggcacaagaattgcttgaacctgggaggcagaggttgcagtgagccgagatcgtgccactgcattccagcctgggtgacagggtaattctgtctcaaaaaaa

SEQ ID NO: 12823 - DNA, 1016 bp, Homo sapiens
gaactccttcaagtgaattttgttaccaaaatactatcataataacttgtgtattttctatgtgatagagttttacgagcattgctaagtaaggaaattgaggctcaaagcatgtaagtaacttgcccaaggatgtaaatggtaaagggctcaaagggaagattatctgacacaaattctgacactgaatctgtccacttaatgtttccacagtgttgactgtaagccagccctcttttgcttgagttcctgtattagcctctttgctgggtttcttccattatctacctgttggtaccttcttggccttctaacaacctaagtcagatcttggcagttctctgcttaaaagtatgggttttggccacacttagaataaaacccagattccttagtgtggttcttcatggtttgatcttgtgtgtgtctctctgagggatgacagacgataaacaaaataagctacataaggataaaaccctttctgtttttggtactctctccagtgcctggcatttaatagatataaataggtggctgctctgtgctacccatctttttttttttttttttttttaaaaaaaaaaaaaaaaaacagagtcttgctctgtccaggctggagtgtggtggcacgatctcgactcactgcaacctccgcttcccaggctcgagcaattctcgtgtctcagtctcctgagtagatgggactacaggcaggctccaccatgcccagctaattttttgtagacatgaggttttgccatattggccaggttggtctcgaactcctgacttcaagcaatccacccacctcggcctcccaaagtgctggtattataggcatgagccactgcgcctggcccgtgctactcattttaaggctttctaatctcagggctgtattatattgaggtgatgtattgttgtgataatggtcattacatgtcaggtatttgcaaatattattaaacctgagaatggcaaataacacaggtctccatatctagtggaagtca

SEQ ID NO: 12824 - DNA, 1926 bp, Homo sapiens
ttagcatgtagaggtgggatatttgcaggacgggttgaaggaatgatggcagtatccatgaagagtggaaatcgggtagtgagaaggaagtcatagctggagagtgaggaagcaagaaatggcatgatcgtaggagtgggggacctgattgcaatttagagaaatggtttgaagatggtttactcttgaagcaaatgtggtttgggacagaactgtagacattcccttcttagaaaagagcataatagaatgggacgagcatgccgtgtggagttggaagacctatttcggaggtccggtttgccaccaacttgctttgttgatacgacatggtagtgagttcttcggtcctttttccttacctataaaatagagggaattaccttttccacagcctgtaaggattaagtgagtacatttagaaagcacttggcaaactgtgaagtgccacagatcttactacattaattataattatcctagagaaacatctaagaaatgggtaatatcagaaaataaggaatggttttaggtagaagactttgagtggattatttatagtgttagaggttataagtcagtaactcattgagtcttcacataagagaaagggagttggggattgaagatgataattcttaagagaacttcattgatgtatgtgcaatctcaagaagaaggtaactgagagacaaagtaaccctaaaggaagaattaaaatcttggtgaacacgtgctctaaaaagaggtttaagctaatttcatagttttgcgtgacagctgcctttcagtagcaggtcgtagggaacacaagattacaatttcagcttccttctggacagagtaagaaatgaaggtaaaggtgtttctgtcatgccttgtggttactcatcttgagcttctcatactctggccctaatggctgtggccctgagagtcctaatggctgctttgctgtttttactgtgctgtacagaggccctggatggttgaaagaatagaaaactcagtggtcaagaaatggggaaaatgaaaatgttttactaggtaggttggacacacacgacctctctctgacattagttggctctattaaggagggattactttgtgaagtttgacaatttacaaatttattctactaaaatacttccttcaatgtcagctctgtttgctttacaggcaaagaaactccttgaaatcggggagcttagcccctcaacctttggcaggttttgagatgaagaaaatttttacattatctggagagagggtggcatataaggggagactggggaaagtgggcagtttcctttttttttttttttttttttaggacggagtctcgctctgtcacccaggctgcagtgcagtggcgccatctcggctcactgcagcctccgcttcccgggtgcaagcaattcttatgcctcagcctcccgagtagctgggactacagccacatgccaccatgcccggcttttttttgtatttttagtagagatggggtttcaccatgttggccaggctggtctcaaactcctgacccagtgatctgcccacctcggcttcccaaagtgctgggattgcaggcatgaaccaccgtgcccggccacagcttcctatttaatagttgttcctgattcaactgactaataatataataaaataaggaactatacacatggcattaaatatacacatttaattctcacaagtttctgaggtaggtgatatttccctgtttcacagaggaagaaacaggcttgggaggccaagtggtatgtttaaagtacttcacttgtgatgctttattttgtttgacatgaattctcccatcattttactcattcttattgaaatataaatatggaaaaggtattccagtagtctatgtagactgatttttggattatctgtcatttt

SEQ ID NO: 12825 - DNA, 1037 bp, Homo sapiens
aagtttccaccgcatttctccttgactttactaaaagttaaataaacgtgccactcgccccggctggctacaagctgcagggggtgccgggtcaccccaggccttttcctgaatcccagggtagacgcggtacactgaaggccaggttctcagcagcaggcccagggatgtgggaccatgcttgtcctgggttcacaggctcctttgtccctcctggcagtgctcaggacctcagactcctcagggtggctgcgaactgccctcagccagccaggcccccaggcttctgagtgttagtcctgtccacacaggtagctcctgtgccctggggtcacctctttcttctcctgggcacctcagcttggccagttccccggccctgctcagctgctcgggccttgctgccttgtgagctcagctactcctgccccaaacaagggcagggtctgcagggcgctcgagacagaggagctgccccaccaggacctggacttggcacgggttgcgaggctcccacaggagtaaggacgacttcccagccccgaagtagccttcccagtagaggcaggaggccaggctggcctcagaggcatgatgctcttgggaacaaatacaggaaagctggaggtcatggggcctgggagagggaatcgctggggatgggaagccaggagagccctgcctgccttccctgttagcttcggcctccctgggctcaggcgttagagccccaggctctggcacagagtagccacccaggaaatgcctgtgtgagtaggtgatggggtcagtacaaatggcatgtgggtcactagctggaaggagttggggcaggaaggagtggcccggtgggtacattggtgacagaacaaggccacgctgatccagggcctctcagagctcagcaggtcacagctacacaggcctgtgtcctgagaagtgtggctgccagagtggtgtagcggtcccagggctctccataggcccaggctgggggtgcccaagtcataggccgcccccttcagttccaagtaaga

SEQ ID NO: 12826 - DNA, 1048 bp, Homo sapiens
agaggttaccaaagacttctcagttgccagactgggtggatatattttattccttatgttacttgatctcttggatgcattcaacatcactggctactttctgcatcttggaccagtattttcccttggtttccatgactttcctgggtcccatgttctcctggtttctcatttgtacttctatgactctttatcttatctttctttttaaaaaattaatttaattaatttattttagagactgggtcttgctctgtcgtccaggctggagtgcagtggcgcaatcatggctcactgcagcttcaaacttctgggctccagtgatccccctaccacagcctcctgagtagctgggaccacaggcacatgccaccaagcctcgttaattttttttttaattttgtagagatagggtcttgctatgctgcccaggctggtctcgaactcctggcttcaagtgatcctcctgactcagccttccaaagtgctggggttacaggcataagccactgcatccaatctttgtcttatctttctctggctctcttctccctgtaaatatcagttccagcaaattgtctctcagcacttcttatgattctatcaggataggacaggttatgctgcaataacaaagcactctcagtgtctcatggcttatagcagtgatgaattaattctcactcacactatatgtccatcatgggtctcccagatggctcagctctctgtaatcactcagagatcgaggctaacggaacagccattgtcttgaactctttaatgagaactctggagagtctcacagcagcaatgaaatgttctgacctcgtgatggaaggaatataaagttaccaaaaaaaaaaaaattggggattgaacggtggatttcttagtcttgtgagtgtgtgggtgtgtttacaatttacagaaaatcaagtgacattcttcagcagaaaagggagtttttttttttgaggaaacacttatctcacagactgcaagtgcaggaaatgtgcccaacctcatgagaacctattaatagaat

SEQ ID NO: 12827 - DNA, 1048 bp, Homo sapiens
gagggcctgacctaacgtctagttacagcgcccccctccccagggaccttacccacattctccatcagaaacatagcaagccagacatcacgcttcctttcccttgtgtaaggacagtctccctcctggacaggagacacggattgttgtgggggaaggacagacagtaacccatgtggcatgcccagtgacctccctaagaacaggggagctgtgtgatggtggtgaggggataggctcggggattcccctcgcacctgtcacgccatccacgctgtcacaccggcggctccagcctgggctcttcagggaaacaagggctctcctcctcccacttccaagagggaaggggcctcctcttctgtctgaggtgctcctccctcagggctggctgcaggagggctgaggcgggaggatccctggagcagttgtcatctgccctttcttgagggccagctgtgtgccaggccaggcaggggaggctctgatcacccccacacacaaggaactcaacatctggtgactgaggacaagcgtcacagtcccttccctgtaagggctcatagcctaagtgggggatcgaagtacctaaaaacctggtatgacaggcgccgtggggtggggggtgccttctacttgggatttgtgcagtgaattttggtgttacatagttttggaactgttgtacgggtccttgctatttttggcaaatgatgctggtctttcatttacagaggggctgcgtgcaaagtctcctttgaaaaatttatgtgagcaaggaaaaggggagaggatctcaaagactgggttacgtagatcacgttccagggggtgcgcgacggcccacttgggcagggggcccagatgtgggagcagctggctcagggcctcgctggcatttctcagagtcttaatgttggttttctgttcggtgagcaggaagcaaggcagcgaagacaacctccagggcaccgacccgccccccgtgggggaggaggaagtgctcttgtgagaggcagtccctgcgtggaaagttgctgggcccccg

SEQ ID NO: 12828 - DNA, 1048 bp, Homo sapiens
ggacgggctaacacactgggtggggccactgaagcagggcaaggaaggtggagggagggtgtggcgaggttttacatgtttactccaagagcatgggtttgaatcagggtttgaaccagggcagctggagcagggatgggcgggtagatactgggaagtggtctgacttgggacaagatggcaaggtccaggccccctgcatgtgttcatcatttagcaaacacggagcagccagtgtgtgccaggcataggtgtcaaagatgagcttagcccagtgcctgctctcaggggtagggggctggggggctgggggaggggctcctggccttataagaaagatggacctgggaagaatcagcctcctgtgtgatcagaggccagtgcagagagatgcaagggctgggggcttcacagaggaggagctcctgctctgggttgacaaggccacaggggaggcggcagggtgggctcacctggggagtgacatctgctcagacacagaggaaagaggggctggcatgtcccagtgactgtaagaacctcagtaggggaagaggccttcattctctctctcttttttttttgagatggagttttgctctcgttgcccaggctggagtgcagtggtgtggtcttggctcactgcaacctccgcctcccaggttcaagcaattcttctgcctcagcctcccatgtagctgggatgacaggtgcctaccaccatgcccagctaatttttgtatttttagtggagacgcggtttctccatgctggccaggctggtctcaaactcctgacctcaggtgatccacctgcctcagcctcccaaagtgctggtattacaagcatgagccaccacgcccgcctccccccccccgctccttcttttaaattgaggtagaattcacataacataaaattaaagtgaacaattcagtgacatttgggacattcacagtgacatgcaattatctcctcaatagttctgaacattttcattacttcacacccccgcccatcagcaatgactctccattcacctcccccc

SEQ ID NO: 12829 - DNA, 1048 bp, Homo sapiens
ctcttgcagaaagcacttttaggaaagtgtattcccctacacatctccactaatgccacacacatatatctggccctctaggaaatctagagatttgccctgggacttcctaggcagctagctaactggcatttgaaggtcttaacagaaggcagcccaaaaaatcatggattggggcttggacccaagggggcagacccctgcctgggtcctctcctgatcctgtcctgccagctggtcccaccatgcctccaagcctctcctgctgtgagatggggagaatgctgcctgctgtgcactgagcctcccaggtgtcagggattgtggctgaggagtgatggatgctccttgggcagccaggcaaggcagatgccaaattcccatcacttcggccaagacccggggccggatggagaatcgccccacttccatttcagccttgtagctcctcccgtcctgtctctccgtcttcatgtttccgcccctttgctcacccctgccctctgctcgccagctgttttgcatgcctgaccacaggcccttgcctctccgtcctgcatgcccttgtggctccgctcgctggcagggccccccggtagccagccacacctgcccctcacccctcctgtcgttcgttgaagctgcacccctgggtcacgaggcatggggcggagccgttgccgtcggaggatgagaactgcacgctggtcgaagtgactgaagaggaggtcgagaactcagtcaaacacattcccagcttggcaaccgtggtaaggtggatggacccctgacccagagcagggacccaggagcctgaggtggggcctggccaggacaggccggacacaggcgggtgcccgggagtcagatgtccgggggccacccctaatccacagctgctggcctctgggccttggtcatgtatcaggccaggtgacccctgcatcttctgagccaggttccatgttaccataggaaggggaagattatccttctggaattcctgctttcagagctcatcaggggagaggaactaggagaagttcca

SEQ ID NO: 12830 - DNA, 1021 bp, Homo sapiens
ctgaggggtaggcttcaggcttggctagatccagggactcaaacagaaaccatctcccgccatctttcagttgtttttcttatttggtttcctccacaggtgggtcaggcacccagggaccaggttactttctatcatttgccaacctcagtggcaagagcattcctcattctgaatagtgcctgtgaaaaccctggggttggctctgattggcccaacatgggtcatgtgcccatgcttgaaccaatcactgtggctgggggtagtggtgctctcattggcctggcctggatcctgtgcctgccccagagcctaggagacaagattggtcccgccccaactccaagggctgaaagtcaagaggtggttccccaaaggaaaactggaggattggaggctggaccaccccttatgccctcacactaagctctttttcttgcaggccttggatgtttgggccatgggtgtgacactatactgctttgtctttggccaggtaagagggcggggtgtctgtcccctcagtactgctgggtggcccctgggttaatagtcacccttgcggggagacagtacttacttatttaagagttattttaggctgggcatggtggctcacgcctgtaaacccagcactttgggaggctgaggcagaggttaggagttggagaccagcttggccaacatggtgaaaccccgtctttactaaaaatacaaaaaattagccaggcgtgatggcgcatgcctatagtcccagctactctggaggctgaagcaggagaatcgcctgaacccaggaggcggagcttgcagtgagctgagattgcaccattgtattccagcctgggcaacaagagcgagactccgtctcaaaaaataaaataagagaagagttattttatttctacacctagatctcaatgtgaaaaaggatgccttcctaaatatacatgtgtatgtatgtcatgatcatatctatgaaaaaatgatctgttaaaacagaaggattggcagaggctct

SEQ ID NO: 12831 - DNA, 1047 bp, Homo sapiens
ttgtaaaaacctgggctccaacaaaatacagttgcgggacagatttgaccaatgggctgccggtttgcaacgtctgtattagggttctcattttgcagatcttaacttctggatagtatgtcatgggcatctccctttatccagggctcctatggtgtcgtcaagttggcctacaatgaaaatgacaatacctactatgtgagtatccgcattctcctccctgcccccatccttatccacagaagagcctcctttccagcactcagcttcctggaaagttttcctagctgttgtctcattttattcttaggtcatgtttattttgtgccttaggaaggaagtggtatgcccattttacagataggaaaatggggaggtgaggggattggcccagaaaaagttactcattcagcaaaaggcttttatgcccttcctctgagctgtcatctctgcatcctccatagtattgagaacaaggcagcagtgagacaggtgtctgtgtgggtggctttggagtcagtccagcgtagttttgaacctgaatctatcgtgtgccaaccatgtgaccttgacaagtgatatttctccatgtgtaaaacagctgagcctcagtttccccatgtgtaaaacagctgagcctcagtttccccatgtgtaaaacagctgagcctcagtttccccgtgtgtaaaacaaccagtcctgcccctcctttgcccattgctccagctcacttgtgttttgattcgatggcagcaagtcctgaggctcgtggtttcccagctgagagaggcgaccgtgagcctcaggaacacctcagagctggaggcaccccaggagtccagcctccctacaaccccatggctgcttgaccctctctggtaatgaggggctcactctgttgacctgagcctgccagggggccaggagcttgggccggctttggagtagaggaaccccgactgcgccctccttccccttttcctccctgctttaaacaggacctggctaaaggtgctgtccttcattttcctgcaggcaatgaaggt

SEQ ID NO: 12832 - DNA, 1563 bp, Homo sapiens
ggcagggcgtggtggctcatgcctgtaatctcagcactttgggaggctgaggcgggtggatcatctgaggtcagtagtttgagaccagcctgaccaacatggtgaaaccctgtctccactaaaaatacaaaaattagccgggcatggtggtgggtgcctgtaatcccaactactcaggaggctgaggcaggagaagcacttgaacttgggaggcggaggttgcagtaagccgaaattgcgccattgcactccagcccgggggacagagcaagactctgtcaaaaagaaaagaaaagaaaagaaaaaaaagaacagagatatattctgtcatttctggaggccagaagtctgggatcaagccttggcagggttcgtcccttctgaaggctccgaggggagtctgttccaggcctctcctggctgctggtggttgttgataatctctgatgctccttggcctctagaaggagcatcgtctccgcctccatctccgtgtggccttccccctccgtgctggctggctgtgtgtctacctttcccatttattggactaggcctgttggactggggcccaccctaatgacctcattttaacttcataatctctgtaaagacctgtctccaaataaggccacattctgaggtcctgagggttagaactgccacataacatttttgggggacacagttcaactcacagcagggtctgagcccagtccctgtagcattgccctgggctgccctctcgtcatcatcatccacttcccacaaagctgtagcccttccagcccctccttccccactttgttcctgctcccgggctccagacccaggaaacttgtttctgttgcctccactctcccgcctcttttccacagagggccttctcagaagctgtttcctctgctgggaacaagttcctgctcctttagtatctactcaccctgtaggtctcagcctaatagacgttcaccaagaggggccttctttcacccaccgcctcccttcaaatctaaagtggtcccctctggtattctctttgatcatatcctggtcttctgccccagtctgtgcttatagattcacttgggacctactttttctttttcaagatggactctcgctttgtcacccaggctagagtgcaatggcccaatcttggctcaccacaacctctgcctcccaggctcaagcgattctcctgcctcagcctcccaagtagctgagattacaggcgcccgccaccacacctggctatttttgtatttttagtagagacggggtttcaccatttggccaggctagtcttgaactcctgacctcaggtgatccacccgtctcggcctcccaaagtgctgggattccaggcatgagccaccgcacccggccttgtgcacctacttttaaatgttggtccccctcattggactgtcagtcccctcgagggcaaaaaccacatctgttttgtttatccagcacgtgatcattgctttataattactacatgtaagaacaaatgaatgaatgaatgaatgaacgcatttccttgaggacctctgtggg

SEQ ID NO: 12833 - DNA, 1056 bp, Homo sapiens
actccttctcaaaagaaaaaaaaaattgaggtgaaattcacataatataagcttaaccattttattttattttgttttattttatttatttatttttttgagacagagtctcactctgtcgccaggctggagtgcagtggcgtgatctcggctcactgcaacctccagctcctgggttcaagcgattctcctgcctcagcctcccaaggagctgggattacaggcatgtgacaccatgcccagctaatttttgtatttttagtagagacggggtttcaccatgttggctaggatggtcttgatctcttgacctcatgatctgcccgcctcggcctcccaaagtgctgggattacaggcgtgagccaccatgcccagcccaaacttaaccattttaaagtgaacaattcagtggcatttagtacatttataatgttgtacaaccactacttctgtctagttccagagcattttcatcacccccagaggaaaccttgtacccattaaactgtcactctctcttcccagtgcccctccctgcagcccctggcaaccaccagcctactttctgtctctctggatttgcttgttttggacatttcatataaatagaatcatgtaatatatgacttttgtgtctggcttctttcattcagcatcatgctttcaagactgatccatgccatagtggctgtcagtgcttcattcgcttctgcggcccagtactattccattgtgtggatggaccgcattttgtgtatacattcatccattgatagacatttgggttgtttccaccataaaggcgtcttaaggctactttgtccattcccgtgtctctgtagcccctcagttaatgaacttcttggcataagacatttttttgtcactctgtttggagggagcaggtgatggaagaaaggtttcttgaaatcactcaggaaccagtttcccaacccaaggttttcgggattcccttcatgcacccttacctaccccttgcaagaatcgtggctccccatttaaacccattgctggccaggcacagtggcttacgc

SEQ ID NO: 12834 - DNA, 1035 bp, Homo sapiens
tctccctacaggctacttttaccttccccagcctggtgtttggagtctccacgcaggggatagaaacttcaggtgccctagagctgtgctgccatttaccactccccctcccctagctctgcccccagaggagagagaagaggatggctttatgtccccataagctcctttgttccttggaggaggcgggggctgcaacaaggggagggctttgggggagttagccaccctcttccctaatcaccccacaaaaacatgcagtttcagaataaatagtgtgcatgccatgcaaatgcagctttagggcaagccccacataccccttccagactgctgctcatacacccttcctatggaggaagcaggcattggtgacacacacccttcctatggaggaagcaggcattggtgatgaggacgcaaaacatatttttgtaatgaagagtaatagccatcatttgatgagcccctaacttggataataataagaatacttatttatttattttgagacggagtctctgttgcccagggtggagtgcagtggcacaatcttggctcactgcaacctccgcctcccgggttcaagcgattctcatgcctcagcctctccagtagctgggattacaggcgcccaccaccatgcctggctaatttctgtatttttagtagagaaggggtttcaccatgttggtcaggctggtcttgaactccttacctcaagtgatccgcctacgtcagtctcccaagtgctaggattacaggcatgagctgccacctggccctggacaataataataataacagtattaaaaactaacatctattgagttcttgctgcctgccagattctgtgctatgtgttacatgcattatctcatttaatgcctaccaaatcctacaacgtagggaattttaaccccatagtagagattaggagactgaggtttacagaaatcctgcagtgttgctaggatttagccccattttatagaagggctcagagaagttaagtaacttgctcagggtcacaca

SEQ ID NO: 12835 - DNA, 1048 bp, Homo sapiens
aggtgatccacccgcctcggcctcccaaagtgctaggattacaggcatgagccacttcgcccagtcttaaagacctttttgaaaacctcaccctagtggtttgttttttctctctcaaagaatggagaatataaaagaatcttctggtagttgttgaacaaataaaactaaataccacgttttgaaaactatacgtgaagggttgagttaaatgtgtgtgttattttcccctttccgtcagctctggaggctgccatcgagaacctcaatgaagccaagaactattttgcaaaggttgactgcaaagagcgcatcagggacgtcgtttacttccaggccagactctaccataccctggggaagacccaggagaggaaccggtgtgcgatgctcttccggcagctgcatcaggagctgccctctcatggggtacccttgataaaccatctctagagaggacatccctgctgggctgctgtgcagagtataagattttggacttgttcatgtcccctctctccctataaatgatgtatttgtgacaccctatcttgtcaataaacagcattctgattagtttgtcttattttgttgctagtaactacgtatttgttttattccccttttcttcccttttggtagcaaaggacaccaactttttcttaataaatgggtattttgctaacaagttagtgcaagcatctcagattatgttctctctgggcaaaattgccaatatcttgattagaaattgtacacactccatcattatgtaaattcatttagcacctattctcagacaagagctcttcctggaattggtagatctctccagggtggtcagtgcaggtctgtatgaggcttggactttcttctgaggcctccctgccttgttggactgaaccagcgcttgtggttcctgtggctgctcacgaggacttgttggtccctgactggagattaagaaggaaaagattttttcataatttttggaccaatgaccaggagcatttttcagtccctttctagatgttggctttcttatata

SEQ ID NO: 12836 - DNA, 1052 bp, Homo sapiens
ttggattttgtcaaattttttttttctgcattgattgatttgatcatatgggtttttgtttgtttgtttttgagatagagtgtcactctgttgcccaggctggaatgcagtggtgcagtcttggctcactgcaacttctgtctcccaggctgtctcccaggttcaagcagttcttgtgcctcagcttcccaagtagctgggatcacaggtgtgcaccaccatgcccaagtaatttttgtattttagtagagacagggttttgccatgttggtcaggctggtctctaactcctggcctcatgatccacccacctctgcctcccaaggtactgggattacaggcgtgagccactgcgcccagccccgattttttctttcattttatttatatatttgtgtattgaactaccttgcattcctggagtaaatttcacatggtcatagtgtatgttccttttaacgtgctattggatttggtttgcaagtattttgttgagaatttttgcatctgtattcataaaggatgttgatctgtggttttcttgtgatatctttctttggctttagtattagggtaatagtggccccacaaaatgagttagaaagtattctctcttctcctttttctgggaagaatttgagaaggattggtgttaattgttttaaagtttggtaaaattcaccagtgaagcagtctggccctgggcttttctttgttggaagtttttttggttactaattcagtctctttagttgttataggtctattcagatttcctgtttcttgagtcaattttagtagtttggtctttctaggaatttgttcattttaccttttatctaatttcttgcatagaattgttcatggtattcttgtataatccattttacttttgtaaggttgttagtaaagtccccagtgtcatccctgacttcggttatttgagtcttgtctcttttttcttggtcagtctaacagtttatcaattttgtcgatctcttcaaagaaccaacttttggttttattgattctctctgttgttctcttagtct

SEQ ID NO: 12837 - DNA, 1051 bp, Homo sapiens
aaagtggaggttctccaaactggctgtacattagaattattgcggagatttaaaaaatatcttcgtacctgaggccttgcctcagacctacggagtcagaatctctaggggtggagctaaggaatctgtttcttactaccttcctcagtgattctttttttttttcttgagataaaatgtacatggccaggtgtggtggctcatgcctataatcccagcactttgggaggctgaggtgggcagatcacaaggtcaggagttcaagaccagcctggccagcatggtgaaaccccatctctattaaaaatacaaaaattagccgggcgtggtggcacgtgcctgtaatcccagccactcgggaggctgaggcaggagaatcgcttgaccctgggaggcggaggttgcagtgagccaggatcgtgacaccgtactcccagcctgggcaacagagcgagactccatctcaaaaaaaaaaaaaaaaagtatgtaacacaagatttaccactttaaccattttaaagtgtacatttcagtggttttgagaatattgacaacattgtgcaaccattactgctatctaatttcagagtattttcattacatagaaaaggaaactgtacccattaagcagtcattccccagtcctcccttcccccagcctctggtaacctctcaccggtttctgtctctatgagtttgcctattctgaacagtttgcataactggactcatataaatgtggccttttttgattggcttcttttacttagcttgatgttttcaggttttatccatgtagcaataggtatcagtgcttcattgtttttcatggctgaagaatatttcactgtatggttagatcacattttgcttatccattcatcagctgatgggcatttgagtcgtttccaccttttggctgttatgaatagcggctctttacatttctgtacagcttttgtttgaacacctgttttctttttttttttttttttttttttttgagacagagtctcgctctgtcacccaggctggagtgcagtggtgcaat

SEQ ID NO: 12838 - DNA, 1050 bp, Homo sapiens
caacctgcctagtagctgggactacaggtgcacaccacctcatccagctaattattttaattcttgtttcttagagatggaatctttctatgttgtgttgcccaggctgatcttgaactcctggcctcaagtgatcttcctgccttggcctcccaaagtgttggaattacaggtgtgagtcacagtgccttgtggctcaattctttagccttgtaactttgttcaaggccatttgttagaattttgtgtcttttttttctgggagtaagaccctaaaaagtaaccatgctctttgggtctatattaataattccatcttcatctccctttcacctctgggcttatgtgaaaaacctgctgacccaatcattgtttggcttcaacagccaggctgtgttaggaagccttttagtacacaactagaaggtagctgccttttttttttaagtcagtcctttacccctttcttcatcttgccttagatctttctagttttagaacatcaaccgtgtggatatatatatacttactgggctgatgactgtcacatttttaattagacaagttagactcatacttgtgaaattaagtttggccagctgcagagaaggcagctttatcatgagtctccagttactcttttctttctcttgtatctgcttctgaaactttccttcaagtaaattggatggtgcacgttgttttgtggtatgagagtgattggggtttcggtaagcccataaataagttatggggctcagaactgctttctgagcttcctcttgcaacccagaggaggtagagtgaattctttttctaatataaccattctcctttgctctttccatgtaattctagctcatcttatatcactcctctctcagtctcaggaattgcaggccacgatgggaatatttttgggggatactgcaggatctatatccccatgcccgactccctgtggcggtcatgaaaataattggtgagactggccagttaaaatcacaggaataatgatcttttattgtaattctatgtaatttctgctta

SEQ ID NO: 12839 - DNA, 1045 bp, Homo sapiens
aaaagtaatggggaagagggctatggccggagcttgagatacgccgctctgaatcttgccgccctgcactgccgcttcggtcactagtaagtttatagacctttgtccttgcgcaaattgaaggaaccgatgacaataaaaagtctgctgtttggcctggtgcggtggctcacgcctatagtcccagcactttgggaggccaaggcgggtggatcacgtgaggtcaggagttcaagaccagcctggccaaaatggtgaaaccccatctctactaaaaatacaaaaattagccaggtgtggtggcaggcacctgtagtcccagctactcaggagactgaggcaggagaatcgcttgaacccgggaggtggaggttgcagtgagccgagagcacgccattgcactccagcctgggcaacaagagtgaaactccgtctcaaaaaaaaagaaaaaataaataaagatttgctattttgggagaaaagaaaagggaaaagaaatggaagaaatgaattctcaaatgttaattgtgatgcatttttaaaaaatgtattttttaaaaagaagataggaaagcagctcatcaacctggactagtcagtaacttccatagagggaaccttattggcactggaacagtttatgaaaaccttctgcctaaatagtctgccccctagtgtcactatgtaacattgccgtcttagtgcctagcctctttcattacttctaagaacaacaggccgttcagtgaaaaagaaattaggtcattaggccagagagtccctaaaggattttttggaggtaaaaatggggatgcagaagctatttttagtatttcaaaaagccagaaggcagttgtacctttactggatgaaagactacataggcttactgaaagtcaggtttgctttcaggtagaattcaggctgctcagtcaggtgacactggtttatactgttgcctcagtgtgcctctgtttttaatgaatagaaataggaaaatcgatcaattatgttttagtaaatagaattaagtagataaaacaac

SEQ ID NO: 12840 - DNA, 1074 bp, Homo sapiens
actgaccagtagagatgagggtgaaagaaaaatggaaaaagaagaacttgatgtatctgtaaggtaatttggcttttctgacagggatccttttcctgtgaaatagtataatttcaagtgcaataagtccttgttcatttagaattcacgtgctggcttatgccctttttacccttccagatctgggaagttaactgataagggctgcaccagtgggtcccttgccctctgacttgtgattggccaatgggaggcactggcaggaaatcccaagggccagggagaatgacgtggagtgtggattcattggctccctttcttgggggtcctggggggctggctgtagggtcacagcttctgtcaggtcgctctttctgcactccttcagggggttcggtgactaggagcaagtgtttgcaggccccaggtgaaaggtaccccactgttatcagtcctggggactgtattgtgtcttatgacttctctgtcctttcccctacttttgtcaattgatcctttgttaaactcttctcagactactcaatttgaatgtgttctttgttttctgctgggtccctgactggtattgttcatcacatcagagtgaagtaacacttgattaattcagtgaaaatttattgaatgccttctaaggtctagcctctaaggaagctgttgtaaggaagttactcacttagttggtcaagcccaaaatgcagtagtatccttgattcctccctgtccttcaccccagtccctcagcagatccagtcagtccttcctccctgctatgtttggaacttgttcacttatctcatagccactgctacccctggagtctaagcacccaatctctaccaaatctactcaccaaatctgcactagcatcacttttctccttgacttaactcctgtctccctacatctgttcttcaggcagcatctggggaagcccctaagaatattaatcagatcccagcacttttctgcctaaaccctttggaacttagagaggagtttgagcttaccatggcctcagtgcctgtataacctggcccaatgaacttccctgac

SEQ ID NO: 12841 - DNA, 1031 bp, Homo sapiens
gaaggcactaggcaactcaagatgaaatcagagtgggccttggtctctccttctgtgtggagggttccttcccactctttagaacttaggaaagcagaggagccagtatcttgtcagggatatgggaacaatcttggtagtgacttggagccagtcaagctaggaaagatgccagctgtgctcaaaacaaaatgtgtgttccacccaagccagagattgaactagggttagattatgcagtgagttaatggagaaagacactggaaaccatgctgtcataataacaaccatgttatatcctacgccgcaaagtacttaagggtgggaatggcattatcgttgtgcactgtacatagttgctatttacatttatgaagtcaactgacttctcccctcactgccagaaaaccatttcccagccagcagcctacgacctctgaaagctctgaggatgaagattcctgcatctaccactgtgacatcatctttgaagtaggattgccaaaatattttgtgcatattctgggcataaacctgttcatcaacaaatgctgtattataaccagcttttaaaggacaaaactcaagatgataaaagttaatgatgggagggctgtttaagctagataggaacataagatttgttagtctgaacaccactgagggtcaggcatggtggcccacgcctaattcagcactagtctgggcaacatagtgagaccctgtctcaatttaaaaatattaagtacatatatattttttttacaattaaaaagaaaaaaataaatacaactgaattattttttcttgtccataaatgttccgtggcttgatcgtgttaccagctgaggaagaatttctgtgccaaatttcatcaatgtatagttgagaagtttttgttctgttttgttttgttttgagacagtcttgctctgtcacctaggctggagtgcagtggcatgaccacggctccctgcaggctcaagcaatcctcccccctcagcctcccaagtagctgggaccacaggctg

SEQ ID NO: 12842 - DNA, 1126 bp, Homo sapiens
tttctattatctggctaataaaccagggttacttcaaactactatctaaaaaatccaccaagcattttgtactctttctataaagaagccactaaaacttaatacacaaatctaagagtaaacattaaactgctttaaactaagactgtataaatctgaatttttgaatttaagtttagacaaaaccagcacctactgcttagcttctatggcctggatttaaagacttgccaccaccaagttaccaatttggaggaaatgttaagatttccagagtctcatcaaaagattactttgggaggaagaggcgggtggatcatgaggtcaggagattgagactatcctggctaacacagtgaaaccccgtctctactaaatatacagaaaaattagccgggcgtggtggcgggtgcctgtagtcccagctacttgggaggctgaggcaggagaatggcatgaacccaggaggtggaatttgcagtgagctgagatcacgccactgcactccggcctgggcaacagagcgagactctgtctcaaaaaaaaaaaaaaagtttagacaaaaagcacaagtgcccacaaaactctggcaacttatgctgcttctaaagggaaaccatgacctgctcaagccagttactaccaattgtggttgcagacaaacaagtgggaggccttgatttacatgctttgatcttcaaaagcagaaaatttttttctttactattagccacacaaactttctgcccaaagcacaggggcatctgcctcctggtgttcacaggtattttcagctctgttgatggactaataaattctgagcacccaaggccatatgtgttactcactgcacagtcaggagataacagactctgagaagtggccactcccagctgcactgaaatgacagttggtctcaactcaaccatcctgagtcaagtcaagttggacctaaaagagatttcacaacatttttgcataatagctcaagttcctctttttttttttttttttttgagacggagtttcgctcgtcgcccagcctggagtgcaatggcacgatcttggctcactgcaacctccgccttccagtttcaggcgattctcctgcctcagcctcctgagt

SEQ ID NO: 12843 - DNA, 1050 bp, Homo sapiens
tagagagtctcgctctgttgcccagcctggagtgcagtgcagtggcacgatcttggctcactgcaacctccacctcccgggttcaagtgattctcctgcctcagcctcctgtgtagctgggagtacaggtgtgtgccaccatgccatgttggccaggctggtctcgaactcctgacctcaggtgatccgcccacctcggcctcccaaagtgctgggattataggcgtgagtcaccacgcctggccgagctcttgattctattccattggtctatatgtctatccttatgcctgtaacgtgctttatttatgaatgaatgaatgacggggcttactctgtcatccaggctggagtgcagtgaggtaatcatggctcactgcaggctccaccttccaggcaaaaatgatcctcccacctcagcctcctgtgtagttgggactagaggcaccatgtttggctaattttggtgttttttgtttttttatagagacaggcttttgctatgttgctcaggctggtcttgaactcctaggctcaagtgatccacccacctcagcctcccaagtgctggtcttacaggcatgagcagtcgcgcccggcctatgtattttattttatttggagacaggatctcactgtgttgctcaggctggaatcatactcctgggttcaagtggttttccacctcagcttcagattagctcaagttcttcaactttgttctttttttggattgtttggacaacttggagccccatgcattcacatgaattttaggatagatttttctatttctgcaaaaaatactactaggattttatagcaatttcattgaatctgtagattgctgtgggtagtgctgagctgacatctgtattaagtcttgactttccatttatttatgtctaatttagtttttttcagcaatgctttatagtcttcaaagtacaagttcttccttggttaaatttattcctgaagctaggcatggtggcacacacctatagtcccagctactcaggaagctgaggtgggaggatcacttgagcc

SEQ ID NO: 12844 - DNA, 1055 bp, Homo sapiens
gccgggggttggtggccggcgcctgtaatcccagctactcgggaggctgaggcaggagaatcgcttgaaactggcagtggaggtcgccgtgagccaagatggcgccactgcactccagcctatgtgacaagaccaaaactgtctcaaaaaaaaaaaaaaaaaaagttaccattggagttgtagtaattgctaccccaaaatagtgccagttagcagcagccacaagcacatagcagtggttcctgacccaaaatacggacaagggacagcttcccgagggggtgcagaagagccggtgcctgacaaccagggtgttgagacagtgggggccgggaggcaagggccctggtgggcaggagggagcttggtttctgcctttgctgtcgttgcttacatgcaccccttgtgaccctgctatcaaggggcctgttgttggagagaaaaaaacccacagtgagttccattattgttctctgtctgtcgctgtggtgcaggatcttcgctcgctgcacttgccgttggggcggcagttggttctgaaggacttggggctccagtatgcagcgaggtacacagagcaatgctgcctgctcttcgcccaactaacccaattttggtctggtagcttaggatggtctggattggggggtgttgggtttgcgtgagagcaaaaaaagaaagagaaaaagaaactacaggtttttttttttttttacccttagaaattaccaagtactaaggacatccccatctcatcaaattacatttttcacacagcgcagtggtgacatacacgttgttttctcctctgcatcccacatttatgcctgataaactgtctggcaaccatgcctcatagcaggggcatgggagctttggatgggatgagatcattcgggacctaggaagccattccttctcctcatgaagttttggtggcagggattgttccacctcgtggacgcaaagaaccagagtgaattgaggcttctccagctcaagggccaggtcatggccttgaatgggtgatggagctgccctttggagagggcctg

SEQ ID NO: 12845 - DNA, 1048 bp, Homo sapiens
tgtgttttcttttgcctggaaacgggatagatgtgacgttggggagggggtgctgctgcttctggaagacgtggcgtcacagagccttgtgcccgtgggccatcttctccgcccgtccctcttctgagtcctggtgttccccgcagattaaggagtcagagggtgtggtcaacgacgagcttccaaactgctgggagtgtccgaagtgtaaccacgccggcaagaccgggaaagtgagtgccgggctccaagtcccagggtcagtcgggagaggggcgggcctgggcctggccgggaccagcctgtcccaggagtttcaggcaggtgggttgccgtcggcctggggaggaggaagggcaagtccaaaggtatacagttggtctgttcattctctctttttggcctacaagcaaaagcgtggccctggctttaagtacgcctccaacctgcccggctccctgctcaaggagcagaagatgaaccgggacaacaaggaagggcaggaacctgccaagcggaggagtgagtgtgaggaggcgccccggcgcaggtcggatgagcactcgaagaaggtgccgccggacggccttctgcgcagaaagtctgacgacgtgcacctgaggaagaagcggaaatacgagaagccccaggagctgagtggacgcaagcgggtacggaccaggaggggctgggaggcaaaggggttggtctggctggtcccgggtgctgggttggagggatggggcagggggtgggcagcaggtagagcttgggataatcccggcctcttgctgccctgagcaggtcacctaagtcctgagagccctgccccaaagaaaggaggggaaaaccagcgagtcactcctcttcccactccacccccctttaggcctcatcgcttcaaacgtcccccggttcctcctctcacctctcgccgaggccccctctaggcagcagcctcagcccctggtggagatccagtctcacttacttccagcagcaggtgctcccacgacgcacgccctcctgaggccccggggactggcga

SEQ ID NO: 12846 - DNA, 1023 bp, Homo sapiens
gttgaaggaaaccccatttttctacgtctcctactctcttcagcttgacgtggcttctggaactgatggcagatgcaggcttggcctgacccttggggtccttcttactcttctcctagcccttctgctctgccagggcacttctcacgtgttacccacctgtgacatacgcagccccacctatcttccttttctggaccctccctttgctccgtcgctggggctgcctccgtagcctcccctctccaccatgtccctgccagtgtcatgccgatgtcatgctggtgtcctgcagtctgcccccccacatgcgccccaagccccctgccagcccctgcaggagatttgcctctggcaccgcctcccatcctgccacctggctcagagcccgttctgccatctgccccaccccaccacagaccctcttcttgccgtgtgggccgtgcttcaccctgtgccccccgctgcagtctggtccccagacgtcccctttggcctggcctgctctgtcctcattcaccttgaggccccgcggccttgcccacttggcttctctccaccctgtcctccaagtcctccagaaatcagcctctgctgcttctgagaactcttgaacatgatttttccatgttttctttggatttcagcgacttaatgtctttgtcttcccaaatagctcatggggagcagccatctccctcgctcctgtggccccaggaccttgtttcaggccgtggcagatgtgtgtttggtatttgtggaaggaacgatgactgccttgccttctgtgtcctgtttattagaattcaaacatttgcgccatttaatcaagtctttttcacttaccaatggcgtgtatatcccagcctgcttgaagctcctctgagcagcataataaaggttggctgcgtgcttcctctgtctgcaggtgcactgggcgggatgaggctgacctgccctggcctcagggggctcacagccgggtgcatcaagttctcacacttcgtggtctcagggacccct

SEQ ID NO: 12847 - DNA, 1115 bp, Homo sapiens
cgaatctgctttctgtcccgtggatttacttattctagatatttcattgtaacgtaggttttggtttttttttgagatgggggtctcactctgtcacccagcctggagtacagtggcacaatcatagctcactgcagcctcaaccccccaggctcaagcaatcctcccatctcagcttcccaagtagctgggactacaggcatatgccactactcccagttaattttttcattatttgtagagactacgtcttgctatgttgcttatgcctgtaatgccagcagtttgggagaccgaggcaggaggactggttgagcccaggagtctgagactgactttggcaacatagcaagatcctatgtctataaaaaataaaaaattagccatgtatagtggtgtgcacctctacctgggagactgtacagcgttagagggctgaggcaggaggatcatttgagcccaggaggtggaggctacagtgaattgtgattgcatcagacagagaccctgtctcaacataaatgataaatatagacacttactgtgatggaagtgccaagatattggcctgtatgagatgggaaagacaagaactcaggacagaggagaccctggagttcaagtttggtttctgctcttagctactcgctgtgtggccttgggcaagccagtccgcctttctgttcacctgtatggaaaatgaggatgtgctttgtccttctggggaccagattctgggactcttatggccattctgaagcacttacccttgggtgaaactgcagtgtcctcactatgatatgggcataacagcagggacctgtgtcactgaattactttaaggaacaaggaagccatgaacataggttgcagctaaaggtgagccaggctggctttggccagctacccacacttcccctgccctttctctttccttcccccttctcacctctcagcagccccctcatcccccctccaagttaaagattgctgtttaggctgtgcacagtgactcacacctgtaatcccagccctttgggaggccaaagtgggagggtggctggagctcaggagtttgaggccaccctgggcaacatagtgagaccccagtctac

SEQ ID NO: 12848 - DNA, 1009 bp, Homo sapiens
ggcgccgctgccccaggccctggctgctcttctccactccctgcaccctcctgcacgctcgctctccctccctgcagccttgtgaggtgtgggagcccacaggggccagcggctcatcctctccttgcccttcccaccccaggttggatccatgccgtctacacccctgtagactctttggtgttcggcggaaacatcctgcacagctttaacgtgcccatgcagctgcggatctacgagatcgaggacaggacgcgggtaaggaggttcccttctgtcctcgcgtgcgcgcctggcccctgagctctgccggtgctcggtgtgtgggacaggtcatactgaagtcctccacagttcccctctccctcccgattcctctctcaagctggcttcagtcctggttctgtggcgggggagggggggcaggggaatgcctgtaggagccacacccggaggccctggagtttctgttcacctccaggttgggggcagccaaaacccccttgtggaagaggaagtgtctctgagaaagcaccgtgagatttcagggacctgcctcttcctcctcacgtggagaaagtggtgtgagggattagggggatttggtcgctgttgtttggaggatgggtgtggaccttggaagggcctgtcctggtctgaggtcaggtcttggctatatgttctcccagggaccccagatctgactggggaggaagcctgaggaagccagtgcctgagtccccctgggtactgtctctgaggtagtctccatgtctgctgaggacgtctctagtttcctggggccgaggcttttctctgcccttgacagggacggtgctagtttcccagacgtcaagtttccctcactcaccccatgtcctacgaacatgggcggaggcttaggtaactgatgtgtgtccttcgctccacaagtgtcccctgaaaaggacaagtggcctgaacttgccatggcctttctcgtgctaggacttgatcacgtgtccctagg

SEQ ID NO: 12849 - DNA, 1051 bp, Homo sapiens
gcttattgctgtataattattctaaaacttcagagcttaagaaaaattttagcagcttaaaacatcaaacattatctcacagtttctgtgattcaggaatctgggaacaactgagctgggtggttctggctcagggtctcttataagcttgtgttaggccttggccatgtgtggtggcttacgcctgtaatcacagcactttgggaggccaaggggggtggagtgcttgagcccaggagttcaagagcagcctggccaacatagtgagaaatgttgcagtggggggaatgatgtaggcctgggctgcagtcagctgaagcctctatgggctggaagatccgcttccaagatggtgcatccccgtggctgttggcaggaggcctcagttccttgccacatatagctctccataggtctgcttgagtgtcctcatgatatggcagtgggttccccatagtgaatggttcaagaaacaccaaggaggaagccacagtgccatttatgacctaattttgaaagtcacatattgtttgctcctgccatattctgttaattaaaagtaaatcactaagtccagctcatactcaaggggaggagaatttagctctgcctctcgaagggaggtgtatcaaagcatttgtagacatgtttcaaagcctccacagttgcctagttctatgacatgggctcacctttttcacttagcaccgctgggttctgtgatagattccagaagtggattagtgagtctcctcccctcctttgctcctgtagaatacaggtttgtagagatcaagtttcttggtggaatgaagatatgctgtgatctgacaagcagtaaaggagctcaaaagcccagcaaaatggggaccccacataaagcataggtttggccctcagataattgatagttgagtgggttctcttccctgtgtactttctgggggtggcaggaggaactggggaaattgttgggggagtgagaacctgacacacagagaagaggaaacagaggcactgggctgggcacattttggggcacattttgtgt

SEQ ID NO: 12850 - DNA, 1027 bp, Homo sapiens
aagagtccatccctgtgagtaggatttaaaccttgggcatcattgttaattaatagtgaattgtagcccatattaccacatccctggaactagtacaatgcgtgtctttttttccctctgaacttaaaggggtccgtcccactttgcataaaactcctcatggagagtattttctagagggagaaagagacatagagagggctacccaccctaaaagaaagcaggcatttgaatgtctagctctggcccttacctttgaccccacacttccagcttccctggaaaaatggggtggacagtggatgtcctaccctctgctgaggttcaggtttgagttgcctcttggggtagggaagggcctcagtggttctggggtgaccctccctggaggcatcaactggtctacttctctccctctggatgttctcattttgagttcccaaactgaggggaaaggatctctcttggaaaaatggcttccccccgggcccagggtagtctagctctgttgtttctggcctctcaccaaaggtctgtgctcctctttccccaggatgcctgaccctgatttcacagtccgagacgtcaaactcctagtgggtaagtcgcttgccgtgtgtgtggctcagacatgctgaagtagggaaggggaaagaggcggtcaccacctgcccatttagacttttaactgcctctcaaaacaaagtccccacgggagaaggcaggagcaggtgtgagctgcaaccgtttcattctggagaacaggtagggttgcagtcttaagaagctgtatcagagggcgtttgccggtacacagttttatgaggcccatttggacgctgcctccagcctgggtgtcagcaacgcaatctgagatctctcttctgcatttgtttgtgggttgccgggtaaacactgggtgctttatgatccctcatagactttaaggctttcgaggcgaggggctgttcctcctgcttccttggggttctagacaagcctggggcagggcttggaactgcgagct

SEQ ID NO: 12851 - DNA, 1124 bp, Homo sapiens
ggggaggagacttgaggccaggagttcgagaccggcctaggcaaaatagtgaaacctgtctccaaaaaaaaaaaaaaaaaaaaaagtagcgaagtgtggtggtgtgtccctgcagtcccagctactgaggaggctgaggcaagataatctcttgagcccaggagttcaaggctgcagtgagctctgattgcgctgctgcactctagcctgggtacaaagcaagatattgtctataaaaaaaaaaatagaagaaaaataaaaaggccaggctcagtggctcatgcctgtaatcccagcactttgggaggccaaggtgggtggctcacctgaggtcaggagttcaagaccagcctggccaacatggtgaaaccccgtctctacaaaaaatacaaaaattagccgggcatggtgatgcatacctgtaatcctagctactcgggaggctgaggcaggagaatcacttgaacccgggaggcagaggttgcagtgagcagagatcgtgccactacacgccagcctgggtgacaaagtgagactctgtctcaaaaaataaaaataaataaaacaaaaaataaaaaataaggcttggcgcggtggctcatgcctgtaatcccagcactttgggaggccgaggtgggaggatcacgaggttaggagatcgagaccatcctggctaacacggtgaaacccgtctctactaaaaatacaaaaaattagccaggcgtggtggcgggcgcctatagtcccaactactcgggaggctgaggcagaagaatggcgtgaaccagggaggcggagcttgcagtgagccgagattgcaccactgcactccagcctgggtgacagagcgagactctgtctcaaaataaataaataaataaaataaaataaaatataaaaaataaaaataatgaggccgggtgcagtagctcccgcctataatcccagcactttgggaggccgaggcgggatgatcacctaagttcaggagttggagaccagcctggtcaacatggtgaaaccccgcctctactaaaaatacaaaaattagcagggcatggtggctgccatctgtaatcccagctactctggaggctgaggtgggagaatcccttgaacccatg

SEQ ID NO: 12852 - DNA, 1032 bp, Homo sapiens
gccaacagatgagggaagccatttttctgcaatggaattaaatggccaagtgggtttttcctttgttgcaaatggggaatgtttttcctttgactctaccatccagttcaggacgtctcagtgtgtttaacatttgtcaacaggcccaaggactcacagttggaagactggagaagactttttaaaaagatctggatttttccttatgacttggaatccatctttgtcttgtataactaggtcatagcacaccattcatgtcagcagttaacagttttgaattccaaaaaaacctaagtaaatgacatattttttttcctctttttgttctatgggtgggtggggggagcttggagctgtcttaatctgtattctcttgactgaacaataaatttttaaatatatctagtttcctctattaaacacttaaacctggccatcttattaactccttctctctttttaacaaggtaatgttttaaatgtatatagctttaggactagcgaaatggcagcaacaaaaaattgtgagcagttgttactcttttagtttttaaaaaaccttttacattgtaagtacccaatccattctgtcctgacgcagtacagttttgatgttaatgttgctgagatgtccttaattttccgaaccttcatctgcatgtatgtctttgtctctcttgtctaatataagccagttaagatgcttgagacgatcttgctttataaagctaaggttctagctttatgcttttgaaaatgtttacagcactaaatgctagtcagctttcttccccgtagcttgtacactttctttgaaaatcgatctatttgaagaaaaacagccctgtttttctcgtctttggtgttgggggttggggggagctggtgggtgagggaaaggaagaccttttctttgtgtagagagactaaagccgtcacaggaaactagattaaaactggaaaacaagtcctagctggttccagcaaacaccaacgttaagtggggggtattttctatggtggttgggc

SEQ ID NO: 12853 - DNA, 1031 bp, Homo sapiens
tttcagtatggccggctcacgcctgtaatcccagcactttgtgaggctgaggtgggcggatcacttgaggtcaggagtttgagaccagcctggtgaccaacatggtgaaaccccatctctactaaaaatacaaaaattagctgggcgtggtggcaggcgcctgtaatcccagctactcaggaggctgaggcaggagaatcgcttgaacccaggaggcggaggttgcagtgagcagagatcgcaccactggactccagcctgggcaacagagcgagactctgtcaaaaaaaaaaataaaaaaaacacacaactttaaataggtacacatatgtaaacacatgctagcctgctctttgggctgttttcactgtgtcctgcgttcctccctgttcctccttcgtctttccctttctcttctcactcccacaaccctctcattaaaggcctcatccccgccctctgctgataaccaagtgctgagtcaggccgagaacataaaccaggcgctctgaatttctccttccaggctccccatgctttcattctgcacctgagaaaaccattttaacattttctgttctagcctttatgtaattaccattaatttctatgagctaatttaatgtcctcttcagagtctatggctggaaagtaataatccttcagtttgagtaataataataatctttactactgttttggcccataacatcttaaacacccattcttggaacttgctacaaaagttactgaaattagtgagaaccaattgatatttccagcataaagctgctctgcatgacatctgtataactgctttgcatgtgtgtattttaattgtcgttattgcttggtaataatttattcaagaattaacaaacttcaacttggggttagattttagtagaatattggggagggtgcaaccgttttttttttttttaattctacctcttccaaatttattaacttgtttctttaagttcaaatggatacaatcacatgcagactctggcatgtctatgcatagg

SEQ ID NO: 12854 - DNA, 1020 bp, Homo sapiens
atgtaaatggattttagataatagttggggcccttcattgccttctaaaactcagattgataaaggattcatatgtaggcctatgcgtgtaatggttaaataaatgtgtcaaccattgagtaccaaaaagaacttaatatactattaatttaaaaagccttgcaaatacttacattgtgagtatttgaaatgtagttggtcatgcaagaactgagagcttagtcaacacttgaattcagaagtgatcattaaacgtacatagttaagatagtaatagaatcactatggccaaatagtcatgatattcaagtgcagaacttactcccaactgtaggattaaactggttatcatgaagaaattagaatccggctgggtgcggtgggtcacgcctgtaatcccagtgctttgggaggatcacctgaggtcaggagttcaagaccagcctggccaacatggtgaaaccccatctctactaaaaatacaaaaattagctgggtgtggtggcgggtgcctggaatctcagctactcaggagtctgaggcagcagagttgcttgaactcaggaggcggaggttacagtgagccgagatcgcaccactgcactccagcctgggcaacagagcgagattccatctcaaaaaaaaaaaaaaagaaaagaaagaaagaaaaagaaaggaattagtggaatccttctttatttgctgtggggttttttttctttttgttttttgtttttttgtaactttaaacattgagttgcaagcagtatgtagtaaaaaatttttccccaagcataaaaatgtaatcatttctttgaaaaactctcaagttgggtaagccttttaaaacaggctctaagagtctaatgggtaaagcagggtatgccttgcattgctctaattgccagaactgggggagtttgttcatctgtgcctctgaagcctgatgcagatttgggagccggtttggttgctccattctctaggctttttagtgtcaaagaaggggctccaaagcca

SEQ ID NO: 12855 - DNA, 1079 bp, Homo sapiens
acattaacccaggaggctgaggttgcagtgagctgaggtagggccattgcactccagcctgggcaacaagagtaaaactaaaaaaaaaactaaaaaaaacttaaaaaactaaaaaaaataaaaaaaaataaaaaaaagaaaaaagaaataaaactgctagatgcagcttgctatctcctagattgggtaataatcctggaccagaagaagaaaaaacattgttttctataaagatcagtatgataaatatcaaacatctcttccttggaaattcaggcacatggaccctctaagaaagagggagaatctttgcgtattgtgtttttgtagggttgaatgatttttcaaatattcactaatgatttttattttgttttgtgaattgtctgccatgctctttgtccatttatatattcattgtaaaaattttccagttttaagtattgatttttttaacttttaaattataaaactaaaacagattccttctttaaagaataaatataaactgtacaaagggcataaagaccaaaatgaaaacccttctcatctccatatcccactctccagatgttctctttctcatttcattttttaaagtttgcctcccactcttttttcttcctttcattctaaaaatttctaaatatttctgtgaattagtcatgcagcaaaaacatacatcttaatgggctaggacatcaaagagtctataaaactatgttaacatttacagatttcatggtaaagggatatttatgttcagaacataatgtatatttaagaatttttaaaataagacctcatagcaaagcatgaacataagtaataattaataatgactataactacttagagtgagctagtaacttaaattctaggctgttggaagccattacataatctttggtgttatctttttatttaaaaaaatataagagctttttgacccttttaaaaaaattaacagtgtgcagcctggccaacatggcgaaaccctgtctactaaaaatacaaacattagctgggcatggtggtaggcacctgtaatcccagctatttgggagactgaagcagga

SEQ ID NO: 12856 - DNA, 1084 bp, Homo sapiens
agatagtaggattatttttagacaggaaacaggctcaaaagtgaactaatggctgggcacagtgactcacacctgtaatctcagcattttgggaggccgaggcgggtggatcatgaggtcaggagttcgagaccggcctggccaagatggtgaaaccccatctctactaaaaatacaaaaattaaccaggcatggtggcgggcgcctgtaatcccagctactcgggatactgagggagagaattgcttgaatctgggaggtggaggttacagtgagccgagatcgtgccactgcactccagcctgggcgacagagtgagactctgtctcaaaaaaaaaaaaaaaaaaaaaaaaaaaaagtgaacttaccaaggatacacagataggcagtggaggagctgagatttgaaattgtgtttgaaagcctgtttgtccagctgctgttctattctgagaataaaacttttttctgcttacttcatgattattgttcaagattttaaaaagctgtgagctagaaatggggtaggtgcggtcaaacattgctctaaaaatggcttctgaaccctactggtactttttttttctgcctcaaatatttattttgcttagaaaacccagtgcatcccagaatcttgccattcacaggtctgcttttgcatcttttcttgtctcctttctcacttggtgatcatgtcctcattgttaaaggcccatgttaaaggtcatggcctctgatcttgagcagagcaagctgctgcccctttgtggtcaggtgcgggctctgcagtgccctgaccttagaacccagcattttggtcaggatcgtgtgcttctgcttctcccacagacagtgagaaagtaggaatcatagagcacgacgtgtaggtttgaatgaatgcatgggtgtttggtgagtatcttgtttttagccagggccccagtttctgttttacagaagaagacagaggactttgtgactgctctttccattttttagatgattcactttacttccagcttcatagctgaattagtcggggttctctagagggacagaactagtaggatagatagatatcaag

SEQ ID NO: 12857 - DNA, 1052 bp, Homo sapiens
ctgctgtcacgctaaccccagcctgtgctgagctgttcctggtgctgtactccccagacctctgatccctgaacacattcaggtggggagggaccggatcccagggcagaaagagcctgggctgctttggattttctactatttttctgccccaacagacctgagggaatcacatcttcctgtcagtgacttggcacaatatggctgggactgttaacgggagggaggaacagtgggagacacgctggtagcgttccatggaagctggcacaggaggtatggggagtaggttgaaaaagcccctgcccctgatgactggtggctttgtggtcagatttccagggccttctgcggtaagaggactgtgtaatgggaacagtgcttctcaaaacaaagcagtcactttgctattccttagtcttattcctcagagctcaaagctggagaatgagcagctgcttacttcttccgtggtttaacgtgtatggggttttgcgtgtcctctggagcttttttggtgtttctcttcacctaataggactgtggttcctggagaaaaaggggcaccaatatagacacagggtttcttatttttttgagacagggtgtcactctgttgccctagctagagtacagtggcagcagtctcagctcactgcagccaccacctcccgggtttaattcatcatgccaccccagcctcccaagtagctgggatcacagacatgcaccaccacgcccaactaatttttgtatttttagtagagatggggttttgccatgttggccaggctggtctcgaactcctggcctcaagtgatccgcctgcctcagcctcccaaagtgctgggattacaggcttgagccactacgctcagccaccacaagggttctaataggaacccctccctctagaatattgcccttgcccctggaaaccagcacttgtaactgttcttttcctgtgtgccacttacaaggctgcttttaggaaagctcttgcttgatttcggttagccagctcctattttcagttgtagataacaatgaaa

SEQ ID NO: 12858 - DNA, 1071 bp, Homo sapiens
aggctgaggcacaagaattgcttgaacccgggaggtggaggtggcagtgagctgagatcgtgccactgtaccccatcctgggcgacagagcaagactccatctccaaaaaacaaaaaaaaacccatgctgtgataaataacattcacagcaaaattaagggtaagagcttggagccctttgcatggcagaaatctcattggagtttttttctgtggcataatgagaacatgatctgtcccctccttttctgggggaaatactgaacaagtgtgcatgtggtcaaggcttaggaaattacgtgaaacattcgccagctgcattccttactaactagccttgttaaatgtcatctttatctttaaaggtggttcgaggaattgtttcccagtcctgccactagttgaggcactggtattgatgctcaatgttctgaacttttttgtgggagaagctgctctattggcaaagaaggaagggttgtgatggttaaatggggtgaggtgaggactgacaaacagcaaaaaattgctaactaaccatagtcgaagatgacaaactggttacaggaaatttttctcaaatctcctcatgtggttccgaaatactaatcaaaacacaaaaattaattagaagataatatttagctaatgctagtttactttttaacatcaagatttcatgaaagccaagttctaatgactattgtccagtggatttttttgttttgttttgttctgtttttttgagacagtctcactctgttgcgcaggctggagtgcagtggcacaatctcgagtcactgcaacctccacctcccaggttcaagcgattctcctgcctcagcctcccgagtagccaggattacaggcgcccgccatcatgcctggctcatttttgtatttttaatagagagagggtttcaccatgttggccagggtggtctcgaactcctgacctcaagtgatccactgacctcggcctcccaaagtgctgggattataggcttcagccactgcaccttgcctgtccagtggatttttaaattttatttaaatgtcaaactactttaa

SEQ ID NO: 12859 - DNA, 1004 bp, Homo sapiens
atcttgatgcacttcggaaagccagttccgaaggtaaatcggaaatgaagaaacttagacagcagcttgaggcagctgagaaacagattaaacatttagagattgaaaagaatgctgaaagtagcaaggtttgtattgacatcctccattcttttcttttccatttgttattcttgttttgcattatgttacttttgagttgagatcattcatcttccaaattgctgatttaattaaattgcttgatgtccccagttgagtatagtgtagtatgttctgagtatctcaagtatggtttcatctgaggagattagagaaaataatggctcaaccatgtgaatttattttggttgcctgttatctgggtacctgatctatttatctctgggctatgctgtgacttctaatttaagcttagctccagtctataatctgtttaaaataaagaatgccctaacactatggtgttaagatgaatgaatgaacagaaactcaaaagatcggccaggcgcagtggctcacgcctgtaatcccagcactttgggaggctgaggcaggtgatcacctgaggtcaggagttcgagatcagcctggccaacatagtgaaaccccatctctactaaaaatacaaaattagcctggcatggtggcggacacctgtaatcccagctacccaggaggctgaggcaggagaatcacttgaacaacccgggaggcggaggttgcagtgacctgagattattccactgcactccagcctgggagacagagcaagactctgtctaaaggaaaaaaaaaaaaaaagcttaaaagatcatctcctcctcttctaaccacatatagtcaggtgccacataatgatgtttcaatcaacaatggaccacataaacaaaggcggttccataagattgtaatatggtatctttaccttttgtatgtttaaatatgctttgatacacaaatacttagcattgtgttacagttgcctacaacattcagtacag

SEQ ID NO: 12860 - DNA, 1069 bp, Homo sapiens
ttacgtgagtgagttctttagtggtgttttgtgagattttggtgcacccatcttccgagcagtatacgctgcacctaataattcgattttttctgtttttctcaatcctcttatcggtgacttagaacctcaaacctatgagcctggttgtgaccttgcatttacattgagtgtttcttcattgtctacttggggaattcttgggctctttttgggtgggagtttatgctctggggaagttgttctttacctgaaatccatttgcctagattgctgatggagtagttagtggcaggatttgctgttttgtgtggtccacaattgagaagatgccagatagtcacatttagttaaaagccccttttggctgaatcttgagatcgtttctaacacaatggattttacttagcttaattcctttgcgatgaggtttgctgcagatttgaataattattttttctgattttagttttgtttttttttttttaatcaagatggaatctcgctcttttgcccagctggagtgcagtggcatgatctcagttcactgcatcctctgccccgtgagttcaagcgattctcctgcctcagcttcccaagtagcgtagctgggattacaggcacccaccaccacacccgactaattttttttttttttctttagaccaggtttcactcttgtcgcccaggctggagtgcaatggcgcaatctcactgcaacctccgcctcccgggttcaagtgattctcctgtctcagcctcctgagtagctgggattatctggatgtgccaccacgcctggctaattttgtatttttagtagagacggggtttttccatgttggtcaggctggtcttgaactcctgacctcaggtgatctgctcgcctcggcctcccaaagcattgggattacaggtgtgagccaccacacccagactgtattttttttttttccccatagagacagggtttcaccatgttggccagtatggtctcgaactcctgacctcaagtgatccgcccaccttggcctcccaaagttctgggattacaggcgtgagccactgt

SEQ ID NO: 12861 - DNA, 1050 bp, Homo sapiens
agttattcttggcttccttgtttaaaacaaaacagcacaaaacaaacaaaaacactttggtgaggcacagtggctcatgcctgtaatcctaacactttgggaggctgaggcgggaggttcacctgaggtcaggagtttgagaccagcctggccaacgtggtgagaccccgtctctactaaaaatacaaaaattagccagatatggtggtgcacatctgtaatcctagctactcaggaggctgaaggaggagaatcacttgtacccggaaggtggaggttgcagtgagccgagatcacaccactgcattctagcctgggcgacagagcgagactgtctcaaaagaacaaaaaaccacactttaaaacacctttctaagagttctgggctactcctgtgggctgttggctttctctagtttttctttaagttagaggttgtctgcttgaaaattaaatcgaatctcttatgatcttttgttttcagttgtagctccagtagaaaaaaccatatccagtgaaaaagcatcaagcactccatcatctgagactcaggaggaatttgtggatgactttcgagttggggagcgagtttgggtgaatggaaataagcctggatttatccagtttcttggagaaacccagtttgcaccaggccagtgggctggaattgttttagatgaacccataggcaagaacgatggttcggtggcaggagttcggtatttccagtgtgaacctttaaagggcatatttacccgaccttcaaagttaacaaggaaggtgcaagcagaagatgaagctaatggcctgcagacaacgcccgcctcccgagctacttcaccgctgtgcacttctacggccagcatggtgtcttcctccccctccaccccttcaaacatccctcagaaaccatcacagccagcagcaaaggaaccttcagctacgcctccgatcagcaaccttacaaaaactgccagtgaatctatctccaacctttcagaggctggctcaatcaagaaaggagaaagagagctcaaaatcggagacaga

SEQ ID NO: 12862 - DNA, 1907 bp, Homo sapiens
cacttgaggtcaggaaatcgagaccctcctggccaatatggtgaaacctcgtctctactaaaaatacaaaaaattagctgggcatggtggcacacgcctgtaatcccaactacttgggaggttgaggcaggagaatcccttgaacccaggaggcagaggttgcagtaaggcgagatgccactgtactccagcctaggtgacagagtgagactccatctaaaaaaaaaaaaaaaacaagattgccaatctgcagtgaattttagccacagggacaatatataacttctttagatcaagtttcattattaaaaacatttctggctgggtgtggtggttcacacctgtaatcccagcactttgggaggccgaggtgggtggatcacttgaggtcaggagttcaagaccagcctggccaacatagcgaaaccctgtctctactaaaaatacaaaaattagccgggggtggtggtgtgtgcctgtagtcccagttactcgggaggctgaggcaggaggattgcttgagcctgggaggtggaagttgtagtgaactgagagtgggccactgcactccagcctgggcaacaggaatgaaaccctgtctcaaaaaaaaaccaaaaaacaatttttgtgcttttagtatgtattcttattagggagaatagaagtgaatctttaacctttgaattcacattcaccttgcaagatctctttcacggaagggtagttactgagatgtgtctgagtggtagcgggcattagagtgggagtgattctcgagccggcttgccatggtggttttctggggctcctggaacagtgactgccctctgtgctttgcgtgaagtgttgtacagcactaacttcaccaccaaactttgggattcattgctggggccctgttttgttttcattcaagatcctggtaactcactcactctcttctaccacaagtcaattttttccttatgtggatattttgaatattcttaccttaatgaggcaggttataggggattgcttattaaaaggaataaatacagaaagcatatttttatgttttgagaaggctatggtcttgaactgtatgtatacccaacctcagatttccttctttcttttgttttgtttttagagatggggctcgttctattgcccaggctggagtgcagtcgtgtaatcataggtcactgcagtcttggcctcatgggctcaagccgttctcctgcctcggcctcctgagtagctcgctctataggcgtgatccaccacacacagttaatttgtatttttttgtagagatgggggtctcactgtgttgcccaggctggtctcaaactcctggacttaagcaatcctctcacctcagccccctaacgtgctaggattacaggtgtgaaccactgtgcctggcttggaagacagatttttatgtaatttactgttcaaataatgtgtagtgataagaagtgatatctgagaggaaaatgaggagcttggattcttagaattagtgatacaactaacatttgtgattcttgtatggactggtggtggtgcattcaaatggtgttccaactatttgaaacatcccccaggtgctggtgttttccaggcattgaggctatgacagtatctaacgcgctaaatactaaatcttgactttatgaagggtagaacacatttttgtgttgttgggaggaagaatagtcctactttcaggaatactaaatttgacatcccaaatgtcatttatttttcatgtcctaaagctgacatgaagttcttattactattttatttattattttctttttgagacgaagtctcgcttctgtgccccaggctggagtacgatggcgcgatctcagctcactgcaccctccgcctcctgggttcaagcgattttc

SEQ ID NO: 12863 - DNA, 1033 bp, Homo sapiens
tcatgacctcatagccaggctgttcaaaatgtttgcccagcttctggcaggatatgagctgatgcctgccccgattctacagacaccatgaggtactattttcatattctagatttgtgttgattttcttcaacttcttatagataaaaagtaaagacattgacaccaggccctctttattttgctgaaagagatcgtataatgatgagaaaattattgtgagtatcctctggcaggacttttaaaggcagaaaactccacagttgaatagaaagtgtttttactgtgtgtacgtgattagtcagtagctctatttgctacggaatttactatccattttttctgcaaataaacataaagttttttcttctgtgaaaaagtaacagtttgaaatgattagactaggttatcagtggcagaaattctttatgacccagaggtctcaattcagatgcatcacaatcgagaagttgtcaccatctgtttttgattattttgccttgtgctgtttatacctgtttcagttggagttggaagaaaaggtgttggttcgtacagatattcagaaagctagtctctgagggttaatattaactttttaaaggattgtccttctttttttttatttttgagccggagtctcatgctgtcgccagactggagtgcagtgatgcaatctcggctcactgcaacctccgcctcctgggagctgggattacaggcgcgcaccaccacacccagctaatttttgtatttttagtagagatgcggttccaccatgttggccaggatggtctcgatctcctgatctcgtgatccgtccacctcggcctcccaaaatgctgggattacaggcatgagccactgtgcctggcctaaaggattgtccctttaagtaaataaaaacttagaaaaccctgtgtttctgtattctgggtgcaaacacttgataaattgtccctttccatcttttttttttttttttttttttttgagacagcgtctcactgtgttgcccaggctggagtgcagt

SEQ ID NO: 12864 - DNA, 1055 bp, Homo sapiens
aatttgccgggtgtggtggtgtctgcctgtagtcccagctacttgggaggctgaggtggaaggatggctggagtctgggaggtcaaggctgccatgagccatgagtgcatcactgcagttcaacctgggcaacagggcaagactctgcctcaaaaaaaaaaaaataaacaacaacaaaaaagtcttggtgaacagctagccaccctctccccctctccatatgtattcacttccatcctggcttggctgtactgcactcttgtttctgtggagaaagcagctcagtagagtctgtttcttcactctttcggttgaagccgttttactgtggctcaaaagaattttttttctgcctgtgaaattaattatacctgttcattaaataaaatttctatagacccaagaaaacacagataaaaattaccagtgattccattgagataattgttctgagtccctgttacagttcccttcaatttcagaatttttaagcacttagaaataataaaatgtcactaattcttactctgtgctggcttgcaaacttcaaaactcttaagagggaggaaacaacagcctggccattttgccttttcctcacaaagatacacagggctattccggagctgtcccgaggctttattcttctggcattttcaaaatgacttagacatcttaatctccacttctccttagtaaacagggtaaatattggggctggtgaactcaatagtttattaggatggcaagggtaacattttaagtttatgatttattttctactcagttatcaggattcttttttctttcctttttctttttttttttttgagatggagtcttgctctatcgccaggcaggagtgcagtggcacgatctcggctcactgcaacctccacctcccaggttcaagagattctcctgcctcagtctcccaagtagctgggactacacgcacgcaccaccatgcccagctaatttttgtattagtagagacggggtttcaccatgttggccagggttgtctctatctcttgacctcatgatcagcctgc

SEQ ID NO: 12865 - DNA, 1024 bp, Homo sapiens
agatctgggttctttcttcactgatggcagaggtctgtacttttcactttggcaaagttagagccacagtctttcctttcacttctgaatccttgaccttttgcttacaggatttggatttgatacccaaaacaggactagaactgtgaaggtatggagttagaaacagatcttatttaattagtgtcctcaggttgaagttgggaatactgagccggggaaggggttatgtgagttgttcagggtcatccaactggggtggaatttaggtgtctcacttcctagtccagctctctgttcatacttttttatttatttgaaccatgacatttaaaaaataggagtaaacataaccttaagaaatcagatgagaatatgaagaatattactgctttttgtatgaacataattttcaccattcttgtttttgggaactgcttgttttgtggaacctcttgtttctgtaaattgcttaaggttttttttttttttttttggatatctggtcaggaggaagggggattagattttattaaaatatatattttctataataagtgtctttttttcttaaactttttaaaaaaagattttagagataaagtcttgctaatattgcctaggctggactcaatctcctgggctcaagcgatcctcccacctcagtctccgaagtagctgggattccaggcaggcgccaccatgcccggctaattaaaaaaaattttttttttttagagatggggtttcactatgttgcccaggcagctctcagactcctggacttaagtgatccacctgccttggcctcccaaaatgctgggattataggtgtgagccaccatgcctgggcaaacttgtgtgttttaaaaacatattttgttcttacgagtaaaatgtctctgcttttataaaaatatagtactttaattattcacattataatgctttttgtgatataaagcatttcaatcttagaggctcgtccttaaaattaattttttttttttttttaaggtggagt

SEQ ID NO: 12866 - DNA, 1045 bp, Homo sapiens
tgggtggcagagtaagactgtctcaaaaaaaaaaaaaaaaaaaagagctaggaaataacccaaggtgtactcctgccttgcccctcacttcctccccattagccttccacccactcagtaaccagcctgcacctccagtcaaatttcctactgcattctgccacaaatttttgggtagagtgcactgccttgaaattctgaagtctccatgcaattgctcgcatttcctcaatctaaaatgatgcacacagcacagaaacagatctcccgagggatagcctttagcaccagaagatcctgacagctatccctgcagatcttttcaggtggactgaggataccaggtggtggtaatggcacctgagaatccagaatttccctcatgttaagccagttatttttggccattgaattactggatacacctgagttcaaataacaaattttagtaaaaccaaatgctattataagttctaaagtatctcttaactttcttacttcagatatggaggtaccacatggttctcagagcagcgaaagttttcagtttcaaccaccattacctcctgacactcctccactcccccggggaactcctccacccgtcttcacccctccactcccaaagggcaccccgccgctgactcccagtgactcaccccagaccagaacagcatctggagctgtggatgaggacgcactgactctagaagaacttgaagaacagcagaggcggatctgggcagctcttgagcaggccgagagcgtaaacagcgactccgacgttcctgtggacacacctttaactggcaattccgttgcctcatcaccttgtccaaatgagctagacctccctgtcccggagggaaaaacatctgaaaagcagacgctggatgagcctgaggtaccagagatttttacaaagaaatcagaagctggacatgcctccagtccagactctgaggtgacatcactttgtcagaaggaaaaagcagagttggctccggtaaacactgaaggtgcccttcttgataatggcagtgtc

SEQ ID NO: 12867 - DNA, 1027 bp, Homo sapiens
gtggtggcacatgcctgtagtcctggctactagggaggctggggtgggaggattgcagaggttacagtgaggtgagatcacactagaccctgtctcaaaaaataattagttaattcatatacacctacaaacttatatagcagttactatttaaaggaataaatttgttacttgtttacatttttaatttcttttatagaatctttctagaatcttaattgaagtcttatattcatcaacagcagttttctctgattttgtgccctcagaaagggagccaaaatagattggttagagtatctaaatctaaaagtactctaacattttaaaagtttttaacaatatggatttttctgagacagtattattaattttacagaattaacttgggaaataagtttctatctataataaatctaaatatattatcactctttttcctgattattcttgccttttttcccctcaaagtaaaatttctcattttttatatgaatggtttttccatacttaactcttttccagcttccatcttaggtctcaggattcaacaatgaactattgtactgttttatttaaaaagcatattcttggccggcgcagtggcccgtgcctgtaatcccagcactttgggaagccaaggcgggtggatcacctggagctcaggagtttgagaccagcctggccaacatggcaaaatcctatctctactaaaaatataaaaattagctgagcgtggtggcaggcgcctataatcccagctactcaggaggctgaagcagaagaatcacttgaaccaaggaggtggaggttgcagtgagccgagatcgtgccattgcactttagcctgggtgatgaaagcaaaactccatctcaaaaaatataaaaataaaaagtgtatccttggtgttcttaggaactggacagtagggaaacagccaaagacttgaagttagagtctagtgagcagatagaaagttctcaatcacgcaagactgtgtaattcattacgggcggaagtgcatga

SEQ ID NO: 12868 - DNA, 1054 bp, Homo sapiens
tcattgggaagctccattgttaggagctcagcccagtgatatgtatagaagcattactggaaatgttcaagagagagggcagtgtcattaaaaaaatggaggccaggcacagtggctcaacacctgtagtcccagcactttgggaggctgaggcgggaggattgcttgaggccaggagtttaagaccagcctggacaacatagcaagaccccatctcaaaaaaaaaaattagctgtgtgtagtgacacaactactcaggagactgaggcaggaggatcattttagcccaggactttgaagttacagtgagccaagatcatgccactgcattccagcctggacaacagagcaagaccctgcctcaaaaaaaaaaaaaaaattaaagagtatatgtgaggccaggtgcagtggttcacggctgtaatcctaacattttgggaggctgagtcgggtggatcgcttaagctcaggagtttgagaccagcctgggcaacatggcaagactgcctctactaaaaatacaaaaaaatagctgggcaaaaaaatagctgaccgtgcttgtggtcccagcttctcaggaggctgaggtgggaggatcgtttgagcctggcaggtggaggttgcagtaagccaagattgcaccactgtactccagcctgggcaacagagaccctatctcaaaacaaacaaaaaagtgtatgtgtgtgtgttcggtgtatgtgtaaagagagagagaggcagacaaaaatgttaaactattaacagttgtttaggtgaaggatacattgggtattcattgtaccacttttccaacttgtctgtatggaattttttcaaaaagaactggagggataagaaaagagtaaatgggaagaaaggaaatggaaacaataactaaagggtctgcatgtcttgcaaagagaagcaatgaaatggggcattggagggaaatatgagagtcaaggttttcattttttgtttgaattctgtagagaatgcagctgatagtcatgatccaatacagaggaaaaactgatctagcagagagagggaa

SEQ ID NO: 12869 - DNA, 1082 bp, Homo sapiens
tcctgagtagctgggatcacaggtgtgcaccaccacacctggctaatttttgtatttttagtagagatggggtttcaccatgttggtcaggctggtctcaaactcctgactttgtgatccacccaccgcggcctcccaaagtgctaggattacaggcatgagccaccacgcctggccatgaattgactttttaaaagagctgggttctgtgtggaaaatagtctgtagctggttatctgtggaagctgaaaaccagttaggaagttattgtattcaactcaggtgagagaaactggtactgagactggagtgagagtggtgctgctgagaagtgcttagaacgtggatgtactggggaagtagagctgatcaaatgtgttgatgaattggacgcagaatatgagagcaaaagagtcatcggagtgactcaggtttttggcccgagtgccagtaagaatgtcgtcgtaaaaaattagccaggcgtggtggtgggcgcctgtagtcccagctactcatgaggctgaggcgggagaatggcatgaacctggaaggcagagcttgcagtgagccgagatcgcgccactgcactccagcctgggcgacagagcgagactccatctcagaaaaaaaaaaaaaaggatgtcgtcatattttctctgatggggaagactagaggaggagcaggtttggagggggctagaaatccagtgcagttttaagcaggtgagtttgagatgccactcacacgccccttgagagctgtcaagttgacacttccatatataaaattggaggttaggactgatcagaacttgaccgtaaaggagaacatatattcagggcaacttcaatctatgctcccagtgaaaaaataataattaaaaagtgataacttaggccaggcgcagtggctcatgccagtaatcccagcactttgggaggccaaggcgggcagatcacctgaggtcgagagtttgagaccagcctgaccaacatgaagaaaccccgtctctactaaaaatacaaaattagccgggtgtggtggtgcatgcctgtaatcccagctacttgagaggctgagg

SEQ ID NO: 12870 - DNA, 1149 bp, Homo sapiens
atacatatcccaaaagtatatttttgtttgtttgttttttgtttttagtatagacggggtttcaccatgttggccaggctagtctcgaaatcctgacctcaggtgatccacccgtctcagcctcccaaagtgctgggattacaggcgtgagccacactgcacccggccaaaagtataatttaatagtgtcagcctagttcacacctgtaatcccaacacttcgggaggccggggggcaggcggcaggggggatccctgaggtcaggagttcgagaccagcctgaccaatgtggtgaaaccccgtctctactgaaaatacaaaaattagctgggcgtggtggcatgtgcctctaatcccagctatttgggaggctgaggcataagaattacttaaacccaggaggcagaggttgcagtgagccgagatggcaccactgcactccagacgggacaacagagcaagactccatctcaaaaaaaaaaaatacataaaaaatagtgtcaagtgagagaatatttatctccatctgaattcattgtaatgttttatgtctgatttttagagtgaagatgaagctggatgtagctcagttgatgaagaaagttacaagactctgaagcagcaggaagaagtatttcgaaatttagatgctcagtatgaaatggcaagatcacaaacccacacacaaagaggaatgggtttgggtttcacatcttcaatgcgaggaatggatgcagtttgaaaatgatcacacttgtaaagtttgggacttatagacttcttgttctgatgtcacgtccttgttcaccaaacagctagcactctagcttgcatgggtgttgcattgactttaatttattgaaaaatacaaatttttgtaaatatcagatcagtgatactggtgttagtgttgtaatcaggttaaacccacttccattaaacttgacaggactatagaaggataatattttttagttcatgaattctacttttcaaatatataaaagctgcaggtggggataaaatctcatacatggattttttcgtgtccgctgtcttgtgtacttttgtacttaaccttgtacagttattttcatctcttgaaacatgaaagaaatgttatgtagatgttctttagaagatctggc

SEQ ID NO: 12871 - DNA, 1047 bp, Homo sapiens
gattgataaatcagggaatccttaggaagaaaagagttcctctttcaggaattcattgtgaagataatgttacttgttatttgctatatagaaagggtaaacttaacatatagcttgtttagtgtgcatactcattagtgaatttaatgtatgcacactactcattcaacagagtgagtagagagaacaagcattcatttttgggctgggcatggtggctcacgcctgtaatgccagcacttcgggaggccaaggcgggcggatcagaaggtcaggagtttgagaccaggctgaccaacattggtgaaaccccatctctactaaaaatacaaacattagctgggcatggtggtgtgtacctgtaatcccggctacacaggaggctgaggcaggagaatcgcttgaacccaggaggcggaggttgcagtgagccaaggtcgtgccattgcactccagcctgggcaacagagtgagactgtctcaaaaaaaaattcatttttgttttgggatgaatttgtgtttcatgttactagttcctttgtaaatgataaatttgttcaactgctagaagtaatttcctaattgagaaaagttttcctcccattttattagattacagagaatggcaaggtttgcttgaccttttagttttggctttttgatttttattaaattgaagactttactaaggtctgtacaatataaaaaattatccgaatgtcttgatcggctggctttttctccctcaagaaacatttagataattctataaatttatttactacttaaccatgctctaaaatttactcagctttcaatatgttacttgcaagacgtaatttttttcacttgttaattggaactgcatataaaaactatgcccatttctgactagtcaattcaaaaatgtttaaaaccactgttgtggtattcttcaaatgtagcttatatcatcttaagaatgattgctttttcttcacatacggctatcggtggagggatgctaaaaatttaaaattttatggaagttggcttgtctctgtacat

SEQ ID NO: 12872 - DNA, 1087 bp, Homo sapiens
aaattttgtgtttttgtagagacggggtttcaccatgttggccaggcaggtctcgaactcctgacctcaggtcatctgtccgcctgagcttcccaaagttctgggattacaggcatgagccacagcacccagccagacctaatttttagtggttaataactttttatttttgaaaaacatctacaaattcactgtagatgaaaatatgtaggaatgattcctgtggtatacatattgacctacaagagcacaaaatgactaatgtataaggctagcttttccaacattggatatactatgcaaaagattggaaacagccagatgcggtggggcatgcttgtagacctgtgtactctggaggctaaggcaggaggatcactggaggccagcctgggcaacatggtgagaccctgtctcttaaaaagggatgagggagttggaaacaaatgttatttccaatgagttcagctgtaacactgatgttttaaatcttttgcatctcaaactaaatgtttttgtatcgttgggatttttgtttgaactaattgatttcttattaacaaaatagttatgacttggccataatttgacatatgaaatacgatttactacagagatagaaagaagagaattgaaaagccgagaagatttagcagaagtttaagccggactccaagtccacctcccttcagaggcagaaacacagcaatggatgcacaggaagctttagctagaaggtgtgtatatttcttaattcatttgttccagttcgcctttaaataaatgctcaattgtgtggataagatgaattctttcagtaagagaatgattcacatactttagtaatatggtggcatatttgtgatctagaactatgtaaatagtttaattctcatcctaaacatttgcacaactataagattgagatgtctacaatttctgttttttccttcatgatttaactgatttcatttttctcaaatttagactcccaaatattttcagtttgcatttgaaactttttttttttgagtcttaaatctggttcaagaactattattttctcatctaagatgacttttccttt

SEQ ID NO: 12873 - DNA, 1207 bp, Homo sapiens
caagatgaaaagtgattgcttcacagtttagacattgggaggaaaatcaagagctgtcttttagaggatgtagcaggcagtataactgtaaaagggacactgcatctctgtgtaaaataatttgaaattatagaaaatattagtacttagtaataattatatttagctacctaattgaaatgcgtttctggtgcactttttgtgtcattatctccattacttacttaaacttaacattatgtaatctggatttagaagttgatgtatatacatggtctgtattcttttagataaacataagggattcctcttttgtctggcataatggcttttcaatatttcaactttaaaaatcattgtttctgttgtattgaaaatattttggggaggaactacattttgggtgtttatagtaaaaaaaatagtaattacatctgcaacatttgggtgatgtgaaactagatcttttttttatttgccacacactcctaaggttactaatgttgcatcacaacatttttgtctactgatacccatactaactctctttgttgcactattttcctgaaagaaccaacttcttcttaaaacagggaagaagacatgaatccaaagataaatcctctaagaaacataagtctgaggaacataatgacaaagaacattcttctgataaaggaagagagcgactaaattcatctgaaaatggtgaggacaggcacaaacgcaaagaaagaaagtcatcaagaggcagaagtcactcaagatctaggtctcgtgaaaggtaagtcatgttgtattataatgtagtaccttctaacaagttacataaagtttctcattgacccagcaacacccaaaaaaatcataattagggagtttttcttgttcgtttgtttgggtttgtggttttgtttgttttttgcctttgggctttgctttctcatcatgcaaaaatggtttccaagaatggggtgtaagggatgactaaatctcaagtgcctagatttcttttcccttttttttttttgacacggagtcttgctgtgttgcccaggctggagtgcagtggcatgatctcggctcactgcaacctctgcctcctgggttcaagtgattctcctttctcagcctcccaagtagctgggattacaggcatgtgctaccatgcctggctagtttttgtatttttagtagagatgaggtt

SEQ ID NO: 12874 - DNA, 1050 bp, Homo sapiens
ctctctacctttactttttgaaagtatcttctataaaaggtttttttaaaaaaggtataaataggaatgaaccttagatgattgttgttataacatgaaaatagagaaatagtaaactagtaaatttccatttgatcctctgctggagtgtagtggtgtgattacagcccactgcggtcttgccttccctggctcaagcaagcctccttcctcagcctcccagtagttgggaccacaggtgcatgctgccatggctggctcattttttattttttgtagagatggggtcttactttattgctcaggctgttctccaaccaactcctgggcttaaacaatctgcctgcctgggcctcccagagtgctgggtttacagccatgagccaccatacctggcataatttatttttagagatagggtctcaccatgttgcctagactggccttgaactcctaggctcaagtgatcctcttgcttcagcctcccaagtaactggggctacaggcgtgagccactgcacagtagttaagatcgcagctctggagggagttactagcagttgtaactttgacagctcgtttaaccttcctaagattgtgtttcctgtctcttgagtaaaatgaggacaaatttgtctcactgtcacagaggatagaatggagacagtggaactaagagaaggtggcacatgctagctatgctcaacaaatgtcagcaaattttgttgaaatgtggaagatactgacaagagcaaagttttcagatcagcaccagtaacttgtcttacttaaaccgttaaaatcacatctgttttgatttttcccctttttctcttttgagccttttattggaagagcagatgcagtctgtgcgggtatgcagtgctgcagtacgaagtgaatggcaccccctggagttgggcagtgcacaacgctcagtgccttacgtaggaggatgggcttgactgagactctgagccagactccctgtgatgatggtgtctcccccgagcctggcacacagaggtgcttcccaagtatttcttgtat

SEQ ID NO: 12875 - DNA, 1035 bp, Homo sapiens
tcggcctcccaaagtgctaggattacaggcatgagccaccgcgcccggcccaacattcatgttttttttgtgggagtttgctttcgcctctcttgggtagatgcctgggagtggaattgctgggtcccatgagaactctgtgctcaacgttttgaggaactgccagactgtcttccacagcggctgcaccattttgcattcccaccagcaatccatgagggttgcaatttccccacatcctcaccaacacttgttattttctggttttgtttttgtttttaattatcaccatccagggccgggaacagtggctcacatctgtaatcccagcactttgggaggctgaggcaggcagatcgcttgagcccacgagttcaagaccagcctgggcaacgtggtgaaacctcatctctactaaaaaatccaaaaactgctagccgggcatggtggcacacacctgtggtctcagctgttcatgaggctgaagtgggaggattgcttgaactcggaaggtggaggttgtggtgagctggtatcatgccactgcactccagcctgggtgacagagtgagactctgtctcaaaaacaaacaatataaaattgtcaccatcctggtgggtgtggagagttatgacttttaaagctgacttttttctgttacaattaatttagcaaatgtcactgtcctccttctgtcccacacagtgtgctgggtaaaccaggagaaagtaattgcagtcgagggctttgggaacagcacagttggccagagagacagatgaggaaaacaagcagggatgagagagaatgaagaggagcacggcaccccagggctggcttagtcctggcgccaggacttagtttactctgtcattgtttctttcccacattagagtttgtcttcatcactgctgtattccccagtgcctagaacagtggctgacacatagtatgtgctcagtaaacagccattaaagaaatgtttgagctgagcatagaggcccatgtctgtaattccagctactcgggaggct

SEQ ID NO: 12876 - DNA, 1059 bp, Homo sapiens
tgggggtggtgcgggcccgctgtgatgccatcgcgggcccgctgtgatgccatcatgggcaggctgctgtcccctctggccaccccacggcactgcttctgcttccgagctagggccgtgagccaggtttgacctcaccctcctcctgcttcctgaatgggcgggtgcccccgagccctaagggacagacaggctgggttcagacaggcagggctgtgaccctgtgacaggtacaggcaaccccctcacagtcacccaggcccacgtggggtacttctagagcaggggcttggatgcatgacggcctccaggtggtgccgggtaagtcattgtcgcagctccattggagcctttggtgttggtgacctgagaccagggtagcaaaggaagccatctcccacccagcccccggtgaggccactccccacagtcttctccagccacacaggtaggacctcttcccgaagttcctggtcacgagcctccccaccgtcctcactgagatgagaaagtaaatctattctttagagtctgagccatttctggcacgctgctccccaccccttgcttccggccttcccaccagcccctgggatggagcaagaaaccctggagctccccctcagcccccacctctgtgtgcactgcaggccctgccttttagttcagctaagggaggcctcaggaaggctctgtttgggttttccaccccatgcctgaatgtgttgtgtgtagccagcgagtcatctccacaaaccacacacaccgcccatggccaaacatgactcaggcaccctgcatgcttcctgcggctggggcgtgacacatggtcatgggacatgccagtgcatgctcctgtcctggactctcaggcagccttcctggctggcttgagaatcagcatagtgactcctgcaaagtgtgaacagctccacccaggggcctcttccaggactctggtgaacagcagcctgatggccgcacacttgggaccacttttcagctctgcctgtggtgacatgcacatggtgtgggcagatttcacaacccatggcccct

SEQ ID NO: 12877 - DNA, 1107 bp, Homo sapiens
acaaaaattagccaggtgcaatggcaggtgtctgtaatcccagctactcgggaggctgaggcaggacaatcacttgaacccaggtggcagaggttacagcgagctgaaatcgtgccaatacactccagcctgggcgacggagtgcgactccatctcaaaatatatatatacatatataaaatttagccgggtgtgatggcggtcacctgtaatctcagctacttgggaggctgaggcatgagaatcacttgaacccaggaagtggaggttgcagtgagctgagatcatgccactgcactccagcctgggtaacagactgagactccatctcaaaaaaaaaaaaaaatgtatgtggtaagagcactccaggcagaaggactagcccatgcaaaggtcctgaggcaggaaggtgcccagttgttcaagagcagacaccagttagctggagcagagggagtgagatggggcggggagaagacaaaggtctctgctagcggctcaatcatgcaggtccttgtgggctattgtaaagactttggcttttaccatctcactggatgagaagggggatttggactgttttgagccaaggagcaacaagatctgaagttagttccaacaggatcctgccttctactgtgtggacaggctgatgtgagcaaagttgagagcaggctactgagatagtcccagtgaggttaatgacttggaccagggttggggcagtagaggcagtgaaagtggtcaggttctggaaatggtctgagtatttgctggtgcattggagagtttcacgtaattcttgtgcagattcagcaagagagtttgccggcatgctttgcacagcccctggtacccagtaaggcgattattagcattggtgcttgctggaatcagatattccagaatattctgtcacagctcatcgttgccctcttcttttctgtgggtaaactgaggcagaaactcaggctgggtggaactctgcagcctcagctggagacctcgtctggccaaggactgtggggacacaggccctctaggctgccacctcatggtcccagcagagggcaccagaactgcacagaaagtctcactacccaagtg

SEQ ID NO: 12878 - DNA, 2046 bp, Homo sapiens
ttcactcggcgcatccttcctgctctggtggctgctgtccaccgtgcggccaggcacccaggccctggagccaggggcggccaccgaggctgagggcttccctgggagcggccggccaccgcccgagcaggcgtctggggccacgctgcagaagctgctctcctacaccaagcccgacgtggccttcctcgtggccgcctccttcttcctcatcgtggcagctctgggtaagtaaggacctcggggacatgtggccaccagaacatcaaattaggtggatatgactgccttagattttaaaagattttacttacgtggttcagacatcaaattgatatgaaaaggaaaagaggccaggcatagtggctcatatctataatcccagcactttgggaggctgaggtaggaagatcacttgagcccaggagttgaaaaccagcctgggcaacatagcgagaacccatttctattttatttatttatttatttattgtatttatttattttttcgaaacatagtattgctctgtcacctaggctagagtgcagtggcacaatctcaggtcactgcaacctctgcctcccagcttcaagtgattctcctgcctcagcctctcaagtagctgggactacaggcatatgccaccacacccaactaatttttgtatttttagtagaaacaggttttcgccatgttggccaggctggtcttgaactcctgacctcaggtgatccactggcctcggcctcccaaagtgctgggattacaggcgtgagccacggtgcctgccccatttctattttatgtaatttaaaacgaaaaaataggccaggcgcggtggctcacgcctgtaatcccagcactttgggaggccaaggtgggaagattgcctgagcccaggagttcaagaccagcctgggcaatatgacaagaccccatctcaatttaaaaaaggaaaaagtaaaagacaagagaagaaaaaggaaactatgagttccactcctgtttttttctttttttagacagggtctcactctgttgcccaggctgtagtgcagtggcatgatcacagcttacggcagcttcaacctcccaggctcaagtaatccccccacctcagtcttccaaatagctgggactacaggggcgtgcaccacacccagctaattaaaaaaagaaaaatttgtaaagataggatctcactatgttgtccaggctgatctcgaactcctgggctcaagtgatcctcccaccttggcctctcaaagcactgggattacaggcgcaagccacaatgcctggctgtgtttcacttctaattctaccctgatcattctgcccagggctaactgcaggaaaaggacccagaaactcccaggtggccaggaaagcattctttcttactcaattcttgtgcatgttcccagcttttccttatgcagctacaagcacatcaaaagaacatgcatcactcccccacctctcacccacattgttttatgttttgctcttttcacttaacaatatgttctggaatttttccaaccagtacctcattgttttatttggcttcataatattccattgtgcggctataccatagattatttagttggtctcccatcatttgactcttgggttattttgagccttttcctcttaacatgaattttttttttttttttttttttgagatggagtcttgctctgtcacccaggctggaatgcagtggtgcgatcttggctcaccgcaacctccatctcctgggttcaagcgattctcctgcctcagccacccaagcagctgggattacaggcgcctgccaccacgtctggctaatttttgtatttttagtagagacagggtttcaccatgttggccaggctagtctcaaactcctgagttcaagcgatctgcctgccttggcctcccaaggtgctgggattacaggcatgagccactgcgcccgacctgcacgtcaataattctgttcatacacatttcatatgaatgtggatggatctgtagaataaattcctggagc

SEQ ID NO: 12879 - DNA, 1038 bp, Homo sapiens
actttcatcactccagaaggagaccctacacccattggcagtcactccccattcttccctctcccagccccctggcaacaactcatctactttctgtttctattgatttacctgttctgaacatttcatatttatattaaatggaatcatataatgtatggccttttgtgtctggtttctttcacataacatagtgttttcaaggttcaaccatgttgtatcatggatcagtacttcattcctttttttgtggtaaaatatacataatataacatttaccattttaaacatttttatttttgaaacagggtctctctctgttgcttgtgcagtgacaccaacacagcttactgcagcctcgaactcctgggctcaagtgatcctcttgcctcagcctcccgagtagctgggactacaggcacgcaccaccatgtctggataatttttgtatttttttgcagagatggggttttgccatgttgcccaggctggtcttgaactcctgagctcaagcgatccacccacctcagcctcccaaagtgttgggattacaggcgtgaaccattgcaccggccgtcttttctttttaagactgactaatggttcattgtaggcatacaccacattttctttcttcattcatccattgatagacgtttagatgtttctgggctagtgaaattttgactttggtttgcctctggatgaggaacaacaaaagacaactgaactaggagggtttagggacccagagacatcagttgtcccatttccaaggtaagtgaccactgacagttgcatctttcttttgttttgctttcttcttcttcttctttttttttttttttgagacagaatctcgctctgtcacccaggctggagtacagtggtgtgatcttggctcactgcagcctccatctcccgggttcaagtgattctcctgcctcagcctcctgagtagctggcactacagacacgcaccaccacgtcccgctaatttttgtatttttagtagagatggggtttcactttgttggc

SEQ ID NO: 12880 - DNA, 1054 bp, Homo sapiens
ccttagtgtcctaaattgttaggagatccaaacatctttccattctgaggtagactcatcatactaggtaatgacttccaagcttgtattacaaatctgacagtctacattttcaatttgcttaaagtctttcaaaaatctttttatggtgcttattttgatatcattaatttgtttcattattgataacaccatttaattttgtttcgtatctttaagtctaatactagtaatgagatgaagctaccgtcactgaaggatatttattataaaaaacaaagggaaaacaagcagttacctgagaggaatctcacttctgcttccaacccaaatcatccaccagaggtaaagttgtccacattctgccgagtgaacgtgaacaatgcttcctgactctaacttttacctcaagcttcattttccctaggagatctaaagcctactcacttcaaaacaagcaaaacaaagccgagttctgagggtaagacttcgttgttgtctggtttccaggtcctgactctagatcctacgttacacatgaagccaaagcagcagatttcagggattcaacctcacggccttccgaatgcccttgatgacagaatatccttttccccggactctgttctagagcctagtatgtctagtccctctgacatagactcattttcacaagcaagtaatgtcacttctcagttacctggatttccaaaatatccctcacacacaaaagcttctccggtggactcttggaaaaatcagacattccaaaacgaaagtaggaccagttccacgtttccgtcagtatataccattactagtaatgatatctcggtcaacactgtagatgaagaaaacactgtcatggttgcttcggcctcagtcagtcagtcccagcttccaggtacagccaacagtgtcccagaatgcatttcattgacttccttggaagatcctgtgatattgtctaagtatgtatttcagtgaatggcttgtaatgttaatagattttctgtgatatctgattgaaaatgatctttattgaacttcagta

SEQ ID NO: 12881 - DNA, 1086 bp, Homo sapiens
agtgttgggattacaggcgtgagccaccacagtatattttaaaggtttagatttaacaaattaatgcctttaatgcacacactcacaaggttttaaaaatacatattcatggtgctctgcagcctacgtagggtctagaaatgggacacaaatttaaagctacatgattaatgtgttctttcagtgttttcagtgtatctattgttgaatctgtaatctcatttgtgacagtgttcacagtttaaatttgaggcccaaggttaattggttctcctctcacaccctataatacgtcccaccttgaaataatttaagcccaaagttttagtgtttagagcctagacctctctgcaacatttttagtgtagtgaggtcctgatttcaatttttcgaaattagggtcctatcttctgttttttgagacagagttttgctctgtcgcccaggctagagtgaaggagtacagtggcatgatcccaactcactgcaacctctgcctcctgggttcaagtgatcgtcccacttcagtctcctgcgttgctgggattacaggcctgcgccaccactcccagctaatttttgtatttttagtagagacagggtttcaccatattagccaggctggtctcgaactcccgacctcaggcgatccgcctgccttggcctcccaaagcgctgggattacaggtgtaagccaccgtgtccagcctagggtcatatcttcttattttactaatgaataaagggacttattttcacttgatcttagccaaaaggctgagaagtgatgggtgggggggacttattttcattgggtcactttgtgacacctagttttgtttggccaactcttttaacaaacatgattgtaactacatagataaggaactccagctcttggtgctttttcttcagccatatgaaattaatttggccgaaagttttctcatccttctatcattcattctgaagtatcttgttttctttttttttttttttgagacggagtttcgctcttgttgcgcaggctaaagtgcaatggcgcaatctcggctcaccacaacctccgccttccaggttcaagcg

SEQ ID NO: 12882 - DNA, 1053 bp, Homo sapiens
ttctcatctcttctcttctcttctcctctcctctcctctcttctcttctcctcttcctctctttctctctttctttcttcacggtctcactctgttgccgaggctggagtatagcagcttcatcatagataactgcagactcaacctcctgggctcaggcgatcctcttgcctcagcctcctgagtagctgggactacagtcatgtgcaaccacacctggctcattttttttttgtttgtttgtttttagtagaggcaaggtctctctatgttgcccaagctggtctctcaaactcctggactcaagcaatcctcctgcctcagcctcccaaagtgctgggattacaaatgtgaaccactatgcctggccatttctctctcttcaccttggtgttagtttctgtgttttcccacgttatcttcctctagcccaccaagagcatcagcgattctgcatttctttaaaaagaatagaaaggcctttctgctttttacctgtcttagtagcatgtaggactagcccgctttggactcccatgtggagtatgttgctaaacgtgtctgattcaccgttctcttaaatattggtcctcaggagcttcattgtagtgtgtaggtttgtcttccaagctgctgatacctatttggccaattttgagctcatgagcagggaatgacagtctgtcacaaccacaacttggcccaaagcaatagcaattataaaatgccattaattacaagaggcatccctactttagagatgttaacatgacaagaacataaaagtggtgaaaagtggtacttttctattcccatgagctttgagtagaataaccccaactattcccccagaccaccaggctgtggccatagctggagtaatgctactcttcacaggcttcaggtcttgaaaaggcttctttaggttattggcatgtaaagaatgaattctacagcaggattatgggaattgtggtacttttttttttttgaggcagagtctcgctctgtttcacaggctggaatgcagtggtgcgatctcagctcactgca

SEQ ID NO: 12883 - DNA, 1033 bp, Homo sapiens
ttctattctgtgtgtttgtgcacatcaggattgacttactggaaactagaggaaaaggatatgcaccactctttgcctgaaactttagagaagacgttcatatcattgtcttccacagatgtgtcaccaaaccaggtaatttaaaaacacacggtggccgggcgcggtggcttacgcctgtaatcccagcgctttgggaggccgaggtgggcggatcatgaggtcaggagatcaagaccatcctggctaacacggtgaaaccccgtctctactaaaaatacaaaaaattagctgggcgtggtggcgggcgcctgtagtcccagctactcgggaggctgaggcaagagaatggtgtgaactcaggaggcagagcttatagtgaggggagattgcgccactgcactccagcctgggtgacagagcaagactccatctcaaaaaaaaaaaaaaaaacaacaaaacaaaacacacacaccgtggactgggcgtggtggcctgtaatcctgtaatctcggcactttgggaagctgaagtgggcagaccatctgaggtaaggagttcgagaccagcctggctaacatggtgaaaccccgtttctactaaaaatacaaaaaaattaaccagacttggtggcgtgtgcctgttcatcccagctatttgggaggctgaggcaggagaatcacttgaacctgggaggtggaggttgcactgaaccgagattgtgccattgcactccagcttgggcaacgagagtgcaactccatctcaaagaaaaaaaaaactgtgtgtgtttgtgttttacaattgttgctaagtactccagtataaattttatttttcaacttctaaaatactggaaaaagcatgggctttagaatcatactcacttgttttcaaattcagtctgtcatttttgccttatgtaatcttagcaatgcttcttaaaagtggaattaaaggctgggtgctgtggctcaagcctgtaatcccagcactttggtaggccaaggtgggcagatcacctgaggttggg

SEQ ID NO: 12884 - DNA, 1013 bp, Homo sapiens
cctcagactcctgagtagctggaattacagatgcgcaccaccgtgtctggctaatttttagtagagtcagagtttcaccgtgttggccaagctggtcttgagctcctgaccttgtgatctgcccacctcggcctcccaaagtgctgggattacaggcgtgagccactgtgcctggccaccagcctcaattttgtttataaactaaagataaagtatcacattatctttagaataatatctcatcatattttgaaacatgatattcttgtaacagtcataaaaatatgatgtttaatatactttcttacccaaatctataactttttatttccagcatatacaggaggagataaaaaatttagtcaaattacagactagtagtgcttccttagcttcctgtgaaggaaattcttcaaacaaacaagtatcttcggaaagtcaaatgggttttttttctctaagcagtgagagaaatgaatctgttatccattatcctgaatccacagaacctgaaatacagcaagaaatgtccacgtcacaaccagactgcaatgtggatagttgctcagtaagcagtggatatggcaccttttgtatctcagaattaaatctgtacaaatctaaagaccctaaggagttcatggagcacatagatgttcccaaaggacagtatgtagcacctgcggtgccggctgagtcacttgtagatggtgtgaaaaatgagaatttttatatacagactcctgaagagtgtcatgtgtctttaaaggaagatgtatccatttctcctggtgaatttgaacataattttcttggtgaaaataaggtttctgaagtatacagtgggaaaacaaataggtaagtagaatttctatcatttgaagggagtttattacatttagaatctagtgttccttttaatgcactataatagaatgagatgtatttgaacatttatcagttcattgcctgtagaaaattgaaataaacaaagcacactatattctaatgac

SEQ ID NO: 12885 - DNA, 1031 bp, Homo sapiens
gatgtctctctttggttggagctgcgcgagggggaacggcgaggtggacgcgcgcgccatgcgaggctgtctccgcctccttccgggcagccaatcactggagagacgccgggcgcgcgcgcgctccctcgggtaacggtcgcgagaggccgcttgcatgaccctgacatcggcagcgggagcggcggccaggtaagcggccaccagcctgcagggagctgtaggccgctggggacaggagacgagacttaggagacactgtcttagcggccccttgagtgtggtgatgggctggggtgtggggtgacggctgccgattggcctgaccccctcggagcccttcggcgtgtgggagctctgcccggccgcggtgcgccttttctagactcggcgcccttgagtgacactcgcgcggcccaatcgcagatcgctcttcctgaggggcggggggtttgtggggtttttttaatttttccccccattttttgccaaggtgccccggtttccttttggaatcgcggttgtagttgcaggagcggtggcttttctccgtcctccctgctttccgtagcttaggcgactgcatagattctccctctccttcccactttgacccgatagccgccaccagccattgcgggctgactgtgagctcagaatgtcgggatctggcctcatccccatctgaaatctcttcctctcccccaagcctcccgtcaaggcggagcgcccagttaactttcatgtttcataaccatcaatcgttccttttccccagctccctttttttgctagggggtagggacaccaaaagcgtcatatcttgttgctgggaaatataaaagctctgctcttatattcattctgtatcaagttaaaaaaatttttttttgcattgtatttgtgggtgtttaaggatttttccctcttacttccctgccctccccccagcacctccaccccaaatggagaagcatctttgaatttctagtggttttccatctggatctgcatccggatccggattacct

SEQ ID NO: 12886 - DNA, 1031 bp, Homo sapiens
agaatgggctttgctggctggtcctgtgcacttgctgacctcaggtctctgcctctgtttcaggcatcattcacgctagaggactggttcgggagtgcttggcagaaacggaacggaatgccagatcctagctgccttgttggttttgaaggatttccatctttttacaagatgagaagttacagttcatctcccctgttcagatgaaacccttgttttcaaaatggttacagtttcgtttttcctcccatggttcacttggctctgaacctacagtctcaaagattgagaaaagattttgcagttaattaggatttgcattttaagtagttaggaactgcccaggttttttttgttttttaagcattgatttaaaagatgcacggaaagttatcttacagcaaactgtagtttgcctccaagacaccattgtctccctttaatcttctcttttgtatacatttgttacccatggtgttctttgttccttttcataagctaataccactgtagggattttgttttgaacgcatattgacagcacgctttacttagtagccggttcccatttgccatacaatgtaggttctgcttaatgtaacttcttttttgcttaagcatttgcatgactattagtgcttcaaagtcaatttttaaaaatgcacaagttataaatacagaagaaagagcaacccaccaaacctaacaaggacccccgaacactttcatactaagactgtaagtagatctcagttctgcgtttattgtaagttgataaaaacatctggaagaaaatgactaaaactgtttgcatctttgtatgtatttattacttgatgtaataaagcttattttcattaacaatttgtattaaaatgtgggttccttgaattcttacgtgctgttttatttttttgagacagggtcttgttttgccacccaggctggagtgcagtaatataatcttggctcaccgcagcctcaacctcctgggctcaagcaatcctcccatctcagcctccctagtggct

SEQ ID NO: 12887 - DNA, 1005 bp, Homo sapiens
ttttgtgctgtatttatatatatgtacataaatgtatatatagagaaatgttgagttcttctggattctgaatgtaaataattcttgtaaattgggactctgcccacctgtttctcccttttccctcttcccttcagctctatttattcttttcttgactttcccatatggggcatcttatgacttttttttttttttttttttaagaaaagtatggaaaacttttcatttagaaaagtatttgttcctgtattttagaattcagttttgcatctttgctgtagaattcctgttttgtgttaatgttttttactatgtcttattgtgttgtgtgcaatgcattgtactggggggatgcacttgagtgccatttctgatactgtcattgtatgactgctgatgctcgtttatgttgttctttggaagctatagtgagcctgatgttttcacattttaaaaaatgcttcctgagacttctttaagctcctctaacttcttcagtgcatttgggatcaaacttagctcttagatcagcaaacctgacttgcttctacttttgcaatttttcaggccttaccatatttcttatctctgtcttcccacctgataggaaaatcttgcagatttgaaacagtggtttctggcctgctgctgcagcaaattccctatgtttatttaagaagtcgggcctatgcttttaacctacaaatgatgagtaatttacttgcaatgaacacaggtagcctgctgctgtttataacctgttgaggatatttatagcaggcaggaggcaggcctagtgtgttattgacaggtgactttagagaatgtacattggccgggtgcggtggctcacgcctgtaatcccagcactttgggaggccgaggcgggcggatcatgaggtcaggagattgagaccatctcctggctaacacggtgaaaccccgtctctactaaaaatacaaaaaaaaaaaaaacttagccaggcgtggtggcgggtgcct

SEQ ID NO: 12888 - DNA, 1694 bp, Homo sapiens
attacactaaacacatgcatatgcttgggtatttgtgggaaatgctgtggaagaatcagactacatctcaatggccatttcatttattaggtagtcgtttaatttttgtgtgaacttcttgtccattacgcttaatattatgcctcatttggaatctgctgtgaagctgtacagtgtggtttcttctggacacaacttgataaattcttgttactaattacaggtttgatcattccggcaaattgtgtgtctcctcttgtaaatctcctatcaacttcagaccagtctcaacagcttgcggtccaacagaaacagctatggcaacagcatcaccctcagagcatcaccaacttgagcaacgcatgaagaacagacaggtttcaacatggatggatctgaaatgctgttgaagcatatcatttgcataaaaatcagggacagtttccaaagaattatatatttttttcagttgtgctctctagttagtttttttgggagtaaggacaaacctggaatagatagcaaaactgaaaatcagcagtgctgatggtggtacatatgtctttcctttagcttctcccctgataattcccatctgcttttacttcgggtgagcagagggggatgtgtgtgtgcgtgtgtgtcagtctgtttgtgagtgtgttaaaggctacagaccacagttggtttaaaatgcttggaacttcccaaactggctttactttatgtttatacagtgctcagggttaacgcagtacatccatgccattgctgtgggaggtatccccggatgcatgtgttttgagtctataaatatagaaaatatatattggtttctttttccaacttaataggtttattaaagcatgaaatgaaaggttgcatatcatgcattcaggttattttctaatttttgttctgacagtgcatgtctttggaagcatgctgaaacaagattaacacaggagtcgagtaacagagagaaacatttgttagatgtacagcattggttattgcatttttatagtgtttatacctgggtattgcttcaaaccctgcagacccctccttccccttctccctgccctgggtttctggtcaaggtaatgaatacatacatttttctgtgataaaactcttaaaagttaattttaatgtattaatagtattcctaatgtgtgctgcagaaatggctatgagcctcttaaatttacatttgcaacttaaaggtagttttagaaggaagtacaaattggctttcatcttgcaaacaatcgttttttacttcattatcttaatttgctttgtcactcataaaaaggaaaccatacctgagttgtagacaatgaggaaacacttgaggcttctgctgtgtgttcttttgttattgttgttattgttgttactcagtaacttgaatattgtttaatgtgttgtaagacgtagagtttatctcaagctgttaaaaatggtaatgtacaaatgtgaatagacacttatctatataatatgggtaagttttgtttcgcctataatagatgtttataaaaacaagtgaggggacagttggtctttttatcttttctttctttttctttcttttctttttttctttttttttttttttttttttttttttgcttccacaggttgcactattgaaaaatcgagattgtataaacctggtaaaaagc

SEQ ID NO: 12889 - DNA, 1082 bp, Homo sapiens
ttcaacatttttgctttctgctgccatagcagctttgatgtttacagaacactttatcatgtgatctctcactttgcccttcaaaaccctgtgacatcgggaaaggcagtactgacggagtagacaagtgcagaggactggggccatccaaggccttatcttggaggggcttgaattctattgttaacttgaaaggagagtaacatttctttttccattttactgagaaatgtttaaaaacatacagcagagcttaaagaattttctctgaagacccctaatgcctactgcctggattccactgttaacattttattacacttggtttttcttacctctctgaggctgcttgactgggattccaggtacaggaaataaaagaagcaaaatgatctgtgttggacatttgtgcattaaagctaattccacgtagttttctgaagataactttggtctttaaccttcatctttagccagaattaaggtccaataactgcctcttgggtgtgactgtgttagtcttttaaacaagcattttcggtcctttttgaagttaccgtgtacttacttagtgttatagtctcaaatgattatgtttgctgacgtgatggtacagaaacatgtcttaaagtgtgtattataaaatctttatattttgtcattttctttaaacagataaggaacaacaagaaaactgccatcttagttaaagaagtgaatcctaaaaagaaacttttcttagtttatcgaccaaatactgggaagcagctcaaattagaaatttatgctgatctaaaaaagaaatataagaaggtattttttcatttgtacattatattatataggaatacttactttgggccaggcaatgtggctcacacctgtaatctcagcactttgggaggccgaggtgggcagatcacctgaggtcaggagttcgagaccagcctgaccaacatggagaaaccccgtctctactaaaaatgcaaaatattatcccaggatggtgatgcatacctgtaattccagccacttgggaggccgaggtaggagaatcacttgaacccgggaggcggaggttg

SEQ ID NO: 12890 - DNA, 1030 bp, Homo sapiens
gtagtcccaggtacttgggaggctgaggtgggaggatcacatgagccagggaagtcgaggctgcagtgagctatgattgtgccactgcactccagcctgggcaacagtgaggccctgtctccaaaaataaaaaggttttataaattgattttctattgattttctaagtattccatgtctataaacctgtaattattaggcctcttctcaaatctgatacacagtcaaattgtgactatgccagaggttctgcttttactctgttgtcctgaatatgttttgaaacttgtgcacttgaaggcagtcttgacttagtacttttgtatccaatttcttcttcagaataaatgtttataaccttattttttatgggagtccaaaaggttagtgctggtttgtgaattctgtttgttttttgacttaacctaaatacttttcctctgcacttttcatttgaattaattcatgaactaaatgtgatgtactggatcttaagaaacattgaatttgggctgactctcttgtttgtggcggagggtaggtgaagaaataactcgagaagccaaaaaagcacgaaaagtaggtggccttactggtagcagttctgacgacagtggaagtgaatctgatgcctctgataatgaagaaagtgactatgagagctctaaaaacatgagttctggagatgatgacgatttcaacccatttttagatgagtctaatgaggatgatgaaaatggtaagttcagtatattaaatatacacgaaagcatataatatttcagtatatttgaaaatgggatatgaaaccttttcttctgtacagtacaaatgatcacacagattataatctttgcttggtggaaagctccaggcttatctaccttctggaagtttgagcctcatatatgtgagaagataacctcaattttgtgcagttatttttaacttgaaaacatggatttgtaccccatggtgtatggatgaaccaatgtaggtggtgataagttatcagttaacaatataaaaa

SEQ ID NO: 12891 - DNA, 1026 bp, Homo sapiens
ttgaacagtaaaaattgtccatatggtgtataacatgttttggtatatacaagtatacattgtggaatggctaagtcaaattgtgattcctatgagtgagttctaagctggtcaccgataatgttatttataaccgttgctctctttcttacatgaacatcaaaaagtttctcagtaaaatttttttgtacttaaatgctcattgttaggaaaacatttcagaaagctctcatgaactgaataatagtttgcagtgaatatgcatttcattgattaatggcatctctacacttttgaatattattagatagggcttggtgtatagctcatggactgatggatcctgtggcctgcaggggctctgtggtctgtagttttggaagtcactggattaaaacaatgtacttctgtttcaaatgtaaataaatcatttccagtatttattttaaagagatgacattttgatagtctccagagttctattaatctgggtcaagattatctgtagccagtgggccaagaccctattttagtcttaacgaagtattttatggattgaaaatgttaaaagcattgatttagagctctaggtacttgttcgtattatgcagtaggataatttgtaaaagtatggtcaaatgtgtctatattagaaaaattagttaacttggtcttttttttgaatcaaaagtcatcaggcaaacaactttatttgaaatctatattgggacatttctcctgttaactctgtcattcatttccttcatgttatttatatcttgctgtctaatactttattccccctccaattttaatctcaatctggcgtttattttgaaataaaataatgaaacatcgtagtttaccaacatcaactttatctactcattggaaagaaaacttcgtggattttgggagtttgaactatctagtttctaatcttctaccacttcctgcgtgagtgaacttcggtagatgatttaagttttctgaccctcagtttcagctcttaaattatattaccta

SEQ ID NO: 12892 - DNA, 1089 bp, Homo sapiens
cagactattattgttttacaaaactgaggcacagaacagttaagtaatttacctaaggacttcacggcaagttaagaggtgaagtcaggatcttaattcagagatgctagtcctaaatactccatcctaaaatacagacatttgaccttacttgtactaacatttgatgagtgactgcagtgactgatgctaggctctggggctatggagataacgtagacaaggtccctgccctcaagaagctcacatctagtgggagaggtcagacacacagtcctagaaccagaatacaagtatacaaaccaggccaggcgcggtggctcacacctgtaatcccaacactttgggaggtcgaggcaggcagatcgcttgaggccaggagtttgggaccagcctgggcaaactggtgaaaccctgtctctactaaaaatacaaaattagctggacctgctggcacacgcttgtaatccagctactcggaggctgaggcacaagaatcacttgaacccgggtggcagaggttgcagtgagccaagatcgtgccactgcactccagctggggcaacagagcaagactgtctcaaaaacaaacaaacaaacaccaagtatacaaaccaaggctgggcgcagtggctcacgcctgtaatcccaacactttgggaggccaaggcaggtggatcaggaagtcaagagattgagaccatcctggccaacataccccgtgtctactaaaaatacaaaaattagctgggcacggtggcacgtgcctgtagtcccagctactcgggaggctaaggcaagagaattgcttgaacccgggaggcagaggttgcattgagctgagatcacgctgctgcattctagcctggcaacagagcgagacgacttcgtctcaaaaaaaaaaaaaaaaaagtatacaaaccaagaagtaagccaggaaagaacaggaacagagtcactgaaattcacatggaagtatgaagtttccctgtagcttccctggtaactttcttcttcttcttcttcttcttaattattattattatttgcctcataccttctctgacccctggtaatttatttcaccta

SEQ ID NO: 12893 - DNA, 1029 bp, Homo sapiens
gggctggcgcagggaatgacagtttctgaggcggttctgagcgtccttccatccttcattcctcctgcacctacctggtctgctgggtctcttccgtccttcctccagggagtattagccatgcggtctgctcagggcggctcttcagctctgcttcccactgttaactggtttttcccacccctcctcctgcagcaattcacagtcgccaaggagtgttcaggggcttcggcagcttagagtacttgaactaaagtatcttccatcctgtcagggacccagagctgggataattatccccatttctcagatgagggaactgaggcccagagaagcccactgacatttagatcaaactgctgggaaggctgtcttcagatttgaacccattccttttctgctcccacccccgccaccattttcccgctcccctccccgagtctctggtggtggccccttgtctgcacagtgcatcatgagtcacaggcgtcagacttcacatttctagactgaaccggacaagggaactgttttgctgccagtcaaaacagtgtgcccggaagatgttccaagaatagtttgtgattgagcagctgctgtccagagaggccaggctggcactgcccaggaaggtcacgagggagtgctggagtgacttcagcctcgtccccagtgaacaccaggcaccagtgcccccttttgcgtggtccctgtctctcagtcatggtcccatggacgcacacacagttgccttttgcagggcgggggctaggggctgatcaggagataagaagacaggtgggtatagaggggggaccggggaagcaggggatgagaactggcctcgaggactggaaaggttggctttggagtgggtggccacccaggtgtccaggggtagcaatgacagtgcattctatccctgtcctcccacccaccacccccctcgctccagcccaggaatagcttcttcacagccgcccattacactgcctgaaatgccactggtagaacttcatttggtttgag

SEQ ID NO: 12894 - DNA, 1085 bp, Homo sapiens
ctgcaacgtggatgaaccttggaaacaccgtgctaagtgaaaggagccaggcacaaaaggccacttaatgtatgattctgtttctgggaaatgtccatggtaggcagtccatagacagaaactacattggcatttgccaagggctcaggatagggaagtagagagtgactgcttaataagtacaggttttcagccgggtgcggtggctcacacctgtaatcccagcactttgggaggcaaaggcgggtggatcacttgaggtcaggagttcaagaccagtctggccaacatggtgaaaccctgtctctactaaaaatacaaaaattagccaggcataatggcaggcgcctgtaatcccaggtactcaggaggctgaggcaggaggatggcttgaacccgggtggtggagtttgcagtgagctgagatcgtgccactgcactccagcctgggtgacagagagattccgtctcaaaaaaaaaaaaattgccgggtgtggcggtacacacctgtaatcccagctactcgggaggctgaggcacaagaatcgcttgaagccaaggagtggaggttgcagtgagctgagatcatgccattgcactccagcctgggtgacagtgaaactccatctcagaaaaaaataaaataataagtatgggttttccttttggtatgaagaaaatgttctagaactggacagaggtggtggttgtgtgacatgtgagtttactaaatgtcacttccaaattgttcacttttaaaaggttcaaatggtaaattttagatgatgtatattttaccacatttttctaaaaaggctccctcgctatgcaagaaggtgagaggatgggtgtgggtgtgacctggggcaggtgacttagcatgatgctgggatctgttggtcacccgcatcacagagaaatggccgagtgtgcacccccgccgggcttccactgaactccagatactcaaagccactggggaggagaggacctaaccagaaggcccataacaacagggaaaatggatatgacttactgtcaaatgaaaaaggaatggagaattgtgtgtaggctgagattccagc

SEQ ID NO: 12895 - DNA, 1042 bp, Homo sapiens
agtcagaccccatctcaaaaaacaaaaaaagaaaatcttaggtatggtggcatatgcctgtagtcccagttacttgggaagatgaggcaggaggatcacttgagcccaggagtttgaggatgcagtgagccatgattgagccattgctctccagcctgggcaacagagtgagaccctatagcagcactattcacagtcgccaaaaggtggaaacaacccacatgtccatcagcagatgaatgggtgaacagtggtctctccatacagggggatatgattcagctctaaagaggaatgcagccctggccacgcggcagcacggatgagctgcaaaaacatcacgcggagtgaaagaagccaggcccaaaaggccagtgtgtgactccatttgcacgaaatgtcccagaacaggcaaatccatagagccagaaagtagactggtgtccgaatggggctgggggagggaggaatggggagtgactgccgatgggcatggagttccctttggggacgatggaaatgatccggaattagagagcggtgatggtcgcacaacactgtgcatgttactgtccgcgtggccagagctgtccatcacagctgcagctaacatccaggtaggcccagggctacaaagtgggcactagcggtgtctgttccttaaatgtgcccccagactgtgccaggaacacagagggtgagatcgttcatcctggcagaggtggggaggtggggtttcagggaagagctgttcctgaagccgggcgtcagtgttaacaatgctgagactttgacagatagaaatgtggacaatggagatgctgtttcagaaaagtatagtgaactttagggacacactcaggcttgtgttttctcccagcagatgtttatgagctgttgaaagtttgcagacgctgcactagtaacctgagttacaggtaggggaggtaggacagacaagctcacagtcaggtgggttcaagtcccagtagtcattaggtatcctgtgaatttggtagttacttccaggtttgctgtagga

SEQ ID NO: 12896 - DNA, 1032 bp, Homo sapiens
ttgcagtaagccaagatcgtgccactgcactccagcctgggcaataaagtgagactccgtctcaaaaaaataaaaaaaaaaacaaaaaaacttgatgggtgaacattctgatgggggtacacatatgcaaaaatatgtgagggcacccccagaaggtggctctgtctgggagaaagtggggactagagtctgccccgtggtgacacattctggtgaccttaagagagccttttgcatctcgtgccctggtgacaaggcagcttggtatcatggagaagacacgggatctggagtcagaaaacctgggcttgagtttttggctgtaagactttgagaaaaaaaaatatctctgggcctcagtttttcatatatgtaaaatgagactgatgttagaaacaacagtaatgataataagacccatttccagtggttgggaatgagaatgaaataaggtccagggtgtaaagcagtttatccttcctgggcttggcaggagtacgttgccctttgggagtgcagaagaagaaccagttcccgttcactggccagcctcaggcatctgtcatgtgtggggccctggaatacagagacgaatgagacaggctgatgcctctaggacgatcatataaaatcccaagctcaagctcaggacccaggccttacctggctttgtggcactggcatcgtcgcctgctgttctggaaacacaccagggatgcttgttcatggtggtgaccaccaagacaagagagaggaggtcagcggcaaggactctgatgcaatggcgcacccgggggggaaagtcatgccaaagaaatagctgaggggttgcctctgtgctttctcctcatgggattagatctggctgcatgtcctgagtcccgggggctaaggagggacgtttcccccttgttcacctcggattgagcctggccattgcaggccagcccaggcttcacggagcaggtgtgcactggcagccccagcacctacggaaggctgaataatggccccaaaatatcaggtcctagt

SEQ ID NO: 12897 - DNA, 1033 bp, Homo sapiens
cccaggaaggtgatgaggctgctgggcttccacatagacccagccgcccctctctcctcatgctcgcctcccgcccacctctcggggagccaaggcagccccagcaaggagtaaatgagtgagtgggtcctggcgccccaggacagggcatgtcgggacaagtgttcaaatggcaggcggggggtcgggaggagtttgtggctttggcactgacttctgtctacatgggacctcagcccccaaacacacacgacacacacatacaacacccacacagacacacacatacacccactcacacacgccacacacacagacctcacaccacacacacacggacctcacacaccacacacacacagacgccaccacacagacatacacgcactcacactgcacacagcacacacgcagacctcacacacaaacctcacacaccacacagacctcatacacacagatctcacaccacacacaaacctcacataccacacacagacctcacacacaccacacacacacggacctcacacaccacacacacacagatgtcaccacacacatacacgcactcacactgcacacaccacacacacacagacctcacacaccacacacacacaaacctcacacagcacacacagacctcacacatacacagatctcacaccacacacacacacaaacctcacacaccacacacagacctcacacataccacacacacacacaaacttcacacaccacacacagacctcacacacaccacacacatacaaacctcacacaccacacacagacctcacacacacacagctctcacaccacacacagacctcacacacgacacacagacacagacctcacacatacagatctcacacaccacacacagacctcacacacatacagacctcacacacacaccacacacagaccacacacacacagacctcacacacacacagatctcacaccacacacacacagacctcacacacagccctcacacacacatacagacctcacacac

SEQ ID NO: 12898 - DNA, 1056 bp, Homo sapiens
agactgagagagggagagtgatttgttcaaggtcacacagcaagttagtggcagagtcagaagtgaacccagatcagctgaaatcagctccctgaaggaaggcttctgtctctctgggaccctttgacccagggctgctggagaccctgtggttaaggctggtggggagactgaaatcacgcgcaccatggattgatccgccgtggtgttccactgcccaagagcttacgattccagacagaggcctgccatgcattcctttgctcaccctttgtctcccttatctctgatggagtgcccactctgtccctgttctgggctttgccaggttggaggcagggcagggaggcacattctggggcttgcgtctccctgccgcggtgacttggacattagaaagttttctagcagcaaagtaagcctgggcctggaggaccccggaaccctatcccaatttccttcagcccaagaaggaggacttttttgtttgtttgtttgtttgtttgtttgttttgagacggagtctcactccgtcgaccaggctgtaatgcagtggcgcaatcttggctcactgcaacctccacctcccaggttcaagtgatcctcctgcctcagcctcccaagtagctacgactacaggtgtgtgccaccacgtccatctaatatttgtatttttaatagagacgggatttcaccatgttggccaggctggccttgaagttctgacctaaggtgatctgcccaccttggcctcccaaagtgttgggattacaggcgtgagccaccactcccagccttgccttttcatgtccgaattgtctgaatcatattccgttctatggccatactgcatgtcgtttgcccactcatctatggatggacctgtgagacgtcaccaccttttggctgttgtgaatcgtgctgctgtgaacatcgtgctcaagcttttgtgtggacctatgttttcagttctttgaggtgtgtacctaggagtggaattgctgggccatagggaaactatgttaaacttctgacacttctgcagggcgcctggag

SEQ ID NO: 12899 - DNA, 1726 bp, Homo sapiens
ggcatgtcctggtttagtctgtccacctccattcctcttccctttcccctcttcttccctaccccttcttccttgtctctctcgctttcagcaattatggctccagtaaaggacatacactttcttccccctactcctcctctcagtagacccactcactcacttccactcatcactcagatgcaggccacagttgtgtcatgttctgtctcattactcagtctgcaactctgatgacaggccatagcgagcacagtgcccttcttggtaccatggctctgcagagaaaagcaaagtctcatgtcaggcagcaggcgggtaacagggaagaaagggaaaacacaaataaattctagaaagcaatggctgggctgatacactcgcgtgtaacataccagactatgctattcattcactcattcagcgaatatatttactgagaacctactgtgtgccatgcattgttctgggcactgggaagacagtaatgaccatgacagatgaggccttggccctgatgagcctgactttttagtgtagtgctataccatagaaatattatgcagctttgccatgttaataaaaaacagtgaagttggctgggcgcggtggctcacacctgtaatcccagcacttttggggggccaaggcgggtggatcacttgaggtcaggaattcaagaccagcttggccaatatggcaaaaccccatttctactaaaaatacaaaaattagccgggcatggtggcgagtgcctataatcccagctattcaggaagctgaggcaggagaatcgcttgaacccgggaggcagagattgcagcgagtcgaaatcacaccattgcactccagcctgggtgacagagtgagactctgtctcaaaaacaacaacaacaacaaaccagtgaggttaattttaatatatcttatgggacccagtagatccaaaatattttcatttcaacatgtaatcagtataaaaacttatcatttgatattctgcactctttttttcctactacatctttgaaatctggtgtgtctttaacccctgctgcacatttccactcagaccagccacatgtcaaatgctcaacagccacgtgtggctactgactttccatgggatggtgcaattattctagcatgaggaagagatagagattttttttctccttttttttttttttgagtcagggacgtactctgtcatccaggccagagagcaatgatggcatcacggctccctgcagccctgaacacctggattcaagtgatcctcctgcctcagcctcctgagtagctaagactacaggcacactgtaatttttttttcctttagagacaaggtgtcactatgttgcccaggctagtcttgagcttttgggctcaagcagtcctcctgtcttgtcctcccaaagtgctgggactacaggtttgatccactgtgcttagccaggatagattaaaaaaaaaaaaaaaattcaggctgggcacagtgtttcacacctgtaatcccagcactttgggaggccgaggcagctggatcacttgaggtcaggaggtcaagaccatcctggccaacatggcaaaacctcatccctactaaaaatacaaaaattagctgggtgtggtggcgcacgcctcaggaggcagaggcaggagaatcgcttgaacctgggaggtgaaggttgcgttgagccgagatcatatcactgcactccag

SEQ ID NO: 12900 - DNA, 1050 bp, Homo sapiens
ctctggtagcttttccagaaagacccatgacttcaccacatttctcgagttacgatgaaggtagagtctggggccctgagtgagcatcagatgctggaagctggggctgggaggggccaagcattggggacagactccagacacctgcaccaccccctggccccatgagatacgttctcagaccttcccaagaaggatctgtggctcctctcagtgctgtgaagtgcagggggcttccctctggaattcagcccatctctccctcctactttggctggctccagatgccatttagaggaaatgtttggcccatttcccaggtgccagcttttcccatgaggaagctgtcagtgcttcctggtcagggaaatcttttgggcgtgatttggtcagtcacagtctgttggggtgaggtggtgcgtggagaggacaggatttggaaccaagggtccctggattagaatccctgctccatacctcactggctgtgtgaccccaggctcgcgaatctgcctctcttgatctgtttcctcatgagtaaagggaaatgactttgtactctggagtgggcctcactcattcatgtgccaggcatcgtgctaggtgctagggcacaccccaaggcgttcgggaagcagaggctgccgtccctggcctggggcctccctgcagtgatgggaatgtagccctggtgcccccacaccctgcccttcaggagccgtggtttccttctgctctctcctgggaggcgcacacccctctgcacccagagccaaggagggcaggcagccctgggaccctcttcaggcaccgcagccagggtctgtgttacccacaggtcctctggatgtcagcatggcagccacaaacctggagaaccagctgcacagcgcacagaagaacctcctgttccttcagcgggagcatgccagcacgctcaaggggctgcactccgagatcaggcggctgcagcagcactgcacaggtacatcggggagcaggcccgggcaggcggggggcggctatggggcacggcagagcccagcgtca

SEQ ID NO: 12901 - DNA, 1077 bp, Homo sapiens
ctccacacctccctgcaagctgagggagcgggctccggccttggccagcccagaaaggggctcccacagtgcagcggtgggctgaagggctcctcaagtgccgccaaagtgggagcccaggcagaggaggtgctgagagcaagcgagggctgtgaggactgccagcaggctgtcacttctcagaagcacctaaataggaagcccatggaaacaaaagcttttcaaccctgaagcccttacattcctctggcaccacagctgcactcaacagactggcaccaggcccattcgtgggcctccagggtgccaggcactgtgctagggcttagggtgcagcagtgaacaatctggagtctgtgcgaggaggcgggaaacagacccacacttacagaccctcacagagacacaaagactagaactggggacagggtggtaatgcacccgagtctgggggccagggcttccgggaggaagtaaacttgtactgagacctaaaggataagtagacagtggagacccaggagaggtgggtgggagagaggcctaagaagagtgttctgggcagaggaggagccatgagagggcaccagggtgggagaagcacagcccagcagggcacccggaggaaagctcgtgccacctggagccctgggggtaggagaagggccagcgagggtggcggggccagttgcagggccgggcagaccagtctgattctcagagcagtgggaaccattggaggtttttaagtagtctcaatttaaaaacaagatcactctgctgccacgtggagagcagaatggagcaggtaggagaggacagagggaggctttctggcagggatttgggtgagggtgaggacggcctcagcagcggagacggggagagttgaacggatctgagagctgctttcaaagcaggatgccagcaagatcatcatggactggaaatggatggcgggggatgccagcgtcaaggccacccccaggttgtgcagctggggacagtgcttgtgaggggtaggacactaggcctagggcagctctcctgtcatccaagacccactaaattctggat

SEQ ID NO: 12902 - DNA, 1047 bp, Homo sapiens
tctttgcgcctgtgtccagggagcagggatggggctgcgggagggctcgggcctacgcccccacctgccggctgcctggatgctgtcggactgggggaagtggaggcaggcggtgcaaggagaagctgaggcggggcagggacctgcgctgtcgaggaggagctgggtctggctcttgcatcttgccctgtccccagcccctgtaccccagaaaaaggggagccctctgcctctggacccctgccttggccctagttcatggctcctctctgttggactgggatggccgaggctatagcccaggcggggccccggggacccagggtcactcccagccacacccccacttctcactccgccccacacactccttccccagagacccatgctgcccccatctcacgctggcctcgcccggcctccaccacctgaacccatctctgtcccttcttgcctaatctctctctgtgtctccctctctgtctgtctctgtcccgggctctgcatctctctccacctctcccttggcctccctgtctctccccaacacccctctctgccttactgtctttgggagcccaaaccctacccctagcttgggttccccttgacccccccggggtcccagccagctgggagggcagccctgcccctcgggctccgaaaccctgggcccggtgcctgactctgcaccccccgcctgccctaggttaccacggcagcagctacagccccgaaggggtggagcccgtcagccctgtgagctcacccagtctgacccacgacaaggggctccccaagcacctggaagagctcgacaagagccacctggagggggagctgcggcccaagcagccaggtacgccccacccagtacccaggcccccgaagccctgcacagtgaggaccctcaaggccccatcatgcagataggaaaacagaggtgcctaaaggccaaggaattggctggatcatgaggctcaaaggcatggggctgggatttgggcccagcagccctggggccagcagacaccccctgaccagctc

SEQ ID NO: 12903 - DNA, 1055 bp, Homo sapiens
gactgagttagccagatggatggatggatggatggatggatggatggatgggcaggtggttgggttaggtaggtaggtgggtgggtgagaggatagatgactggcttagctgggtgggtgggtgggtgggtggtaggtagatcgggttaggtaggtagatgggtgggtaagaggatagatggctgggttaactgggtggatggatggatgggtgggtgggtggttgggttaagtaggtaggtaggtgggaggaaggatagatggccagattagccatgtggatggatggatgggtgggtggctgagttaggtaggtaggtgggtgggtgagagtatagacgctggcttagctgggtgggtggatgggtgggtggtagggttagggaggtaggtgggtgggtgagagtatagatggctgggttagctgggtgggtgggtggatgggtgggtggtagggttaggtggatgatggaatggatggttggatgagtaattgtggggatgagtggatggaggccccagtggatggacgatgagttgggcggtgggatgagtagatggggaggttgtttggtttgagaatagaatctgtggagagggagagactgaatggggactgtgaggaaagactttcccggtcccccacatttagcaaggccagcaaggaaaagaggtgtccctcttgcctggacaaagtcccaagtttctctgagatgggagaggcccctgagtgccctctggtgacacacactccagagactgtgggcagagctgcttcaccaggggggtggggtcacacctcaacacccttccctgcccggaacctttttttttttttttttttgatggagttgtactctgtcgcccaggctggagtgcagtggtacgatctctgcttactgcaacctccacctcctgggttcaagtgattctcctgcctcagcctcccaagtagctgcagttacaggcacgtgcaaccacacccggctaatttttatatttttagtagaaatgcggtttcaccacgttggccaggctggtctcaaacttctgac

SEQ ID NO: 12904 - DNA, 1025 bp, Homo sapiens
aaggctctgagtagaccccacgcagtggtggggacacagactccaggaccagaatgcctgggttcaagtccccgcctgccccttattagccaggtgaccccgggtaaagtcactgtgcctccctgtgcctcggtttccccatctgaaacaggcataatcaatagggttgtcttagggttgtttcgaggattaaatgagcaaatccatagagagcacccagaacagcgtccactcatgggaagcacttgacaagggatcttcattcttcaggttcctcatagggttttgttccatgcaaactcttacctatttgagacagtgtgtgtgtggacacgcgtgtgcatcggtgggcacatgggcttttaagcacgtctttgcctgcatttgagttgagaggggtcctgggctgcagcctcctgggcgctcacccctctgcacctgcagggcacgccagctgacgtcctgtacaagggcaccatcaccaggatcatcggcgaggacagcccgagtcgcttggaccgcggccgggaggacagcctgcccaagggccacgtcatctacgaaggcaagaagggccacgtcttgtcctatgagggtgagtcgcaggaggagaggaggcccaggaccaggggaggagtgtgcttggcccactgaggtagcttcacagggaggcagggctggattgacatcagaaagcacaatctgataggtggtgacctccttatccctgcaggtatgcaagccagcagcagggaagcgttggccttagctgcctcccacctctgcccagttctttacagtttagaaaacaaactcatggccaacctttttagaagcataggagggaaactgaggcccggaacagaagcccgagctcacgccgccaggcctccagcaccgtactgacaaaccacgcactctctcattggccatgaaagaggccatggccagagtgcccctcgccccactgtgtcccaggctcttgctgcggagcccccatcctctccctctctaggctctgggtt

SEQ ID NO: 12905 - DNA, 1022 bp, Homo sapiens
ctgggtgggggaggagggagggctgaggtggctggagctgaggcttctgtgacagtggtggtcttccgtggctgctctgagagatcagggacggcaggtgagaggccctgattaagcctcctggtgcccagggtgttagcccatcttaaggacgaggagcccaggggagaggagaacccctcccatggggtgtcccagcacatagccggtaggctcggggtctgccggcccagccagcgcacgctgcgtgacctgtctcttgtgctcaggatggggaggtgaggcaggtgctgggttggagcctgaggttgccctgcctgaatctccccggagacccagccagccccagcggcactgcaggcccctccccgggggcagtggaaagcgtcttgttgcatctgggctggaaatacaccagcgcggggctgggagtgataccctggcccagtggtttctccagtaataataatagtatcctcatagtgaatgaagccatgctgttctccgcatttgacagatggggagactgaggcatagcggggttatccaaggcgcatttggtgaccggggttcaaacccaggcagcccggtactggggacctccaggcagaaaggaaaggaggccatctggtggtgtgtttctattttttatttttggtggttttttggtcactcttgttaagcacctactgtgtgtcagatgctgcacaaagcacttcacctggattctagggcagcggtggcagagtgttccctgggatttgttagaagtgctgattcttgggccccagtccacacgtactgaatcagaaacctcggggcatagtgcagccacctgcactgtcacaagcccttggagtgcttctcatgcaggctcctgccccagacccccttgataactgtgagaccgagaagttaactgcccattttgtagatgaacaaactgagacccagaagtttcatccctggtcctggggccctcagcgttggcctcccaacgtcctgtactctgactgtggaag

SEQ ID NO: 12906 - DNA, 1050 bp, Homo sapiens
gcctagtatgccccagacactctgctagtgagagctgtgatggtgctggtggtggcacactcacgattgattgattcattcattcattcatccattcattcaaagaggcatcccagaaggatggtgcagagcagggctttggagctggtggctttgtaccccagctctgccgcttagtgactgggtccaaggatactgggcttcacctctccgtgcttcagtttccacctctgtaaaatggggataagaatgggacccagtcgtagggctgttgaagaacaagtgtgtttctttttgtaaagggtggtgcctggtccttggtcagccctcaataagcattcagtattatcctcactgtccattcagcagccccatattcagcgcctgctgtatcccagggaagcaatggcagctgccctgagggcagagacatggatggggttttcctgctgggctgtggagctaacacttcgttagtggaccgtggagggagtgggggctgcattgaaggattctgagctgagacacagcccccatccagggctggactcaaagtgggtcgtcctagtgtcgatgaaagtgattctgatccgaatgacacagtcaaagctgataaagaaggtggcccttctgtcccctgacgctgaagactctggaggcgtggacaggaggggaccccgagatccaggttgggacctggatgagaatgagtgatttgggagtgtggggttggttctcgctcctggccgaccttgaaggagcaccctcatatcgcgggctgcagagaaagcggagcagatgcagggacccactacaggaagtggggctcaggccaggccatccgtcttgacagtagccgttcttggtgtagtggtgagctccccatcgctgcagtaagcaagcaggtctcaccaggagaggtgccgctgaacctggtgacctccacctcctgcccctcccctgtgcctttcagtcccagggaggagggcatatcccagtgaatcctaacgcagtatcagccacctctggctgctggcccagccctgtctg

SEQ ID NO: 12907 - DNA, 1122 bp, Homo sapiens
cgaggtgtcggggagtgggcacgaccgcccctcccagggtcaacagcgcccacgtgcctcctgtgggtttcctgagttggggggtgcatggcccaggaccaaggacatgggtgcccctcctttcgccatttgtcaaggtgggattgaaatggaggctgtggtgggatcccgagggaggggaagcctgtgggctgggggtgagaagtgactccagggacactggaccgtgcactttccccggcagcgaggcttccgacttcctcagacaccactgaccacgctgggatggctgtagccagcatcctggggctgtgccctcctggagttccccctgtctgaggccaaggtctgctttgtgaggggacgtgtcccagtctgagtcctcagatgtgagtgcatgtcggaatcaccggaagggctggggaaacccagtcactgggccgcacccctcaccccacaataaggccgagatccaagactctgcatttccaaggagctcccaggcgttggtctaggacgctgctgagaacctcggtgctgggggtcagcccctgagcagggagcagggtggctgaaggggttgttaagcccgaggtgggctaccccacagcccagaccacccatgggagtacactcaagctggaacggcccttcccaggtgtttggggtgggcaacggcctccctggccagggcccaacttggatgaggcagctctgagctgagttattgtcagcgcgcctgacagccgatggcagccagccccttctagaagggaggtctggccagtccagcccaggaggcagcctgtgcatctgcatgtttgcaaagccacgcttcatagatgctgtggccacccgaatgcttaaccacagcccagcagcaagacgccagtgccaccgtgtcatctcaaggacacctgccctgtctgaagtgcttgcaccaggcccttctccgccctgtcaccccgacaccatgtgccctgtaccaaagcagtttgtgtgtcatttcgatggttacgtttctgaaacttggatggttataaagtggaatatgaaagtccttgattaaaagtgctggccatgggacgtctctggactcagacccgcgctgtgtgcggccgc

SEQ ID NO: 12908 - DNA, 1039 bp, Homo sapiens
tgcagctccttaaggagggtggggaggtgaactgagaccactccccacccactaccccgctgcctcagcatggctggcacctgcaggctgggacaggcatctgggactcttggtgactgtgggctggggagccactgccctgtgctccaggcaatgcaggcacccagggtacctctgtgggccggttcttctttctgacctatcctggcagctcaggccttgtgatcagatgggaatccctggccatggagcacacgagcccctgcccagccccactcccctcacagctgccccaggacacttgtccatgcttctctctccctcataggtttctgagtgagcagacacagccccttccccctaccgtgacatgggccccctccccaggcaccacgggaagatggagaacccgggtcttcccagccagtgagcccacccaccctcaggggtagggtgcccactgccaggagatgctgtctgcctcttccccgatgtcgtctagtgggagggagctcaagctcccttctccgtgatgtttacctggagggcagcaggtcgggttctccctcccttcctgggccctctagttttggaagaagacttaggttatctcagccaatatgcattggaccccttgatggctggtgggggatgggacctgggagtccagtgagacatgggagccttgtcaaaattccaggggcacctggccctgctgtgtgatggggatgggtgctgctggccgctatggtggcgatggcgatgatggtgatgatgacggcgacagtgatggtgccggccaacagtcatgcagcactatcgccacacactgtgatgatttcaacctcactagtgttggggacaggtgtgtaattatccccactggccagatgagacagaggcacagggaggtgaggaagcttccaaggagcctgctgagtggcagactgagggttctagcctggcacatgcagcccggggagttggagggaggcccagccgtcccctcggcagcacactggccataaagccagccttc

SEQ ID NO: 12909 - DNA, 1023 bp, Homo sapiens
ggtctcgaactcctgacctagatgatccacctgccttggcctcccaaagtgctgggattacaggcatgagccactgtgctcagccgctacggtgtttttgaaattgaagtgcattcaggaattttctagactgagaggcaaaaaggtaagtgccagtcagggagtatatagatgctgaggtatgagaggcagcagggagcggtggggattatgacaaaggaagggtggctaacggcctcaagaggtatttggaaaacatcatcaggcgtctgttgggcccctactgtatgctcattctcttgctggccttcccagttcccctcccatgacctgtttgggggcattgaggctgggcttgtggtgggagcccttcctggtagctgggctgggggctctgaagagcagaggcccatcccctccccctgtgtgagagccacatttgcacagagggaggtggggagaccatggtaatttaagaagggtggggggtgtcggtgcccggcatatcctgttgtagaggcctggcctgtactgtggtagagtgagtgtccagtagagtgagtgtccggcttgctcttcgtggagtgagtgtccggcctgctctccgtggagtgagtgtccggcctgctgtccgtggagtgagtgtccggcctgctgtccgtggagtgagtgtccggcctgctctgcgtggagtgagtgtccggcctgctctccgtggagtgagtgtctggtctgctctccgtggagtgactgtccggcctgctctccgtggagtgactgtccggcctgctctccgtggagtgagtgtccggcttgctctcaggagtgagtgtccggcttgctctgggcggagcgaatgtccagcttgctgactcatccattgattgagcatttattgtgtgcaggacatggggagcttcatgctggttgttcagagccattgtaaacaggtggcttcaagacagtgccgcgggtctccctgtgcggcgggtctatctgtgccacggggtctccctgggccac

SEQ ID NO: 12910 - DNA, 1036 bp, Homo sapiens
ggaagagaaggctgaagccagggaaaagagaacccggacctatgtttggggaaggctttgagtttgcccggctgtgggctggagtccttgtttcccataagggctgggggtgacatggcgacgtcagcgctgtcattaaccatagcaacagcggtgactgtgataacaggaaagacttccatcatgtttgctctgggccaggcctcgtcccaagtactttacctatgtattaactgatctgatctttgtgataatcctgtgaagtatgtacaattagcattcccattttacagatgagaaaactgagacacagaggttaggtcatctgtccgaggtcacccagccggtacgtggaagaggcaggatatgagcccaggatgtgagctcctggctcctgccctgaatgcctgtgctgtaccctgctcagcgtcctctttctctgtcccacagacagtggctgagtgcgtcctctattactacctgactaagaagaatgagaactataagagcctggtgagacggagctatcggcgccgcggcaagagccaggtaagaggcaaggtgggggtgactgtccttgcaggctccctgcatgctcagcggccacttgcttggtggccagcaccccgcatggctggcggtaactgtctccatgagttgttgttgcttggccaccggcagtgtgagtgcaggctcccctccgtggtagcagcagatgtggggagaccccctctggggtgctcaccctgccaggctatctcgagcctcccgtagtggccaggaagatagctggggagaaacagccacgggcctcctcagcctgtgaaatcccagactcctgactgggtgacctgtgatctctgtgcgtaaaaaggctacattccaaaagtaagagcttcccaggatgacttggggtagttcacaaacttcatgtttaaaatgttaatggttgtgtgtgtttatcttaatacatacttgaaagaaaaaatagccagtacttcagctcgccgttttttcagacgccgttgcttgggat

SEQ ID NO: 12911 - DNA, 1193 bp, Homo sapiens
gtatgtatgtgtgcctgtgcatatatctgtgtgtgtgtgtctctctgtgtatcttgtgtgtgcctgtatgtatgtgtgcctgtgtatatctgtctgactgtatgtatgtgtgcctgtgtatatatctgtgtgtgtgtgtctctctgtgtatctgcctatatgactgtctgtctgcctgtgtgactgtgtgtctgtctgtctgtctgcctgtgtatctgtctgtgtgtctgccatgtgactgtctgtgtgactgtgtgtctactgtgtgtgtaccgtgtgggtgactgcatgtgtgtatgtgactgtgtgtgtctgtgactgtatgtgtgtgtctgtgtgtctgcctgtgtgacttgtgtgtgcctgtatgtacgtgtgcctgtgtatatctgtctgactgtatgtgtgtgtgcctgtgtgtgcatgtctgtgtgactttgtgtatctgtgtgtgtctgtgactgcatgtgtgtctgcctgtgtgacttgtgtgtgcctgtgtatatctgtctgactgtatgtgtgtgcctgtatgtgcatgtctgtgactgtgtctgagtatatgtgtgtttgtgtgactgcatttgtgtgtgcctgtgtgacttgtatgtgcctgtgtgcttgtgtgcctgtgtgtatctgactgtatgtgtgtgcctgtatgtatgtgtctgtgtggctgtatctgactgtatatgtgtgtgcctgtgtgactttgtgtgtgtgcgcacgcacctgtgtgtctgcctgcatgtgagtgggcaggggggaggcggcgggtgccaggtgcaggagcatcttccgcagtgccccctgcgctctcccaggagcagaagttctgccagcgctatgaccagctcatggaggcctgggagaagaaggtggagcgcatcgagaacaacccccggcggcgggccaaggagagcaaggtgcgcgagtactacgagaagcagttccctgagatccgcaagcagcgcgagctgcaggagcgcatgcagaggtgagcggggcctgagcccagggcccccgacgtcagggcccggggtcagctccagcatcctcagtagagatggcctggccaggaaggaacagaacagcacagcagcttctcaggccagtggccagggccctaccagaccctggcctgtgtcacgtggagcctctttggcctaatacttacttggaacttaaat

SEQ ID NO: 12912 - DNA, 1022 bp, Homo sapiens
ttcaacaggaaaggaatggctgtagctggaaatgtctgttgggtgtagatggcaggaatagtctttcaactcaagtcttgccttcatttcatttcattacatttcatttcattttatttgtttatttatttattatttatttttgagatggagtttcgctctgtcacccaggttggagtgcagtggcagggtctctactcactgcagcctccgcctctcgggttcaagcaattctcctgcctcagcctcccaagtagctgggattacaggcgcccgccaccaagcccggctaatttttgtatttttagtagagaaggtttcactccattgaccaggctggtcttgaactcccgacctcaggtgatgcacccgcctcggcctcccaaagcgctgggatcacaggtgtgagcactgcacccagccccttcattcctgtgcagttttttcaactccttatgttagaacattgacaaactgaacctgaattcccatagcaggtgggagccggagagagctgtgctttctcggatggtatcacagatgctctgattaggccaggagagggcctgcgtcctgtgaaccagtggctgatgccggggagatggagtgaggctgcctggttttggctcatgggactttctctacagttggggatgatgtcattgactccacccaagccacggggctgctgggacatggtagggaatgggataaggctggggaggccctgaaaaggtccccacctggggaagaggcgggctggatggggactgctgccttgggattcttggataagagacgcggcaagggctgggaactaggtttgctggaggctggaggggctcccctcatacctgcagccccctgccccacctcctctctccctcagctgtgttgaggcagggcctgcgaggcagctccctgtatcctttctgggcctccagagaggccctcccaggcgcaggcctggctcagtcatgcccagcgcctgtaggtctgtggtacacagtaggtgatgacca

SEQ ID NO: 12913 - DNA, 1053 bp, Homo sapiens
tggccacctcccctgcggcgtcagccccacccaccacgatcagagcagagacctcggcccccaaaggccaggaacgtgggaggacgtgcgtgggggcagtcgggtttcagcgggattgagaaaggcctgtttcccttctcccccaggttggggctgagtcccctgaattccagcctcccagccggaaggtggcagcccagcctgaagccctcctttgggccggagcagtccctgagttttgccacccttgggtggagttagttcagctctaacaagtgtgtcctggcgtcccctgcaagctgggccttgggcccgcatggggaagatgcagacaggagctcctgttggagcacttgctgtttgccaggaccaggggcagccagggagacagtgtcgggaggtggcccccaaaggggccgaggagatgtggagatatcagccacgggaatattggggttggggaatgttctagatgggagaggttcaggtgggaagggtttgggattttgcctagaactgtgtggattggtgacctcctatccaagtgtcctctccgagcctcagtttccccatctgtaaaatggggcagcccctgcaccccagaaacaggttactgggaggcttggcaatcctgattgtggcttggagagcagggagacagggcctgccctctcatccacctctatggagggggcagagaggactccgtgtccttggaaaggccaggcacatccgggatgtggactgcttcccccatggccctggagaaagtgcccactgccctcaaccctgtgctgggccctgctggacgatagcagcttggtggccagcgctggcctcttctggtcctggtggagaggcagggaggccctgggccagctgcagcgacgtggagagaggacagggttctgggctgggaccggacagcctgcaggtacaagaatgctttgccccagagaccgcctgagcgagggagccagccgcactccatttccaggtatttagaccattcctgagcatccactgtgagccagacactgtccaggcactgtg

SEQ ID NO: 12914 - DNA, 1042 bp, Homo sapiens
gcagggtcagacagagttggttgtgcccttggatgccagggtcacgccaaccccagaggtctgcatgctgtcatgttctgtgcccacttcgttgcagttggcaacgttgcagacctttggtggagtagtactgccctgggctaaggctcccagaccctggagactgcctgggccaggctggggcaggtgggcgcgtggggatcactggaagaggctagacttgggaggctttgcagtgtcctgagtgccctggggggggtctctccattagcttcatggcccccttgcagctcagttcctggtgcttggtgatggctcttaagaggctgttgagggatggtttggccctcaaaagagaggctggtgggagctcccatgctggggaagattcattcattcattgggagctcccatgctgggagatccatccatccatccatccatccatccatccatccatccatccatccatccatctggcaaatacttatcaggcgtctcgggcccgtcctcttccaggcccttgcagtgcagctgtgaacagaacaggtaagcatccttgtctcagggagctgacctccttgtggggaatggcgagttgggaaggagatgaggggaagggctgaggttgggggagcccagatttaagtagagagtcggggaggagcctcactgagaagctgcctttggagctgaacctggaggaagggagagggccaggcatgtgggaatctggctgaggaatgttccaggcagcaggaacagtatgtgcaaaggtcctgaggtgggagctctcttgactgtagccgccatcattccgggagagacccgtgaatgcagccagggtctaggaatgtgctgaattcttcctttgctttcccatgaatccagggtccaggaacgggctgaattcttcctttcctttcagtgtgcaatcccaggcattcccttgacaccttctggagtaaggagccctatgcaggggccagagaggggcactcctctcccgcaaaggaacttctcccagtccatgctcaaacat

SEQ ID NO: 12915 - DNA, 1036 bp, Homo sapiens
tccatccatccatccatccatccatccatccatccatccattcacccgtccatccatccatccatccatccattcgcccatccatccatccatccatccgtccgtccgtccatccatccatccgtccatccgtccgtcttccatctatccatccatccattcgtccatccatccatccattcatctgtccatcctctgtccatccatccatccatccatcaatccatcatccatccatccatccatcagtccatgcatccttcctcctttctctatccatgcatgcattcatccatccatcctcctttcctccctcccttcctcctttctcctccatcctcccatctctatccctcttccatcttctccctccatccagccaccccctgctgagcacctgggtggggagtctgccagttgggccagacctgtcactgggtgtgggccgtggtcagcagggccttttgccttttgtctgacttggtcactgctgtagctgtgcttgtacagtgtttgcacataacagatgctgaaataattctctaattgatgagaatgggtcagcaaccggagtttgggatgggtttggcttgcctggtctcagctggagggcagaccgcacccttgtgggtggcacccgggattgagctcttagtatttgaccctcagcccctccggcagagccaacgacaggctggggttgggtacctggctcttccttagggagtggaatgacctttctgccaagtgagggccaaggagtctggcctcattcctgcaggcctgccgctgtgcatgggtggaggcccgtttctctagggccctgacaatcgtggctgtcatcattcagggttacaggggcccttttacctgtgccccacactcagacacctgtgcccagtgctcctcgacacaggggcagctacagtgtcctttgaacacagagacgccagaggcagacttgccacaggagaccgcacgtcagccttgtttaaagtgcaccagctgtgtccttcctagctcccttgcagtgaac

SEQ ID NO: 12916 - DNA, 1050 bp, Homo sapiens
actggttgtgatcactggagtctgcacatgtgataagaacacatagaactaaatacgcgcacactcacacatgcacacacatacatgcacactcacgcacacacccacatgtatactcacacgcacacttgtgaacatacacaccatacacacagtcacacgaacatgcacacgcatactcgcacactcacactcacatgcacactcacactcatatgcacactcacagtcgtgcacacacacccatactcacatgcagacacccacacagatacatgcgcacatgcacacacacactcacacaagtgagtgcattggaaactgctgcaatctgcatacggctggctatatccatgctgccttcctagttatgatatggatgatgaattgtcgttgtctcaggtttgtctcaggatgttattcttgggggaggctgggtgaagggcacacaggatcctgggatcttgatttttttttttttttccttttttgaaaccgagtctcactccgtcacccaggctggagtgcagtgcagtggcacgatctcagctcactgcaaccactgcctcctgagttcaagcgattctcctgtcacagcctcccaagttgctgggactacaggcgcatgccatcaagcccagctaatgtttgtatttttagtagaggactcccccatgaagctggcctgtaactgagcttggtcccttggacatcccagggggtccaggcagagtttgctttgtgcctcaggatcacagagggctccagagcatcccaggctgggggacacgtggtgcctgcagggcctgtgggggcctcatgactgagctgctgtaagggtgttcctgtcatcagagtggcgtggtggaggcttgtgtcccgtgggcatgggtcgtagcttagggtctggagagatgggggtgggatagggtttgggggcatccagcctcatgagcctcttctttgctgttctttggggcccctgatcatgggcctgcctcaggacctttgcactggctataacctttttttttttttttttttttgaga

SEQ ID NO: 12917 - DNA, 1032 bp, Homo sapiens
gcgtccagggacgagtcattcaaggggagacctgggggtgattagttaggggcagttagttagggctcctgagttgtggcagagacacactcgagccgagttaggctatgacggggagttgatgggtcctcagagtggccagggtaggacacgttcaggcacggctggatctaggtgctcaaacaatgcctctgggagctggctttgcctcagctgtgcctccttccatgcgggccttgttctcagacaggctcatgccaccagcccagcccagccagccaaggagaaggagagtcacctggcatcccaggagggacactcctttctcttgtttgagtgaggtcctcgacatttgtttcactgtttgcaacagcaagaggaggtggccaaagaagggataaggggatgtcccaaactcagacacagggaggaaaggagtgagtgagtcagtgcaggtcaaaggggaggagtggggattgtggctaactggcatgctgggtattctgatggttttccaagagaagctggaaatctggattttataaggaatggcctagtttttaaaaaacattgaatgggccagaacaagttttcttcatggccacaactggctgtcaccattttatagcctcttcttagcagtgacttttaaagtattttgtccccactgtgatctgggtagaatgtcccatgggctgttccagaaggtctcaagtcttgggaagtcacgtctgacaccattggagatgccatttctgaaagtcaaggcccacggccacagcagtttctcagagaacaataccatgtctccagtggggcctgacattcttggagacagtatagtctagtggttagtgtcgtagatgcgggtttcacacttgctgagttcaaaaccgacattgccacttcccagccccgtccccttgggcaagtcacttcactgctctctgcctcagtttcccagtatgtattaatggaatgggtatgacagcaccccataggattgttgtaaggcaagcttgtccaacctgc

SEQ ID NO: 12918 - DNA, 1028 bp, Homo sapiens
tagaagggggctgtgggagcccctggccccaaaagtgggttgcccgtgactcgaaactctgtgagtggattcttcagctgggagtggggtggggaggtgggtgtctgggattgtctatacattggggtgaggggtccggtgtgggtgggggctggggtctcggggtaccctgggcgggtgatcggggacaccgaaggtgtgtagggggaggttttagggccctggcccggtgggatctcacctctcgggggctctgggaggaccggctttaaccccagttggacggggccctgggccctgcttgggtggggaggagagcaattcagggccccctgcccttccctgtctgcgccaccacccttccctctctgccatcctcctctctctccttcccagcctggatgctcagccctgggcgggggctccctgcaatcccttcctcccctcccccttccttcctgctccctacccctccttctcctccctccttctccccacaggccaccctcaaatgacagcaattaatggtgcctgtgatggcgggctgagaggaggaggctgacagttgagcgtgtctgcctgcggccgcccgctaatcgggcccgggggatgcccctcctgccgttggctccaggcgcctgccctgccatcactcagaggggagcaggagccctggacaggcctgtgggagctggtgcagagcccccatccctgcagccccctccctgtccttctattattattatcattttctttcataaacgggtgggctctggctggactgttgttcagcatgagttggtggatgcctcccagacgtccttctcctgaaatgacctctcatgtgcctgtgttgtcctcagggccagccatccccacagggccccatccttttgtccctgcttccctgggagaggcgggttgggtggagcccaggaaccgtgtcctgtccggacagcaggcatcagttaaatgccccggcctgagtcctcggggcctgggggcagctatttgagcccagagccttg

SEQ ID NO: 12919 - DNA, 1053 bp, Homo sapiens
cctgggcaacatggtgagaccctgtctctacaaaaaaatacaaaaattagccgggcatggtggcacgtgcccatagtcccagctacttagcaggcttaggtgggaggatcgccttagggttggggctgcagggagccatgattgcaccccagcctgagtgacagagcgagactatatccaaaacaaaaacaaaaacaaaaacactccaaaataccaaacaaacaaaaataaattcttgcatgagaatagtagacacccccacccccggaccccatccttcaggtgtccgtcgacccatctccctgtttgtggggtcctctgggtagttaatggggcagtttcccagtagcctagccgtgtggcccggggcccctcggtggtcttgccagggtgtgggatgcctttaaacccacacatctgggattgaatcacagctccgtcacttcccggctctgagaacctgggcatgagatttgattgtctgagcgtcagtctccctctctgtcaaataggtagcagtacctgcctcacagggttctcatggagaaatacttggcccagtgcttacgacacatgggccctgacggcagacatggtcttttttcctgcatgtcggtgtcgtcatgccaaactgcatacatgcgatgtcaactaacaaaacccgtgttttgtccgcaggtctccctgagtctttgaggacacagcctcgctggaggcagtttctggtaggttcatgtctgtctccacttggtgtccccaggaggttcatcctgcctggactttctcacgggaagtgggtctggaattactcggagccaggttcggcctggagtgtgtggtgggggcctcggggggcgtgtggggtctggcacatcagagctgtccagggcagggagcaacttagggcagtttgcggggtcccccagtgatgggccgtttcctggctgagttggtgcagtgattttttgatgacacctgagaggtgggagggtccctgacagtgtcagtgtcaggagggtgggcttccccgggctccggggttcttggtcacat

SEQ ID NO: 12920 - DNA, 1154 bp, Homo sapiens
aagtgtgggcagttcttacctcctggggctgagctcatgtggaaaaacctttgtgcaggttcatgggggctgacccagccggacccggaggaatcctaggttagcacccttgctggtatctgtctgcacaagcagatacctgcaaaagacacctatctgctttctctaagtgggatcatacttattttgttatgatatgacttaatacatcatggacttctttgatgaacatttttggggataatgttgctttttatacttcttggggagaatgtagaaaaacaaaaagtaatgcattcaaaactctgccagttgctttgggctttataaaagcttattttttaaatgaaagaaaatgcattgacttgtaaaaaagaaaattaacacattgcgtaaaagtctccctcggttcctggcctcccagtttctgttccccgaggcagtcacagcttcccgcgcctgagtttcctccgagatgctcttggcatatgtcggccttaaatggactgtatgtgtgcgttccctttaaaaacaaacatgcaagtggtatcacgccatatattcaggtttgattttcgccgtcatagtcacatcctacgtgataatatgtttcggagccgattgtggaacgtagaaagcaagagttggcaaactatggcccttgggccaaatccggccagcccaccacctgtttctgtatggtgcacaagctgagaatggtttctccattttttaatggttgaaaaaaatcgaaagaagaataatattttatgacatgtgaaatcatatgaaatgcaaatttcggtgtccataaataaagttttgttggaatgcagccacgctcactcatttacatgttgtctgtggctgcttttgggtacagcgtttgcaaagttgagtagttgtgacagaggctggaaggcctacagaacctaaaatatttactctctggccctttgcagaagatatttgccgatccctaatatactacctcactgttttgaacctcagtgtagccttgcacggtttccctgttgaggaaactgtggcccagagaggggtgtgagtttgaaggtcattccaggtaggccctaaaacccctccttctagcctgggctcctgttcttgctgagttacgctgatgctcatggtta

SEQ ID NO: 12921 - DNA, 1014 bp, Homo sapiens
tctgcttgtccggagaggatggagaagggcaggtgcccccgcccattgaacagatgcaaagactgagtcaggcccagcagagcaatgaagggggggtggagccagcggtgactggcgagtcggcagcgcggctgccagggcatcccgggctctgtctggcttccctgagccgcctgccgtgtccctgcttggaaattcactgctgccaccgccagcgggtgccgggggagtctgtggtgccggtgcccagacatgggggcgggagcgcagcaggccccagccctggcctcttcccactgagctatttacgctgctggggatcaatactattgataaatccatgtaaatggtaatgtggctgtcaggccctggtgagggatggagacccctcctggggctgcgctctccccctccccctctcggagagggtttggttatgtgggaaggatttatttggcataatctgttctttttccccaattaataatactcatgccacctcctaaagatttcccagagctctgcaaacacgaatttactgcatggaagccctgggctggggacggcttgattgttctcggggcctgggggtggggggcagggggcgctggcagcgcagacacccaccgagggagttggaagctagccccaggagtcctggcccccagcgtctgccattcatgctggatgtggaggctgcctggccccgtttccccctggctgagagggggcgcattcatagttctgtgttcccaacccccatctgagagtgtgggtggagaagttggtgcttcactcggagatgggaggcgggggtggtacctacgcagaacccagccggagggttctcctggggtcctgtctgtgggaagggagattttaaggcagaggagacaggctctcagcccctcctcctgccgctgtctgaactgaaaagccccacaaatgctgcctctgaccgtgggccgggggtgggggtgggggtggggtggcgggggttgagagcttttattt

SEQ ID NO: 12922 - DNA, 1600 bp, Homo sapiens
ccgacactgcggcccgcgtgctcgggggcgccggggaacttaggggaactccagctccctagcgagggggcgggaaggagggaagtggcgttggggtgggcggggggcgcgctggaaatgcacagagcggccccccacagtgtgcgccggctctggggacttggccgccaggcgtcccttgtacccggtgtagccccggacctggcggggcgacactgcgccttattttccatcgggcagcgcgggtttgaaagcccttggagatggtacccctagctccctggcctggctgttgtggaggggcgcatgagggtctctcaccagccgagggggagagccagccttgtccctcctaggcgtggggccacggggcgctgggcggggtccctcgggagagtcgcccctggtccccctcccccgcgggccggtgttcctggtgtctgggcctgcctcccgtggctggtgacgcctcattgggccgcctcctagtccctcccccgggctgtgcggatacttgggatgccactactttgcgaagttggaattcagagctgatcccacttgggcacgactgggaagacccagacccttgtctagagggcagcttcctcagaggcctgcggggagtgagggcacccgtggggtacgccctccccgccccagacacttgcaggaggagcaagccgagggcgggagggcacggcgggcgggagggagagacaggctgtacctgggagctgctgtcgcccgggcccaattagcgtggggcgcccggcgttatttttacattgtaggtttatttttttggaagcgagtgtcctcccgccgcctgtcgcgcgctccggctctccgagggtctggtgcaggcagcgggggcggatctgttctgtcggctcagcctcctcccttcctccccctcctcctctcccccgttggtgagaactggttttattgtgattattattatttttccctttttgcagatttggaggaaggatgtgtgagggagggaagaggggaggaggggataaggggaggaccctgtgggcggggtgggggagttctgggcgcgttgggatgtgttaccggtggccttgactttgccccttttcagccagatctgggtccttgcggcagctttgatataaggggctctccgggccagactgcgccgggagggcgacccggggcaggctgtgtacctcgtgggtggcctctttgggggtgctgaggaggggccgagaaatggcaagcagcagtgaggtgggatggcccactctgcacctcagctcctggggtttgactctgacctttgccactttcctggcagtgtgaccctggacagatgcttaacttctctgtgcctgtcaggtttcccatctgcaaaatgagggtcaaaatggtactgagttcacagagtggttgtgagagctgaccgtccggccataagaatcccttggtacttgtatgtgttactatgactactgtgtcggtattattattcctgggttctaagattgggcctttaatccaacgtggtctggaagccctgtgaaaaggggccaccttacctttggctgggggtggacagtggggggat

SEQ ID NO: 12923 - DNA, 1069 bp, Homo sapiens
gtcagtgtagagcagggagcttttcacttttagcatagatagagtggccagggccccatggctgcacctccctggacataaccaggatgtcctgtcatctgccccccaaacaaaactggggtctcccctttattttgccaacagaatccaatttttaggtgatgagacaagtgtttgacttgaaaagaccctcctgccctgcctcctggaaggtctggagcccagcccagcgccccggatcccctaggcatgtgaaacggggaatgcagtgtcctccagtggctggctgcagcttggggtgggcacctgggtggtggctggtggtccccctgcaggccactgctgccccctcttgggtcctgttctgagtctcaggcctgagtccctggggaaggccccacacctttgccctgtacctgggtatggggatggccctgaggggctgccttgcttgggagaaggggggaaaacagatatttttatataaataagaaaaagacagcccctctgggcagatgaggcctgctgtagggcagggggcttggtaaactgtgtgtccactggtctgtaacccttcagctgggtccttttgtgcagtgaacagcctggacaactgtccaggtggcccttcagggatatgttcctggacctttcttagcttctcaccgatctttcttccacgccaagtccatgttcctcagtcaaacaagtggcaaagaggaggaggaggaggggaaggaggaggaacctgcttcaccctctggcacctgcgggttttgttccacgtgtcttccttgggaaagacaaggggttcttttacagcctaggggtggtttcccctttctacttctgagtgagaccttctcaagtcacggctctttgggcccacatggctaaggtctagccacctgtgggtgtcctgtgctgcctcagtgggtggtgtgggggcggggctgacctcccccgcgcctggctcagtgcagcagaccctggcccctgtgcccgctctctgccctgagcaggagtttgattttcctaccccgtggtgaagcaagcacaggtgggcgga

SEQ ID NO: 12924 - DNA, 1799 bp, Homo sapiens
aaacagccccccagctaagtccactggttgtcggtctccatggcccatctccccaccttgcttcctcgctggcttaaattttcaagtggacgagcccttttcagcttggcttgtccacctcccaggtgtgtttcctgaagatgcttgtacttatgtctaagagcggcagctccccacatctcagccacctgcaatcgttgagggttgttggactctaaacttatgtgcctttcctgtttcctctttgccttttgcaaattgaagaaccgtgtaaaaccatttttatgtggcttcaacgtcaactataaattagcttggttatcttctaggagaaatgctatttattttggagtagtagtaaaaagggctcaaaggataaggaggccattcaggcctattctgaatccctgatgacatcagctcccaagggctctgtgctgcaggaagcaaaactgtaggtgggtaccaggtaatgccgtgcgcctccccgccccctcccatatcaagtagaatgctggcggcttaaaacatttggggtcctgctcattccttcagcctcaacttcacctggagtgtctacagactgaagatgcatatttgtgtattttgcttttggagaaactgcccttcctatgttctgagtgaatagcagtttttttgatcccagagggcaacttgtattctgtgggctggtgcctatttgcaaggtcacattagaaagacaggagcaaggcttaggcctgctgcttctggaatctcttgtgcaatagactcccctggggaagtctgctagaaatgcagatccctgggcagccttctagccttctggaataggatcatggtgggaccctggaatctgtattttaatggaccctaatgagattctgatgtagaaacatgtttgagaggcattgatctaaatctgggatgactggccaggtgcggtggctcacacctgtaatccagcactttgggaggccgaagcaggtggatcatttgaggtcaggagttcaagaccagcctggccaacatggtgaaaacctgtctctactaaaaatacaaaaaaaattagctgggtgtggtggcacacgcttgtaatcccagctactcaggaggctgaggcaggagaatcgcttgaacccgggagatggaggttgcagtgagccaagatcgtgccactgcactccagcctgggtgacagagtgagactccgtctcaaaaaaataaaactaaaataaataaataaataaatacatctgggatgactgaccaagaacaaagaatgtaggcatcaactgaacaccaactgtatacctgggactggatctgagggtaggattgccagattgagcacaaacaaacaaacgaaacacaagaaacaacagaagggtgcctgttaaatatgaatttctggtaagcaataagtaatttttattgtgttcctgtgcaatgataggacgcacgtatcctgaaaacctgtctgtagttcacctgaaattcacatttaactaggcgttctgattttatgtggccgccctatctgctgggaacataggctgatgcccctgggggttctgcgtttccttggccaggttcctgtagggctgaggtcatgggggagccgtggccagggatggtgtccttgccaggggaggtgacgggcagagctgcaggccctacaacttggggttgggcagggatgagtcgctctaccgtggtgcctctgataatagctgttattttagtttctgaaaaatgtgctgccctcaagagcttctgaggctaggcctacttgggtg

SEQ ID NO: 12925 - DNA, 1049 bp, Homo sapiens
ttcatagtccaagttccactcatctttctgttccattttcccaacacatggcttccatcctcaaggtcacctctggtcccagtgtctgcagagctccagcccttgcatctgcgtttcaggcatctgaaagggaggagggaaaaaaggttcacctcccagctgtgaaagcttctttttaagcagccctcccggccatcccacgtaacgcttctgcgaacatctcattaaccagaacttggtcacagagcctcacttgccacaagagaggctgaagtggagtctttaactgggtgcattgccatcctgagtaaaatttgggtcctgtttctaaaagggaccaatggattttggctgggtcactggtggtctctgccctgtaggagatgtgagtttttagtttaaaaagattattttcaagttgtcaagctctttgccaggggagattccttctggcagcacatcgaaacactggttccctcagcccatgccaatcaagtaccatggaccccttatccctgggggtatattccaagacccccagtggatgcctgaagctggggatagtactgaaccctgtatagcatatactatgcttcttcctatacacacacatctatgataaagttaatttataaattaggcatagccacaattaacaataactaagaatagggtaattataacaaatactataataaaagttatgtgaacatggtctctccctcaaaatatcttattgtactgtactgagggtaagaaatggcagaaatcaaaaccatggataaggagggatgactgagattgcagaatcaaatccctcctggcctcagagcttatgatcacaggttcaaagctgtgtgatgtcaaacagccctgtgggaaaacatctcaccttgtcaactaaagaaaaaaaaaaacaaaacgccttttaaagatttaaagttagtcttatttacaagtattattgagggctgtagactgagaccttcagcctggggacagttttgtcatatggctcctaaagtgtttcagctcattgtttatatttg

SEQ ID NO: 12926 - DNA, 1064 bp, Homo sapiens
aagccgtgatcacaccactgcattccagcctggcaacagagtgagaccctgtctcaaaaaaaaaaaaaaagttaaggatcttgagatgggagatgaacttggattgtcccaggggccacaatgctttcacaaggatctttgacagagggaggcaggagggtcagagtaggagatgtgacctcagaagcaggggttggagtgataaggggacaggagccaaggaatgcggaggcctcttagaagctgggaaacggaaggcaatggattccccctgagctccagaaggaagcaccctgcctgcaccgtgactttcatcccatctcaggggcagtcccagtttggacttctccccccgagaactgtaagataataactttgtattgatctgagccagtgttaattgttaattcttacagcagcagtgggaagctaatacaatgaaaatgcttccattaaagccaggtcattaacatgatagtataatctggtttgggtgggcttaaataaaatatttaaacttaaaataatgttgtgttaatatgtgaacttttgaaattgtcagtgtttttacaaaaagaccttaatgttctggaaaaagtataaatatggggtgcacattttttccttttgcttgaagctgtaatatgattcggtgaggcactgatttggccctccctgtattgccgcgacagagcctgcttgttttaaaataactttctgttttagaacagtttttttttttttgagaccaagtctcactctgtcgcccaggctggagtgcagtggcacaatctcggctcactagaacctctgccttccaggttcaagtgattctccttcctcagcctcccaagtagctgggaccacaggtgcctgacaccacacctggctaatttttgtacttttagtagagtcgggatttcactatgttggccaggctagtctccaactcctgacctcaagtgatccacctgccttggcctcccaaagtgctaggattccacaggtgtgagccaccgcgcccggcctagaacagttcaactttcagaaaaattgggaagata

SEQ ID NO: 12927 - DNA, 1047 bp, Homo sapiens
tcacgggccctgtaacttgctgaggagataccaagtcttgccttctgcacgtgcctccatacactttccccttttccacattgttctggggctcatgtcagacattgcctcatccgtcagtgtctctagtatagccacggcacttcatggtgcattggagtctggacgctggagggctcactaaaacacggatcaccaggccccagcccctgagtgtctgagtcggcagacctggcatggagcctgggaatctgcttttttatcgagttcccaagtgatgctgatgttgctggtttggagaccgccttttttttgggggggtggacagggtcttgctctgttgtgcagcctggagtgtagtggtgcaatcacagctcactgcagcctcgaccttctgggcccaagcaatcctcctgcctcagcctcccaagtagctgggactacaagtacatgccaccatgcctggctattgtaaaaaaattttgttctagagatgagatcttgctatgttgcccagactgttgaactcctgggctcaagtgatcctcctatctttgccttccaaagtgctgggattacaggcgtgagccaccacgctcagccagggaccacacttcaagaaccactgcccgaacaggtacctagtaaacaccaccacaatgataaagcaaaagaaaatccccaagcatgaccacagtactatgctcacaccaaaagtcgttctgtagggcagtaatgaggtttgaaaggtggacctgctccagtgttcagaaattgcccgagacctcatgcctggagtgggaggctctgcccggaccctcagccccttgttggttgggccccttttgggggcctcaggggctgtggctcagggaccagcacaagggactggcaccggtgacgtctgtttctggtcccggcccagcctggaagtttctgggaacctgaggaccctggagtggttctgacctctggctgcctccctgtccccccgtgtgtcccgtgggagctcactggcttgggaggcctgcttttgacaagacccct

SEQ ID NO: 12928 - DNA, 1028 bp, Homo sapiens
tcgatcagttacttgattaattaatgagttaattagctgattgagtaaagtatttattgagtacctgctatgtgccaggcatttttccaggtgctggagatacatcgataagcaaaacagggtcagcttctgtctctcgggagctggaggagatgaacaaggaaacagataagaccatttcacacaaagcaaggtggcctgacagagtgggctgggactcctgttttcaacagatgcaacagcaaaggcttctctgaggagtgggtttcagctgagcccagaagaggagagtggggagccatggaaggatctaggggaagcgtatcctagacagaggaacaggaagtgcaaagttcctgacacaagaaaaagctggggatgctcaatgaactgaaacaatgggggagagggcaggagatggaggcagagagatgggcaggcgccagttcatgtgggtccggaaaataacgacgacactccccagctcagttgcactgacacattccagggactgttctaagcactggcacattttttgacttgtttaatcctcatggtagcccttggaaaggggctcttctaatccccgtttcgtagatgaggagactgaggcacagaaaggcccaaaccacttgccccaggactccaatgtgggaaaccccagagcctggatttctctgaacctgtcccccggggctaccacagtctcacctcagccactctgacctccctcaggagttgggccctgccccttggggcactggaccatattcggcctccttagaggaaggcagtgccaggcaaagctgtctaacgagaacatagcaggtgctctgtaaatattggttcaggcgaagacatgttgcttaaggatggccctgcgagaaggctgctttcttctggagttaaataagaggtttagaaagcctccctcggagcactcaaggactgagcctgccttacccacgtgctggggacaccaccctcctgtccctgtgtaacccaggagtctcttctcagtaacttca

SEQ ID NO: 12929 - DNA, 1076 bp, Homo sapiens
tgttacaaacaatccaattctactcttttttttttttgagatggagttttgctcttgttgcccaggctggagtgcaatggtacgatctcagctcactgcaacctccgccgctcagattcaagtgattctcctgcctcagcctcctgagtagctgggaaaacaggcgcccaccaccatgcctagctaatttttgtatttttagtagagacgggatttcaccatgttggccaggctggtctcgaactcctgaccttgtgatctgcccgcctcggcctcccaaagtgctgggattacaggcgtgagccaccgcacccagcctccaattctacttttttagttattttactatgtacaattaagttattattgactctagtcaccccattgtgcaaacagtaggtcttagtcattctttcaaatgattttttttgtacctgtgaaccacccccaacttctcctttcttttaaattagaaaaaattattttcgagatagggtctcactgtgttgccagggttggtcttgaactcctgagctcaagttatcctcctgcttcagcctcccaaagtgctgagattacaggcgtgagccaccctgaccagcctgatatttatttttatatccctgttgtgtagaaataaagaaaaaaagagatatttattcaaattcagtaaaatattgtgtgtgtggctgtgtgtgttgtgtgcgtctctgcatgtgtttgtgtgtctgtgtgtgccaatgtgtgtgtctccgtgtgtgtgtgtcaatgtgtgtgtctgtgtgtgtgtttgtgtgtctgtgtgttgtatgtgtctctgcatgtgtttgtgtctgagtgtgttaatgtgtgtgtctgtgtgtgtcaatgtgtctgtgtttgtgtgtgtctctgcatgtgtttgtgtgtctgtgtgtgtcaatgtgtgtgtctgtgtgtgtgcaggggcatgtggagttctctgaactaaactccatgaggaatataatatttattaaaaggaaagtaatatgattgtactaatctgaaactcacatatgtattattaaaactcaaccacagcaattgtttagtcc

SEQ ID NO: 12930 - DNA, 1070 bp, Homo sapiens
aaacagctggaagatggtcgtaccctgtctgactacaacatccagaaagagtccaccttgcacctggtactccgtctcagaggtgggatgcaaatcttcgtgaagacactcactggcaagaccatcacccttgaggtcgagcccagtgacactatcgagaacgtcaaagcaaagatccaagacaaggaaggcattcctcctgaccagcagaggttgatctttgccggaaagcagctggaagatgggcgcaccctgtctgactacaacatccagaaagagtctaccctgcacctggtgctccgtctcagaggtgggatgcagatcttcgtgaagaccctgactggtaagaccatcactctcgaagtggagccgagtgacaccattgagaatgtcaaggcaaagatccaagacaaggaaggcatccctcctgaccagcagaggttgatctttgccggaaaacagctggaagatggtcgtaccctgtctgactacaacatccagaaagagtccaccttgcacctggtgctccgtctcagaggtgggatgcagatcttcgtgaagaccctgactggtaagaccatcactctcgaggtggagccgagtgacaccattgagaatgtcaaggcaaagatccaagacaaggaaggcatccctcctgaccagcagaggttgatctttgctgggaaacagctggaagatggacgcaccctgtctgactacaacatccagaaagagtccaccctgcacctggtgctccgtcttagaggtgggatgcagatcttcgtgaagaccctgactggtaagaccatcactctcgaagtggagccgagtgacaccattgagaatgtcaaggcaaagatccaagacaaggaaggcatccctcctgaccagcagaggttgatctttgctgggaaacagctggaagatggacgcaccctgtctgactacaacatccagaaagagtccaccctgcacctggtgctccgtcttagaggtgggatgcagatcttcgtgaagaccctgactggtaagaccatcactctcgaagtggagccgagtgacaccattga

SEQ ID NO: 12931 - DNA, 1004 bp, Homo sapiens
ttaaaaaatcagatcccattggctgaggagccaatggggcgaagctaccatctgtgggattatgactgaacgcctcttaagtcagaatcccgcccaggcggaacgatacggcagccccgcggcgcctcggttggcctcggtcggcctcggatggcctcggtcggcctcggtcggcctcggtcggcctcggtcggcctcggatggcctcggtcggcctcggtcggcctcggtcggcctcggatggcctcggttggcctcggtcggctcggttggcctcggatggcctcggatacctcggatagccggtccccgccggcgggccgccccgccccgcgctgggaccagggtccggtgcggagtgccctttgtcctgggaaacggggcgcggccggaaaggcggccgccctctcgcccgtcacgcaacgcacgttcgtggggaacctggcgctaaaccattcgtagacgacttgcttctgggtcggggtttcgtacgtagcagagcagctccctcgctgcgatctattgaaagtcagatctccacacaagggtttgtaaaaaaataataataataataaaaataaaaaataaaaaataaaaaaaccatcagatccccatggctgacagatgctttaaaggtagtgaccccatccctccaggctcagctgcttcctccactttctcctcctccaggaagccttccctgaccacagcagaccatgatggtctttcccttctctcacttccacgctctgaccccacagttggggtaagcaccagtttatcccaaagctaaggagctccggggcctctacggaaaatagaaaagtttcttaacgttaccctaataagttgtaacaaatgtagtggctaaaaacaatataaatttattatatgacagttcttttttttttttcttgatatagagtctcactctgttacccaaactggagtgcaatggcacgatctcggttcactgaaacctccgcctcccagattcaagcaat

SEQ ID NO: 12932 - DNA, 1085 bp, Homo sapiens
taggctattgaatgctgaatagatgaatttttgtaaattaaaggtactgtatcatcctcaaggatgagaattccaccttcagattactaaccttaggtttattaacaagtgtcagggtgcctgcgagtcctttgaattttttatgtaaaattctgtgtgcatttttctggtgacaaaaatgtttctagattgttacaggctcctgggcagcatctcctcccgctacagataaacctgataagaacaaatgcctaagtctctaaactctgatgaggagagttatccttttgaggatttccattctgttttcataatttttatgtgctgaaatgagttgtttatcttttgctgataaagctgggtattgctgactttctgaattattttggagttctcccttcattaatatttgaaaattattgactgatgaaacagcttagttacataataataaaagttgatattcttgaaccaactatgtattatctgctgtcatgaggaattcagtgttaagcattgctgaaatggaatttaatattctcaaacaatgctgccttcatagcagctttcatctacttttgccagactgaatgtattgatatagtacttaatagatttaaagaaattagtccctgggcttaagaaatctctgttctagagactgggacattttagaagactattgcattttcttttgttcaaatagataattaaagtgaggtcgtgtctgaatgaagtttttgctgtgccttctttataattcagcttctcttccagagctgtggcacatggggaaataagcatgggcagagaagaactgaatcaccgcagggctctagctgcaggctgcggttcagcagagtgcgcctgcagaagggctgtctgcaggaagtctttgcactggaggctgtgtctgcctgcctgtcctacctccccaaagcgcaggctcagctttggcctcagacctctctctccccccggggctggagtgccttctctgtgccccgtcaccacactggttgatgccaaggaagggagtcctcgttccctccctgtgggaaaggagacgtccttggtttccggag

SEQ ID NO: 12933 - DNA, 1045 bp, Homo sapiens
gcaggagaatggcgtgaacccgggaggcggagcttgcagtgagccgcgatcacaccactgcactccagcctggaaggtagcgagactccgtctcaaaaacgaaaaaataaaataaaaaaaaaaagttgggcctccaaagcctgaggaagcatgacatacccaacatttttacagttgtgacacttaatttcatctggcccaatctcagtttcaatccaggttgatctgtgttttgaagataatatagtgcttgatattaaatgagaaatgaaggcgtatttgttcaactcatcagaccagagtagaaatggttctacagctttttgagatacatacttctttgggaatccgtgagaaccagtggactcttttcctggagaatacacacacctacatgcggccttcacagagactcaggcacaggcgtcctgaaactggagctcgtcaacttgtgtgggaggagcagagggctcttgtgggtgttcgggtgtcacttgtgaccgtggcttcgtgttggacccttgtatgttgcaaaatagtgcacctaacaatatgtgtaacccagtaaagcttcagatgcatgttgatttcacagcttttaaatattttaattacataaagcgaaagtaatataaccagtaacctgtgtgaatgattctttgtgtgaaaatgggtttatttgttatttaaatgtttttagtgaaaggtatttaatatgatgtggtaaaccactgatagtatctgcattaggtacaaaaggactttaatttcctttttgaaaaaaagtagtacttgaagaagttaatgttttcgagtgaaagtatttataatgtctttggaatttattttcacttttgggtgtttttgtttttgattattttcccccactagactaagtccgtaaggacaggagccctcccctttagcccccaggtagagcaatgcagggcctacagcaggtactcgatcagtatttgttgaatcgaacttagttttcttgtccaaaatttggctaaaatattcagttatagttttcagcgcttct

SEQ ID NO: 12934 - DNA, 1047 bp, Homo sapiens
cccaagaagagagctcagaagtgtttgtgttactctttattgaggaataatttacagatagtaaaatttaccccttatatctgtacagttttgtgaattatgacaaacttactcaggttgtgtaaccaccagtgcagtcaaggcatagattatttccatccttccagagaagtctctgggaccttttgtagtcagtcccctcatggaatgttttgatcaacgtagaaatgcctggaggctgctgggtgggaggctgatcactcagccatcagagcgtcctgtgtctctgagccgtgcaccccattgtggcatggcactggttgctggacattcttctgcgggcccactcacacatctgcctgcctgcggcctgtctgtgtttgtcttactcatgctcttggagccgtagcgaatgtgtctaatattccttccacgtggtagattgaaacttcaccaaaatagccctgtgcgcctactttgctcctgaacatctctgatttctccggctgtccctgtgtggagttctggcagatctcaccagtctacatgacctattggaaatgccagtgggtcattgtggcattcagacacataattcaaaactgcaaatggtgggaccgcactaaagaatttttagtaattaaagtacaggaggctgaggtgggaggatcacttcagcccaggaggtcaggtcaaggcttcagtgagccatggttgcaccactacactgtagcctgggtgacaaagtgagaccctgtctcaaaaaaaaaaaaaaaaaatatagccccatcttagctgacactagtcttttgccagggccttatttgatcagacaaaagcagtgtttcggatcctagaggtctttttcaggaacaacccttaaagttttagtatccgtgtgggtggtagcccatagacatttctgcaagagaacagcattgttctgtggacatatttgggttttaaagcacaaatggcagtgtggagagggtttggagttacttttacttaggaagccgatttcctcttaggatagtctttgaaagt

SEQ ID NO: 12935 - DNA, 1036 bp, Homo sapiens
gacatttatgcaaaagccacaaaattacacctgaaattactctgtaaggagctctgggatgctgcgtgtgttaacattccattatttggcagtcagaactctcttaccgtctatttttattaggcaggatgtttgtgtaggatgtttattaggcaagatgttctatttttttcttcttagctttgctgaaaatattgtacgtgatttttcttcattgttatagtagtatttttcaatattttcatgattctaacatgtactttctgagttttttcctagtagctataatatggttagtttaatgtggttacactaaagataaaattacaatttgtagcgcggacacagtgaaatgcgcgacttttcatgggcactacttggcattaaggttgactaaaagaaggctcctctcagtgtgacccctggggagtggggcttgaagtcctgtgccccgggcctggctggccatttcaccctagtgtctgtaaataagaatgaacatagaaggatcctcattcataaaaagcagaccaaaatgaataccagcagttatctttgcataggaaggcagtggttaatgtccttaacttcacttttaaaatattaacatagcctttcatcctttagcaattggccttcctggggctggctgctgcccctccctgcagggtgtgccaggtgcaggcctgtcaccccggagcatgggtgggatgggctgctttaaggagacaggtggagtcttacaggtattcggtgagagggccctggcccagacctggagctggactccccagggtgtaccctttccactctcgctgtcaccaggagattagatgactcctgagtcctgtaccctagactccatgtagttgacagtcatcctgaaagccagatgtggcaggaaagtgcacacacatcgagcacccagacacgtggcaggcagcacaacagcagcaggagatgagagcacgctgcgtggagctgactccaggtggcccagctgccagcacactcacttgctgagcgggagggcgcg

SEQ ID NO: 12936 - DNA, 1045 bp, Homo sapiens
ttctcttgcaatcatactctatcgaatgcagtactgtttgtgaaagtgtcttataagcaatgaagtatcatatacgtgttgggagttttttttagtaattcctttaagtctgttaaattctaaaccctccatgtggctattccgaagtgagcaggtctatgcaaactcacccccaaaggctgagcgagctgagacgccaaagaaagaggctaacaaatccagtttctcgaaggaaacattggctagggacgtacgaacagaagcccccgagagacagagacggtggaccccacagccgcctgccctcagaaagtgttctttatacagcaggctttcagggtagaacgtgtgcagccggccctgtcttctgacttgcttgacaacacttgggaccactggtcaggctggatgagcatcttgatgagaggttgcctgtgccggaggcatcgtcttcagacctcattgcagaacagcttggcatgcacgagtcgagcatcggtcatcacggtggttttgcttcaggatggcgtcactctggccacacagcgggctgtcttcatacagtggtcttctccaaatccttgcacctaaaaccattttgtcccctttctttcttccttccgtcagccctgtcatcaggcaggtttcttaccttgtatcacaggatatcttttcctgtgctgtatgctttgtttcttcaaatggcaagtgagtttcttcttggaccagggcatgttacataggtccacagtgctttctctggaatggttggggctgtatgtgtttcagagttcagaatttttcagattttaggaagatagtacaatgtataagaggtgtattatgtaatccccaggtggggtctaggactgcaccctgtaatcaggcacattcacacagctctccagtgaaatgtgagtattcacagtaagggggaggagttaagattataaatagccatgactcagtttaggtcagattttgccgctcattgaattttgacatcgagcttaaggaaaacccagttttcataatgttgtggatt

SEQ ID NO: 12937 - DNA, 1052 bp, Homo sapiens
gatccataattcattagaagttgcaagcagtaatatcctgattttttttttttttttttgagacagagtctcactctgtcacccaggttgaagtgcagtggcacaatctcggctcactgcaacctccacctcctggactcaagcgactctcctgcctcagcctcctgagtagctgggactacaggcgcccgccaccacgcctggctaatttttgtatttttagtagagatggggtttcgccatgttggccaggctggtctcaaactcctgacctcaaatgatccgccagtctcagcctcccaaagtgctgggattacaagcatgaatatcctgattttattcttccttctttgtttagttgctggaatagttaaaaagaaacctttccccttcaactcttgaattgggtagtttggagaatttaactatgagcccacagtaaatacagaggacagcagagcttactgaatgtgttgcagggtgaaatcagcaaaatgtgcagtgtggcaggttctgtaggacgaatgacctggcttctccaaccaagggagccaaagcacattctgggtcacagatcatggaggacagagaggatcagcgttggactctctctctctctggtataattttcataggtcagttccctggggtcctccagagatgaccagggagagtctctgttgctgcttgtcgtccatcatcgtgaacacatggatttaaacacatctgatgttttcattgctgcattatccttaatgctcagatggtctctttggctagtagggtggactcttgagtccttttggtaggcccctcattgtctgtgacagcctttccactttttgctgtgacaaaagtccccatgctcatttcacccctttcctccctgggcctggcatcagccatttccccaggaagccctgctcctgtgtctgaagaatgtgatctagacaccgaggtcagcatgctggggaatgtattgctatacatgacgatgacctgaccattctttcctaggctttttcagtggactgggctaagatttttttaaa

SEQ ID NO: 12938 - DNA, 1040 bp, Homo sapiens
tttctttttttttaaagtttttgtagagatgggggtctctctatgttgcccaggctagtcttgaactcttggccacaagtgatccttctgccttggctcccaaagtgctgggattacaggcatgagccactgtgcctggcctataattactattttaaaatgaggaaggaggtaggagctggcagcagagcatcttgctccagggctcaccttgctgcttctgtagctggatctccatctactgctgtcttctaagaacacttgcgactttaacccatttatgcgtagtgttccattattggaacgctaagcttttgcgagttatttatatcctactgctcagggtcatcaccaaggtctgatttttcacacacacacattgcagcctctggcataaatgggttaatgaggaccaaactggagaattcaggatcatttcccgtctccagatccttagtttcgtcacatctgcaaagtatcttttgccctataaggtaactcccaggcccagggatcaggacctgaacatctttggggtcattattcagcctgccgtagaggtttttgaagataatgttatgactccatctagataaatcttgctaatgatatgttacattttgaaacaaatattgaatttaaacatttagaggtcaaagataataattatgaagccttggctgtatgagctatagatacctcctcccataagagtattattattattattttcttcttttttttttgagacagagtcttgctctgttgcccacgctggagtgcagtggtgtgatcttggttcactgcaacctctgcctcccgattcaagcgattcttgagcctcagcttcctgagtagctgggatcacaggtgtgtgccacctcacttggctaatttttgtacgtttagtagagaagaggtttctctatgttggccaggctggtcctgaactcctggcctcaagtgatccgcctgccttggcctcccacagtgctgggattacaggtgtgagccactgtgcctgcatgttttatgggctt

SEQ ID NO: 12939 - DNA, 1109 bp, Homo sapiens
gggcttctggctccctgagattgggctctgagacgagacgggttcccaaggccctggtggggctggagtctcacctgtttgcatggagaaatgggctggccccacagcctcacaggagcagtttgtgggctggtttccccaggaatccagaccctaacccgtgagaatctggattttggcttgtgagccctgcttatttggagccgggtctagagggaaccctctatcagcctcaggaaaacaagacctctgtgcacctcacttttggctcactgcagcccttgtccttcacctccacacaggaccagctggaagcagaaagaagaaaggccaatttcacagggcaccaaacaagtatgaaatgtaaatcagaaatgcagacaccccagacgagagcctcacaggagggagggggccccacaggctccccaggaggctcgtgtctttggcccagagccagccttagtttgtccctgccatctactgtctgaggccatcgctgctacactttgtttttatttgtatttcatactgaagtttctctaggttgtcactgtgtatttgtgcagagcgcctcagatcggggactgggtaccactgggcacgtgtttggcccctggatgctgctggggccgcctgcctggagaaacctgatgcctgctcagatggaggagtgctgaggcctccagagtggagatcaaatcaaattagggcaagcaggggaggagggaggctggctgactaggcttcattcctggaagcgaatctggagaaccctcaggaatgaggagtgatggggccaggggacagccgctcgtcccccaggaaggccacctagcaggaccaggggtcgcccggtgcagccgtgggcgccagtcagcctgggttcactgtgaggctagctgcgggcatttgagtagtggtggaggggtcagaaacgggaagctctggccctggttcccaagcagcggctcaaccagaagagccagtttctccaaaaatgagctggatatttgtgagccacacagcatgtgcaggccgtggggtgacctgaggccgatgcccgaggctgggaggccacagtcaagggaaatggggcccacggaaga

SEQ ID NO: 12940 - DNA, 1131 bp, Homo sapiens
caccacaaatcacgtaacttttatatgtactgagaaaacaagcgtgagccaaaaatcatgtaacttttatatgcactgagaaaccaaataatttgtgtgatttgctttattgtgatgttagtccattgaggtggtttgaaaccgaacttgccatatctccaagatacgcttgtattcaagaaccatttgttgaaaagactattctttttctatcgaatcatctttgtacctttttccataacttagtaaccttatctatgtgagtctctttctggattatgtattctttttttcgatcttgcattcaatttgctaatatctcgttgcgcatttttgtgtctgtgctcaggctgttattggtctgtagtttcttagtacggtctttggttctagtatcaggggatgctggcctcatagaatgggttgagtgctctctctcttcagtgttttgaaagatactgtgtagaatcagcagcatttcttccttaaatgtttagtaaattccccagggaagcctgtcctcaccgatggaaaactgctaatgtagagaagtcagctgaggcgtctaaagggactaaggaagggaggaaaggacaccaggaaactgtagcctaaggtccagagggttctggtccagacagagcagcagggaggccccgggagctccttcccgatgtgggctgtggtctctgcaggtgctgtccctggacaccaacatcacaaaccaggtgaataagctgaaccgagacctgcttcgcctggtggatgtcggcgagttctccgaggaggcccagttccgagacccctgccgctcctacgtgcttcctgaggtcatctgccgcagctgtaacttctgccgcgacctggacctgtgtaaagactcttccttctcagaggtgcggctgagctccagcgggcccttcactgtggagcagaacatccgagggcactgcggtgtcttgagggcttctgcagctccagctctgtgggtcacacctgctgcccctctgactcacatggattggcaacaggccccttcccaggcctccccacaccatgttcggaatgttgtcctaggaagggctcaagtgcaggtgggaggccagagtgcgtgcagctgcactcaggaga

SEQ ID NO: 12941 - DNA, 1121 bp, Homo sapiens
aggtgacagcctcaaggtctggttgtggtgaagaagtgtttttagctcaccattttaattcctttattgacttttacatattttaaattcatttttattaaggtgtaatttatatacagtaaaatgtactctgtggcgtgcagttctgtgatttttcctaggtgaatggaattgcatcatcatcagcaggatacaggatagtcaccgcccgaaaacattccccgcactgccctcctcacctgacaccctttagccactggtgtgtcttccgtccctgcattttttttctcttctagagcgtcacataagtagagacattgtgcagccttttggatgtggcttcttagcaaaacacacctggaattggttcatccacgcgctcgtgtgtatcagaactccctttctgttgcgagcagtgtccattgtgtgggcaaaccacagcttgcttttcattcactggtggaaggacatttgcgttgctttcactttggggtgattaataacaaagctgctgtaaacattctgtaggtgtaggtttttgtgtgaacataaatttcaattctctgaggtcattttttaagtgtttgtttaacttgataagaaactgccaaactcttttctgaagtggctgcaccgtgtcagggtctcctcagcagtgtgtggcaagagttgctgttccacatcctcaccaggacttggtatcattgggtttttaaattgcagctattccagtaggtgtgtagtggtatcgcattgtgtttctgatttgcatttccctggcgactaatgatgtggagcttttttttggagatggagattcactctcattgcccaggctggggtgcagtggcgcgatctcagctcactgcaacctctgcctcctggttagctgggattacaggtgcctgccaccacgcccccccaattttttgtatttttagtggagacggagtttcaccatgttggccaggctggtctcgaactcctgacctcaagtgatccacctgcttcggcctcccaaagtgctgggattacaggcgtgagccaccacgcctggctgtggggcattttttaatgggcttctttgctgtcctggtgtctgtcctctttggtgaagtttt

SEQ ID NO: 12942 - DNA, 1038 bp, Homo sapiens
gcccggagtagtttttggagaagcttgctgatgccaggggccctgcctttgcttgtgttgggagctgtctttcacgcgctacccagtgagaggcttagtgtacatggccccatttatacagttttctctctgacaatgaactcaggtgtcagcgagtgttccttctcatttccacttctcacttctctaatttacttttagctcatctaaaggctgcagataaaattattaacaatgacattttagcctcatctgtgaggcaatctgaccagccatgggtcccctcagattctagggtgtttgcagcagcccgactcagggcctgtggtgtgtgtgcctctccacagcgtacatcgtggccgtgtaccactgcatgaaggacgggctgaggcgcagtgctccagggagcacccccgtgaggaggaggggggccagccagctctcccaggaggccgagggggcggtcggagcccttcccggtgagcagtcttttgtcttttgaggccactgccatgtgccagtgacctaactcctctgtgtgccatgggtggtccccggtgccagtcccccaggtgggaggtccccagtgccagacaggtcccagacccctccctcagcatccttatacttccaggaatgatcaccttctctcaggattatgtcgcaaatgagctcactcagagcttcttcaccatcactcagaagattcagaagaaagtcacaggctctcggaactccactgagctctcagagatgtttcctgtcctccccggttcccacttgctgctcaataaccctgccctggagttcatcaaatacgtgtgcaaggtgagagtgccagcgtgcgtgtgaggagaggacactaacgtacatgtgtaaggcgagaatgttactgtgtgcaaggtgaggctgtaatgcgtgcaccatgaacgtgctagcgtatgtgtgcaagataaggacaccgacatacctgtgcatggtaaggatgttaatgaatgcaggatgaggctttcagctgtgcaagggggaggtacctac

SEQ ID NO: 12943 - DNA, 1046 bp, Homo sapiens
gcgtgagcctctgcatccggcctagtgtggtgttctgatgtctaggcagtggctttgctgtgtccttcctgtcagggtccccggcccgtcacacacttgctgctttgtactgtgctgccctcccgtcctgctttagaacacacagagtttgggatgcggtgaagcctgaacaagtttaaggaatgaaatgggaagaaacagatgaggcatgagggtgaagggatgaaatttggaccgtgacttaaggtggggacagtgagaaggggaggcgacagtgacggatttggacccagccgtgtagggaaaacctgtgcccatttcagttggagcgtcccgcgtggcagcagcgtgggaggctgagggtacgagggtgtcgtgcaccttctctttcaggatcctgaagagcatggtcgtgggctgggtgaaggagatcacccagtaccacaacatctatgcagacaaccaggtgatgcacttctaccgctggcttcggtcgccatcctctctgcttcatgaccctgccctgcaccgcacactccacaacatgatgaagaagctcttcctgcagtgagtgctcctcctccctgggctgtccaccgcgtcctcagctgggctggtcccttactccccagaaccagagacatggccagccagtgcctctgggataagtagtgtatttctgagtttgtggagcataacaatccaaaggatcccagagaaacacgcagctgctgctgcagcgtcgcctgcacatcctgcagagaacactaggtggcacctcctctcctgcccctttcctgcacaaagtcatgctacacattgtattgctgtgtgccttgttgttttagtgaaaatatgcctgtgtcaggagatctgtgtgaggacatgccatatgaaagaacatttagcctctctccagccttgtgccgttgttacaaatagcaaatcagtgagaggcttcatgcatgagctcatgcagatagatccgtggggtaattgctggggcgtagccctcttgcaggcctcagaggtgttgtaactcggga

SEQ ID NO: 12944 - DNA, 2259 bp, Homo sapiens
cccccaggggctctctttccgtttctctgactaggaaaatgtgatttctctcagtttttgccatctacaccctcaggttaaacccatgagagaatggaggaagatgaactgggaacctccccagatcagtgttgactgctgtattctgacagctcttgtctattctcagaggctgcaggttgcttttcaaaattgcgtccagaggccaggcatagtggctcacacctgcagttccagcgatttgggaggatcacttgagtccaggagtttgagaccagcctgggcctcatagtgagacctcctttctacaaaaaaaaaaaaaaaaaaaaaaagccatccgtggtggtgtgttccttgtcccagctactcaggaggctgaggctggaggaccacttgagcccaggagttggaggctgcagtgagctgtgatcacactgctgcactccagcctgggcaacagactaagaccctgtctgtaaaaaataaataaataacataaaaattacatccagagtttttagttgtaatcattgagagaggtggactgtggcgtggtgggtgtaccccgtcgctaggggcaccagaagtctaggactccgaatagcgtgtgctttgtgtgtgtaccacagacattaccacttacgcccagtgacgagatcatcgtcgtattctcgccaggtaaatcgggtccttcctcgctccaacatggtctacaatctctatgagtattcagtgccagaggacatgtaccaggaacacatcaacgagatcaacgctgagctgtcagcgccagacatcgagggcgtatatgagactcaggtgactccccagccaccctcgactgaactgggggaggctccagcagggtggtatggaggaaagaaacccgcccagggtgtgggctggggaacagcagcgacagtggactcgttcccacaggtgaggtgaatgtcagcagtgtgtctgccaaaagtggcctttgggcagtgggccgggcagctgcaggggcacagccacatcccgggcagaagtcacgtgggcagccagagcccccaccatccagcccttgccggcctgtctgcccgattcttccaggttccgttactgttccgggccctggtgcacctgggctgtgtgtgtgtggtcaataaacagctggtgaggcacctttcaggctgggaagcagagacctttgctcttgagcacctggagatgcgctctctggcccagttcagctacctggaaccaggtatggcctgcaccagccgcccatcatgtgcctgcctcccacacatctggggtgacggtcttgtttccttctccagggagtatccgccatatctacctgtaccaccacgcacaggcccacaaagcgctcttcgggatcttcatcccctcacagcgcagggcatccgtctttgtgctggacactgtgagtcctgggccctccatggcagcacattggctggggcagggtttggggaaggaggacatctcccagggtgcccaggccctccaggtcttgtcctcaagggcctttgcccatgagtgcttgtcgtgattgaattggcagtgccgtggcagtggtggagtctgccccagggctgcccccacttcctcctgcgcagggggaggctgacgtggcctgcgttggtctaggtgcgcagcaaccagatgcccagccttggcgccctgtactcagcagagcacggcctcctcctggagaaggtgggccctgagctcctgccaccccccaaacacaccttcgaagttcgggcagaaactgacctgaagaccatctgcagagccatccagcgattcctgctcgcctacaaggtgagagtggttggggtcttgctgtgtgagccccatcttctttgaggctgggtccacccaggtcttttcttccattttgccttgacccaggaggagcgccgggggcccacactcatcgctgttcagtccagctgggagctgaagaggctggccagtgaaattcctgtcttggaggaattcccactggtgcctatctgtgtggctgacaagatcaactatggggtcctggactggcagcgccatggagcccggcgcatgatccgtcactacctcaacctggacacctgcctgtcgcaggccttcgagatgagcaggtgagcacagtactgtcgttgtgggccagtggtccccaggcagagccggcctcggtggtctctgtgacccggcgatgtgccccggtgctgacctgtgccctggtgcagg

SEQ ID NO: 12945 - DNA, 1149 bp, Homo sapiens
acagcctagaactcttaatctcacgttatcctcccacctcagcctcctgagtagctgagactgcaagtgtgcaccaccacacctggctatgtattttttgtagaggctgggtctcactgttgcccaggctgatcttaaactcttgggctcaagtgatcctcctgcctgggccccccccaaagcactgggattacaggtgtgagccaccatgcctggcctatacacaactttattgaacatataaaaatttacctaagtaacaaaaagaggtaccatctttacagatgaaaggactcagtattaaaatatggcagtttgccccatattaattcataaaattcagtgtaattccaataaaaaagaatctgccaaaagctttttggatagaacttgacagacgaatcctaaaattcatataaagggtaaggataagaataaccaaagaattttgaagaataaggagggcacgttgatcttactatgtaacgagacacactatcatggcatcttgacaagatgagaggagagcagtagagccgattgggagcctagaaacagactcccctgttagtcggaagttggtaggtcacagatcgttaaggagagagtggactgcagtgagtgatgctggtgaaaatggtttttcatatttggagaagtaagttgttgtatcacactgagtgtgaaactaaggctgagtgtgatggctcatgcctgtaattgcagtgctttgggagtccaaggaaggaggatcagttgagcccagaagttccagacgagcctgggcaacatagggaggtctcgtctctacaaaaaaaatccggcacaacattaggcatggttgtgcatgcctgtagtcccagctacttgggaggctgaggtgggaggatcacttgagcctgggaggttgaggctgcggtgagccaagatgaccactgcactccagcctaggtgacagagcgagacccctgtgtctttaaaaaaaaaaaaaaaaaaaaaaaggaaactacaatctttggtaaacaactcaggagactatgatgctggggtgggaagggcttttttaaggcacatgtgaaaaacatcacaaagggaaagaatgatcaattaattaaaagttaaatcttgtgtagtctgtgacaagaaagg

SEQ ID NO: 12946 - DNA, 1124 bp, Homo sapiens
agtcacaattctctggaaatatatactaattgtaacaatgtagcctcacattaaataatgtaaacatttacctaattataagaagaatttacctccaatcagtttgggagatgttaacatccctccctcaattgatagttggagcagaccaaaaatcagcaaaaatatgtttggaatgacacaatcaactaactagatttagtcactagctataatacatttagtgaacaaatgtagtcttgcactaaaattagagaatacctatccttttcaagaatacataaaataatgaccatatatataccacagagtaagctgcaaccaattctagataacttaaatacagaccatgtttggaaatttaagaaaaaaaaaacacatttataacttgtggatcaaaaaagtcatagaacttagacaatacttggaactgaatgtaaatacaaatgctattaaaatttgtagtatgcagttaaacaggacttgtatacgcatttatatatctaaatgcatgtattagtaaagaaaaacaaatagaaaattaagtttccaactgaaaaagttagagaacaacagatccatcagaggaagtagacagaagttataaagagttataaaggtaaccaggcatggtggtgcacacctatagtcctagctactcggaaggctgagaggcaggaggattgcttgagcccaggaatttgaggttgtagtgggctatgatggcacctgtgaataggcacttcaccccagcctgggcaacacagggagaacccaactcaagaaagaaaagaaagaggttacaaaattgagccagaatgagtgaaacaaacaatacaaccaaaatgttgttctttgaaaagacttaggaaaatagtcacatctttttcttttcttttgagacagggtctcattgtgtcacccaggctggagtacagtggcgcagtcatggctcactgcagccttgacctcccaggctcaattgatccacctgcctcagcctcctgcatagctgggactataggcgcacaccaccacatccagctaatttttgtaattttttgtagagacaaggttttgtcatgttgtcctggctggtcacatctttttcaggacagagtttt

SEQ ID NO: 12947 - DNA, 1049 bp, Homo sapiens
agtgtgtgtgtccagcaccacgaagcaacacaaaacagctgcaacccctttgtcagcaaatcctctccctaccccgaaaccctggcaacccacaatgtgttttttgtactataattttgctttgtcgaaaatgtcatgtaaagggaagcatacggcctgtagcattttgggtctggcttcttggacctaacagatacacctgagtttcaccacttggttgcatgcatcagaacttccttccttcctgctgccaagtcgtgttagttatgtggaaaagcctcggtttgtcaatccatccactcctggagggacaccaggtggtttccaggtttgggccatcatgagtgaagctgccccctcttcactcttgtttctcaggaaggcttcaccaatgaccagtaccaggagctggctgagccgtcctcactcacctacgtcacccgctcagagaacagcatcttttttgaggttgatgggccctaccttgccatgattcttccagcctccaaggaagaaggcaagaaattgaagaagaggtgggactctcatagcttttgtgctttagaaaggacatggattgagatagattaaatttagcccagaaaggaggttggatcaggagccaggatagaaacagacctgggttcttgtgatcttactgattccgtttgcaccagctctgtctgcccgcctgctgtattctggctctgtggctgcaggcccttcagccattttccttttagagaagcagtggcctaagggagagagacgtttgctgcctcgtggatgacaggtggagggttggaaagggaagaggcgggcagagaggatgaggcacagctggtggctccccagcgctccttgccactgctgtgcttgccttttttttttttttcaggtatgctgtgttcaatgaagacggttctctggctgagctcaagggctttgaggtcaaacgccgcggggaactgcagctgattaagatcttccaatcctcggtgtttgaggccttcctcaagggcagcacgctggaagaggtgtatggctct

SEQ ID NO: 12948 - DNA, 1044 bp, Homo sapiens
ctcctaagtagctgggactacaggtgtgcgccaccatgcctagctaattttttgtattttttgtagagatggggtcttgccatgttgcctaggctggtctcaaactcctgggctcaagtgatccgcctgcctcggcctcccaaagtgctgggattacaggtgtgagccaccgtgcccgcccacctttttcggtatgagaaactagcagtgtatctgagctgttgctcctttgtggtgacgtagaagccatgttcttcagcacccctgtgccctggctccctctgctctgggagatctcacccacctgctctgcccatctccgtcgtgcttagattactgccggaaagcctacaagaagatccacatcaccaaggtggaagagcgtctcaccaccatctgccagcgggaaaactccttctacgtggacaccgtgcgtgccttccgggacaggcgttacgagttcaaagggctccacaaggtgagctctgaggggctgcaagctttggcctctgtgagggcagtttcagtcggctcatgaagtgggcactcttggctccttgcctgggatcctctgagcaggcacttgcactcggatggtaacgtgcaattgtttttgacttggaagagttgatggccacgaaggatgcagaccatcatccaccctggtctgaggcctcagaaggaccctaaaggatgatttctaaagtgattatttagagcaggggtcagcaagctacagctggctggccgtttgagtacatcaagttttacgaacccaactgccttcgcctattgtttatctctttcccgctgtcatgggaggtgaggagttcctagaaactctaaggccttctcatctatggtattcaccatccggcccctcgtgtttaactgacgtatttcatccggtaggaacatggaaaatgcatagcaacacctctgttttgataccaacgggtcattattttatatctgatcagattgagccattttttttctgagagaccttcactgtagactcagcacggcccctgctgtgcggcc

SEQ ID NO: 12949 - DNA, 1377 bp, Homo sapiens
ctgctgccgtgtgcacgcatccagatggccacggagcagccccaggcatgtgagccacatcccggctccccctgctgccgtgtgcacgcatgtatgccagcccgctccacccagcaggctgtgtctccgggacacacgtgttttgtcctgtgccggtctccttactgtgtgtgcggcaggctggtcaggccaggctttgctttctgtgcttcacacttgaccctgggctcttgatttttgatggccctgctctctggcgttctctcctcagactctggccacgtattctgtgtcagatgctgtcgccacttactacctgtacatgaagtacgtccacccattcatctttgctctgtgcaccattattcccatggagcccgacgaggtgagcattatctgtcctgtcggcaccctggcctcctcagcccttgccccattccaaatgcactggagctgaatggaggtggatgtcccaggagtgctggcaccagaggcggcagtagaattctggtgtgtgacgtcagggatgtcctttgggaattctctggccctggtgtgaggaagaaaccacaggaggcagaatttgcagccatttaccacgaggttttctctcctttcacactgaagttcagcttaggttcctggactttgcctgcaagtcagggcctttggtgttgcttttggctggaagccttggtttctcttgcaggtgctgcggaagggctctggcactctgtgtgaggccttgctgatggtgcaggccttccacgccaacatcatcttccccaacaagcaagagcaggagttcaataagctgacggacgacggacacgtgctggactctgagacctacgtcgggggccacgtggaggccctcgagtctggggttttccgcagcgatatcccttgccggtttaggatggtgtgcttcttccctgggattcagattcttcccactcttgtgctgtggtaggacccagaagctgcaggggctgaaataaagccccttctccccatcctgtcccacggcccctcaccgggtgtggcttctctggcccagcaccccccgggggcttctttagggcagtgcactgcagattgtgcacatgagtccttccggagctttctcgggcacaacctgccacgtgcagccacagcgtcaaacctgaggcaggctagtgtgggtgtgtttcccctctgaccccgtcgtctcactgttgtgctagaatcctgccgcctttgacttcctgctgcagcgggttgagaagaccttgcgccacgcccttgaggaagaggagaaagtgcctgtggagcaagtcaccaactttgaagaggtaaccatcagggaggcaggaagagccagtctgtgtttggcgc

SEQ ID NO: 12950 - DNA, 1078 bp, Homo sapiens
ccttctcccacccaggaatatggctgcaacccttctggtcatagcgtggtccttatctaaagagtgggggacacatgagggaactttgagtgaatcaggtgggagatgtgaaggttcccagctctcctttcctctttaacgtcattgagggccacagagaggccactgtgagaagccggaggtgatgggcatctcttttagccatcagaataaagctttcaaggattatgagggagaaattgagagagatccccatttggaggccgttacagtgtggttcttgtgaataaggctggtagtgttaatgtaggggtggagtaaagacctagatgagagggtttgtttctaaagtgctgagtttcccgaaaggtaggaggaaagtttctctaactgtgtagaggatggtcttgtgtctgtgttgactgattctcttgtagaccgagattttagatgaagataagcgcttaggcagtgcagtggattactactttattcaagatgacggaagcagatttaaggtaagcccctgactgcgacaagctaaaacccacttttatgggtgttcatgtagctctgtgactgtcagggagggcatgggaggcttccagtgcacagcagcccatagcccagcagaactcgggcccctggaggccccatcagtcatcacgtaagatgtcctgagagaggtcagttcaggaagactctgaatggtgagaagtagcgtgtctttcagattcttgcccctgtgaaaagtgcgcattctgacttcctgtatgctaccaaggtcaaggctaccctggccctaggctgttcatgggatataggagcaagcaatgtgttttcacttttctctcgctttcttctttctcatcacccctggatgggttggtgactcttaacaggtggctttgccctataaaccgtatttctacattgcgaccagaaaggtgagtgtgtttcatagactcaggtcagacgacctgtgtgtcattctgtggtgggctttgcaactgggaaataggcaaggaaggaaatgtattttaccaatggaaagccttttcattctgatcctgattag

SEQ ID NO: 12951 - DNA, 1028 bp, Homo sapiens
attacgggtgcattcaactatttaaaagattaaacctttattatacagtatggtggtgtatcagtttcctattgctgcagtaacacatgatcacttagtgactatataaatttattctcttacggttttagaagtcagaagtcgtaatatgaaagtgtctggttggttatatttattgtgatggttcccgggggagaatctgtttccttgctgcttcttcatcttcagaaccaagggttgcatctcctctcccccctaccctctctctcccatccctttctccttcctgactctagctctcctgcctcactctacaaggattcttgtgattacactgcgcccacccagctaagcagaatctcaaggcccttaatttagtcagatctgcaaagacccttttgtcttgtaagataacattcacaggtttgggggattaggatgtgggtctttcatggggggtgtcatcctgcctgcctaccacaagtggttataatctttcatgagaagtaaggatcctagtcttggaatatggtcattctgctcttgagttgaaggtgatccaaggaataccttcagacaaaggaagggtcttcctttctttttttatcttgttctttttttattttattttttttttagacggagtctcgctctgtcgcccaggctggagtgcagtggcatgatcccagctcactgcaagctctgcctcctggattcacgccattctcctgcctcagcctcccgagtagctgggactacaggcgcccgccaccacgcccggctaatttttcgtatttttagtagagacggggtttcaccatgttagccaggatggtctcaaactcctggcctcaagtcatccaccctccttggcctcccaaagtgctgggattacagttgtgagccactgcgcctggccctcaacctttttttgaggtaattgtagattgattctcatgcatttgtcagaaatgatacagagattcccgtatcacttcaccataacatcttgtgtaagtagagtacaa

SEQ ID NO: 12952 - DNA, 1286 bp, Homo sapiens
cgagagtctgctccggattttcaaaccacactgtcagaaatgctttgcaacgctgacattaagcattgctttgtgatggtatttaggaagcaattctgtctgagagatccttgcctatgtgtgacagtaaaacactgtcgcctctaagatctgccccagcagctgtttgctgaggagaaggcagctctgtgagatccatgttcctgtgggctgagctacacggcacctccagagctcctacacctccttcctggtccttctgaggctcatgcgaagcccaggcatggtcagcatctgtggtcacgctggggcctcggtcacgttgtagcttcacatgccacagagcctgctacagggctggctgcatcctgcatcccacccttcccgtcactcagagagagacccacgcttgtgtgaagatgaggaaggactctaaagtgttatgagagacaaataggatcagaaagccaggcacaaaactgtccagagaccgtgagtcccatctgtagacagaaattgttaaaagggactcaaatcaatatgccaaaaaagtaaacattagtattttatgagtaaagtgtaggtaaattgtaccgtatacctaccatgcaccctatactgtacatactgtatgtcttcttttcctgtgccactgaaagagggaaaaaactgccaattaacctgtaaaatgccaacatacataggatgcatccaaatataagatagtaatatgtaagacagagtatttgaattgccctaattttcagtatggaaaattagtactcttgaatggaaattcttcagtaccttcagtactcttgaatggaaattgtcgtactttttcttaactttcattttaggttcaggggtaagtgtgcaggtttgttatataggtaacctgcatgtcaccggggtttggggtacggattatttcacctggtgatcagtatagtacccaggaggtagtttttccatcctctccctcctcctcactccctccaccctcaaccaggccctgctgacttcttgttccttctttgtgtccatgtgtgctcagcgtttggctcccactcataagtgagagccatgtttggttttcttgcctgtgtcagttcccttagggtcatggcctccagctccagccatgttacttcagaggacatgatcttgttcttaatatcctgtggtatatatgtaccacattttctttatccagttgaccgttgatgggcatacagcacttttacaattagaaaaaaattaaaagcataaaaactatgataagc

SEQ ID NO: 12953 - DNA, 1064 bp, Homo sapiens
agagacgtggtttcaccatgttggccgggctggtctcgaactcctgacctcagatgatccgcccgcctcagcctcccaaaatgctgggattacaggcgtgagccaccgcgtccagccaagaaaaaaagtttttaatgaaagaaacagaaactgatgccattatataatgaaccctagtacccatcacccagcttcagcaggtgttagtattttgtgactctttgatttttttgtcttgggcctaggtgaaatgacaatggatgctctgttggctcgattgaaacttctgaatccagatgaccttagagaagaaatcgtcaaagccggattgaaatgtggacccattacatcaactacaaggttcatttttgagaaaaaattggctcaggctttactggagcaaggaggaaggctgtcttctttctaccaccatgaggcaggtgtcacagctctcagccaggacccacaaaggattttgaagccagctgaagggaacccaactgatcaggctggtttttctgaagacagagattttggttacagtgtgggcctgaatcctccagaggaggaagctgtgacatccaagacctgctcggtgccccctagtgacaccgacacctacagagctggagcgactgcgtctaaggagccgcccctgtactatggggtgtgtccagtgtatgaggacgtcccagcgagaaatggtaatgggaccgtgtgtaggatttcctcacacagatagcacatacgcggaggggcgggatgacgtctgaaaatggaaaactacagattaagaaggaaaaaatccaatcccctccatctcatcaccccagttaaccattgttaacatttttatgtagaacttttctgaaatatttgtgaatttaacatgagaactgttaaaatttgtgaggtaaattggattctatgagatatgctggactgagatattaatattaactggctgctgctgttggttaggaactttgttgattagtcatctccgcctttttaaaatgcagtgtaacctgcacatcttttatgttaatgaatgcaaatggcca

SEQ ID NO: 12954 - DNA, 1849 bp, Homo sapiens
attccggccgcggaaagggcagttgcggggacttggcttcccgggccgggggcggaggggccacgccgggttcgggggtgagagctttcccgggccctggagcagcctccggggaaggcggcgggggcccggcgaggcgttagcggagactcttgctgcggtctctcgagacctggggagggatggcccaaaggagggcggcgcggggaggaaacccctgggtcccggatgtgtttggaacgtgaagccattgcggttactggtcatggaacataaggcagagacggaaaaggcaaatgtaactcaggggtttggggccagaggaagagggagaaggtggccatttattgctttgcggtagactgtcgggtctgggtgatgtggagatcagaggtgggttttggtcgttttaagtttgaggtaactgatacagtgaactgtgtatttcagctccatccccttttcctggcatacaactcttgaaatcccgggaacctccaaagtgatgtcttttgtaggctgagtggactggtggccggcagcccctagggagcttctggatggggctggtcgcaggaaagaccaaggcagggttagaggttctggggactttcagccccacccccaacctctggggaggagagaggggtgaaggttgcgttgatcaccagtggctgatgaatcacgcctgtgaaatgaagttcctgtaaaaacccaaaagggctgggttcagggagcttccagatagtacgtgggggttcctggaggcggtgcccagagaggccctgaatttccaagcgcttccccccggttttacgtcacgcatctcttcacctgtattctttgtaatcctttatactctgctggtaagtgtaagtaaaacatgtctgtgagttcgggagccactctagcaaattaccgcaacctgaggaggtcaccgggttacgccccgtcggtcccaagcgcaggtcaaacaacctgggcactggaagtggggggcagtcttgcggggctgagccgttaacctgtgggggtctgctggtatctccaggaagacgctgtcagaatagatgactgaattaggatgacagacgacacccagcctgtgtccactgcagaactgacgacctgcgtgatttgtggggagaaaatccccacatacctggtgtccgaagcatgttgcaagactagtgggagaaactgagtttgtttttactctaaattgtcagactgttagtcactgcggagaggtgctttctgatgattgagtggggattcctgtccaattgtgtgagtttgtgtctcggccctaccacttttttttttttttttttttgaaatgtagtctcgccctgtggcccaggctggagtgcagtggcgcgatctcggctcactgcaagctccgcctcccgggttcaagcgattctcctgcatcagcctcccgagtagctgggattacaggcgcctgccaccacgcccggctaatttttgtatttttaatagagacggggtttcaccatgttggccaggatggtctcgaattcctgacctcaggtgatccacctgcctcagcttcccaaaatgctgggattacaggtgtgagccatcgcaccgggccctaccacttattgctgtgggcttaacctgttttcagcctgctcttttaggaatggggatgatagtgatacctggttaggcttttttgggagttgggtaagtgcagcacttggtatgtgttaagcacctctgagtgctgttactgtcaccagcggcatcatccaggcagagctgcggacaaggtggcggcgggtgagggtggtgttttgagaatggctgaaataaaaaaata

SEQ ID NO: 12955 - DNA, 1050 bp, Homo sapiens
cgtggggttttcttgtcaaataaactcggccgggcacggtggctcacacctataatcccagcgctttgggaggctgaggcaggaggatcgcttgagcacaggagtttgagaccagcctgggcaacataattagaccctgtatttacaaataatacaaaaataaaacccaggcatggtagcacgtgcctgtggacacagatgcttgagacactgaggtgggaggatcgcctcagcctgggaggtgaggctgaaactgcagtgagtcatgattttgctgctgcactccagcccgggcgatagagactctgtgtctgaaattcaataaataaatcaagtgcttcctctcacctggttgctttgtaaaatgttggggagattgattcagttgccattttctttgggctcactaagggctggggtggggaggtcgcaaaggccgggcagagctggcccctcgccacgctgttgcagctgaggaatagcacagctgcgagccgatgtcttgtgtccgtccgggcttcacccctcgcaagtggtgacttttggcaaatttctcacctttttgatcctcagcaaaatgaggccaaattgaggtgaatgagaaccttctcatgtaagggttaagttaggtggtactggaacatgcttggcaagggcctggtaccatcgaggcagcaagtgggcggggtgtgagagcacacctgtgcctgcatgtatccgtgcatgtgtgaggtgtgagcatgtgtgtgtgcagcgtgtggagtgtttgtgtgcatggtgtgtgggatgtgagcatatgtgtgcatgcagtgtggggtgtatgtgtgcatgcagtgtgaggtgtgagcacatgtgcatgtgtggtgtggggtgtgaacacgtggggtgtgagcatgtgcgtgtggggtgtgagcacgtgtgtgtgtggtgtgtgggatgtgaacatgtgcacgtggtgtgtgttacatgagtgtgtgtatgtgatgtgtggtgcgtgagcatgtgtgtggtatttattacaactggtgctgcttgcttgccacagatggt

SEQ ID NO: 12956 - DNA, 1032 bp, Homo sapiens
tcatggccgctgcctgcacagccatctccagaggacagaaatgcagcagccttgatagctgttctcctttagctgtggggcgctggacaatttcttacctctctgagccgcatcttttttttttttgaggtggaattttgctcttgtcgcccagggtggagtgcagtggtgcgatcttggctcactgcaacctctgcctaccaagttcaagcaattctcctgcctcagcctcccgagtagctgggattacaggcactcgtcaccataccctgctaattttttgtatttttagtagagacggggtctcgccatgttggccaggccagtctcaaactcttgacctcaggtgatccgcctgcctcggcctcccaaagtgctgggattacaggcgtgagcctcatctttataaaatggggatagtgtcacctactcgatagccttgtggaaaaattaaagaagaagaaatggtgtaaaaccccaaggcagtgtatggagggaggttctgtgctggatgttgctgggctggtctcgttgccgatcttgccagttgtacagggagctctctgcagcctcacgtggtttctcatctcctgcgactgctcccacctctctgtggcattagctgggctgcccggctgggatgagaagaatcacgttgcgtcagccatagtgcttcaagggcttagtagagaagaactgaaaagaatttcaagtttcaagttaggaatttgtgttttccctaagaagtgtaccccgatgtgaggctgtgttcactgcgggggcctctggtctcttacccggtagcaccaagcaccgctcttgtgagagcatgtccgggtctcactcccgaaaggaggcagctgtcgccacacgagaaagtcggggaggctctgctcaccagtgggtccaagtccttctcacggggttgctggcctgggctgggcctggcctcggtctcctggttggggggcggccaagctgcccatcctgggccctcagtctgcagtcggtagacaggatgaggaggtggat

SEQ ID NO: 12957 - DNA, 1063 bp, Homo sapiens
gccgggcggcctccggggctgccagagcagcagggtgaggggctcggaggccgcggcgcctcggggctcgggctcccgctcccgctcccgctcccgcagtgcatgggcgggggaggctcgaggggcggcggcggggcctgggcgcgtccctgcagcgtggcgggacggccccgttccagtcacccccgcctcgctgcggtggcctcgggcctgggcgcccgccttcagctgcggcggagctggctctgtaaatgccggtgcccgcgagccctcctgaatgcttgtctgcgcccgacgagcgcggcctgtcccgaagctgtccactgccaccactcgggcagtgcttgctttagcctggccctttgcagctgaaaggcgtgacatggtgtcgggtggttcgtgggaagtcggggtttcaggagtccgtgtacttccttgtttgtctttgtcgctggccgacttgtcttcattccaggtggccagagcgagtggggccgggcgttgtcacgggtatgaacccgacgaatgtcagtcgtgtggcgggtcctgggtattgtgggtctgggtcactgcccccgcggagcccacctaggacagggacacccagggtcgccagcgagagggtaccgggcggtggttgggtggggtccgctactctaagtgggagcctggggggcgggcgacttccgtgctaaggcctctatgacgagaagcaagccaggcaaaattgtgagaaaagcgcgcctcaggcagaaagtttgaagaccctgagggcggaggatgtggccacagtgtaatggcaaagggggaaagcgatggcggtaaggatgttggtgtaggcaggtgctggattcttaagaggttggagtttattgtcactgggccagtgtaagccatttacagatgactcatggattttttttttttttttaagagactgggtgtgttgctgtattgcccaggctggtgtggaactcctggcctcaagcgatcctcccaccccagcctcccaaagtgctggtgttacaggtgtgagcagccacacccgtcgtcgtggattatt

SEQ ID NO: 12958 - DNA, 1050 bp, Homo sapiens
cccgtgaactctgcaaacagatgaaaggaactctgcacattttaaatgctccttatctgggaaggtgtatttcgcatagaatgaacgtaggagccgctgaggaagggcctccttgcttttccgcgggaactcaagagtgacaaccttccaacttctgggccagaaacacttgctgtctctgttgtttgtgttcctgaagtcataatctactcgcctctgtctttcctgaaaacacagaggccgtgtggcctctgatttcttttcattaaccaagactgacttaaagggtttttaggttgaacgatggctgggcccctgtaggcccttccgtggtggggctgctgcggaccttggtcgagggtcgcggttgcatctgtgggactgtctggacactgttcctcttgcactttcagtttgcagccctgcatgcacacgttctgcgcggcttgctactcgggctggatggagcgctcgtccctgtgtcctacctgccgctgtcccgtggagcggatctgtaaaaaccacatcctcaacaacctcgtggaagcatacctcatccagcatccaggcaagtgagggcatccacaccagcacccgggcacgtgagggcggtccctccaccaccacccaggcacgtgagggcatccacccagcagcacccgggcacgtgagggctgtccctccaccagcacccgggcacgtgagggtggtccctccaccagcacccgggcacgtgagggcatccacaccagcacccaggcacgtgagggcggtccctccaccaccacctgggcacgtgagggcatccacccagcagcacccgggcacgtgagggctgtccctccaccagcacccgggcacgtgagggctgtccctccaccagcacccgggcacgtgagggtggtccctccaccagcacccgggcacgtgagggtggtccctccaccagcacccaggcacgtgagggcatccacaccagcacccgggcacgtgagggtggtccctccaccagcacctgggcaagcgagggtggtccctccaccagcaccc

SEQ ID NO: 12959 - DNA, 1049 bp, Homo sapiens
atgtcccctccccccagcccctggcagctgcgtgtgctttcggcctctggatttttctgttctagacacttcacagacatggaatcatgcgtgctcttttttgttgttgttgagacggagtctcgctctgtcgctcaggctggagtgcagtggtgcgatctcggctcactgcaagctccgcctcccaggttcacgccattctcctgcctcagcctcccgagtagctgggactacaggtgcctgcaaccacgcccagctaatttttttttgttttttgtttgtttgttttgagatggagtctcgctctgtcacccaggctggagtgcggtggcgcgatctcggctcactgcaagctccgcctcccacgccattctcctgggtccacgccattttcctgcctcagcctctgagtagctgggactacaggcacccgtcaccacgcctggctaattttttgtatttttagtagagacggagtttcaccgtgttagccaggatggtctcgatctcctgacctcgtgatctgtccgatcggcctcccaaagtgctaggattacaggcgtgagctgccgcgcccagccgtgactgggctctttcacttagcgtggtgttttcagagttcatccagaagaggatgttatttaaaactagttttgcagatgctgttccttacggcatgactcttacctcttccatggtcattgggaagaaattccatctgggtgcagcgtgacgggaatgttttctgttttcttttagggtttgtcacgtggaggatgtgtacatatggattctctaaattggatcgcgctatacatattatttttttttaattttcttagctattctctattctagattatgttttgaattagcttttccagtttaatagaaaaatctttttgagatttttgatttggggagaattgacagttttacagagcccaggaaaatggtgtttctccttgtttgttaagctcttcctgttcttcagtgaagtctcacggctttcttcgtgtcgtctgggctcattcttagtcctggagtgc

SEQ ID NO: 12960 - DNA, 1060 bp, Homo sapiens
ttgcataaatgcaatcacactacacatactgttgtagcgtcagcttttttctttctttcttttttttttttgagatggagtttcactgtgttgcaggctgaagtgcagtggtacgatctcggctcactgcgacctccgactcccaggttccagccattctcctgccccagcctcccgagtagctggcattgtaggcacacactaccaagcccggctatttttttgtgtttttagtagagacgggatttcaccatgctggccaggctggtctcgaactcctgatctcaggtgatctgcctgcctcagcctcccaaagtgctgggattacaggcgtgagccatcgcgcccggccagcttttttcacttacggtgttttatggagcgcttcacatgtcactgcatctacatccagctcatcttttcattatcttaggatagtttctttgtcacttcccttattggtggacatttattgttttgactttttcttactataaataacactgcagtgactctttcccaaactctgccttcatgtctgttttcttgggatgatttctcggaagggaagtctgtgtcagtgttactcagaatgtgcctattcctttttttctcttttttgagacggagtctcgctctgtggctcaggctgaagtgctgttggtgcgatctcggctcactgcaacctccgccacccgggttcaagcgattctcctgcctcagcctcccgagtagctgggattacaggtgcccgccgccacgcctagctcagatggggtttcacaatgctagccaggctggacttgaactcctggcctcaggtgatccacctgcctcagcctccccaagtgctgggattgcaagtgtgagcccccacacccggccagaatgtgcgtcttttaaatctgctgcaagtggcaggtggtcttctagcagtatgttgagagtgtgctgttctcactgcaggattttttttgtttggtaaagatcaggctctgtgagattctttggtaactgatagtttcagggatagaagactaggaagtaggttttaatagga

SEQ ID NO: 12961 - DNA, 1033 bp, Homo sapiens
gggagataacttgttttggctatgtccccacccaaatctcatcttgaattgcagctcccacaattcccacatattgtgggagggacccagtgggagataactgaatcttgggagtggtttccctgatactgttctcatggtagtgaataagtctcatgagatctggtgatttgacaaggggtttcctttttgcttggtgctctgattctctcttgccaccagcatgtcagaagtgcctttcacccaccatgattatgaggcctccccagccacatggaactgtgagtccattaaacctcttttactttataaattactcagtcttgggtatgtctttatcagcagcgtgaaaatggactaatacagtaagtatatgaaaaatttgatttatacaatgaatacggtgggtttaactgatataggacaccacacaaaatgggatataatctaaagtggcacttactggaaaatgcattaccccaaatgcctctattaggaaaacaggatcaatggaaatgtaagtgttaagcatccaacccaagagattaggaagaatcctagaaaatatccaaataaaagtagcaaaaaggaaataatgaagatgaaaatgagaattaacagataataaatccacatctaaaagcttctttcttgaaaagactagtgaggcagggcgcggtggctaacgcctgtaatcccagtactttgggaggccaaggcagatggatcacgaggtcaggagatcaagaccagcctggccaacatggtgaaaccccgtctctaccaaagatgcaaaaaattagccaggtgtggtggtgtgtgcctgtaatcccagctacttgggaagctgaggcaggggaattgcttgaaccctggaggtggaggttgcagtgagccgagattgtgccgttgcactccagcctgggcgacagggtgagacgctgtctgaaataaataaataaataaagactaatgaaatgcaaaacttccattgctagattagaaatagacccagaatagtcaacacagtatt

SEQ ID NO: 12962 - DNA, 1047 bp, Homo sapiens
tttaaaaagcaaacagtgtaaaaaaagtcatctcccagaagacactactcgttacatattggatgactcattgaggtgaaaaccttattagtgttgtgatagtagagaagcttttagtcaaaagtcagtttattaaatgtttagaatacctaaacaggaagaaaattctattgttttttataacaaagtggaagatttcaagaaaggacaactcactgtacacttgagaataatacctacagaggttcatactgaagagtagtctcaataatgtaaagaatttgacaagcatgatgctattgaaatagttctgtaaggaagtggtgttctttatacatcaattattacaaaaagcagtgaattgtaagtgtgaggtgtgtttacttagatgtgaagagttctccttactgctgtgatggaataacaagggtcagatttcctctcctgccttaaacaactggaagctatacaatacgtataataggtaatggtttttagacataggacaagcacaggtttgtgatcctcaggagactgcagacagagtgaggtgagcaccatggtttctcagcctgcccccgcatggcagttcctaggttgcagttcagggaagggaaacaataaatctcgctgaattgaagagacaggactggcagttggggaggccacagcagctagaatttccaggggaaagtactggagagatgggatccttctagatacagggctcaagaagtctgctgggagtcccctgagtcctttgacttagtactgacttgcactgaggccaggaaaagaagcactggaaagcagcaggctgaacaattcctggaactcatgcagggctgggaatagtttatgttctcagcagccagagtggaaacagagtggaaacacatggagcatcaggtagaattctcagaaaggttttgttttagtagtgcagctaattaactctagattaaaagctactctggacctacagtgtccggcatccaaaaaaactaatgtgttatgcaaagaagcaataaaatatgacttataacc

SEQ ID NO: 12963 - DNA, 1015 bp, Homo sapiens
tgaaaccccgtctctactaaaaatacaaaaattagctgggcatggtggtgggcgcctgtaatcccacctactcaggaggctgaggcaggagaattgcttgaacccaggaggcagaggttgcagtgaaccgagattttgccactgcactccagcctgatgacagagtgagactccatcttaaaaaagataataataagttagtggcctttgggtatctgtgattagtggtctatactgtgccagtctgtggagtctgtggtcaggtgtttctggaggctgttgtggggccactagagttaccgcctggggtctttgttggatggtcactggggaacccatagtgtgtgtctctgaaggccctggaggggcggcctcttggggagagagactgggtggcctgtgaagtcagccattgtggtcctgtgggagtgatgggggcacatggggtgagtgagagtggggttgatggggttcggtggttgtgtggtctggaggtctgtgaagcaggcctattggattcagtgatctggggatgtcttgggatgtggacctggagaattctcaggtggtcactgtgagtgactgggggacttgggatgctggaggttggcaggggcttggagctgcggagttcagtggtttgtgtctggggtgtgtgtgtgatggaggccctctctgggacttggtaatccggggaacttggcagggccgtgttggtgggtctggaagcagatccgaatgtgaatgggtcgtgggttggctcaggcaagcctctcgtgagtgacaggtctttttgccctttggccctctccttgtagcttgtgaccgctgatcagtgatcactctttttacgtgattatttccttttttaaaagttctcagtgaccccgttggccttaaggtcttctccttgtagaatttcccccttgctgtttgtacctcctaggcctcttccatccctcctgatgacctccggctcccccacccaagacctttgcatctgaggtgcctggag

SEQ ID NO: 12964 - DNA, 1012 bp, Homo sapiens
ctgctatagttctccaacatcacatccttgtataaattcttctgagagggatccagtagctgccactccttttgggtgaagtccacagataaatcgtcaaatgagaatgactcctgtaagagcacaatcctggtaaatctgaagcagttaacaccgtatgatgtgagaaaaaaatattggagctttagcacttcattctcataacaagttatacaaaatgcctactatgtctctacctttgcatattttgtgtgataaaatgtcattgtgcattcttccatccttccatttatacaactgttaacctaaagattaaagagagcctctccagaagaaaatgatgtttgtttgggaacagagtactgccatgagaagacaggtgccatagtaaactacatgtgtatccagggaggtaaagaaagacgaaggtgtctacagccagtacggtcataccaccctcaacgcgcccagtctcgtccgttctcggaagctaagcagggtcgggcctggttagtacttagatgggaagaaagacaaaagtttttaaaggaaaaaaatgaggtgcatcacataattgttttgaaacagttatccttggctacaaagatcaataacaagggtgacaccagtccaaagctggacaggcagctgctgggcagatgtcccaataaaagtattttttgtgtaaggcttcaatggcctttgtacgaggctgtggcttttgcagtcttttgtgataatttttatcaggcatgcaagtgtgagaacacttttttcacaggcttcccaagctctacctgtaggggttaaaaaaattaacactagtgactccattttgattctgacaactttcacagaagacacgcaaactggaataggtgactttaaaccccctgaaccaccaataaaatctttactgaacctcaaatttggcactggaagaggtagtagcaaaagaaagaaaataggataggcaaggtggctcacacctataatcccagcactttggagg

SEQ ID NO: 12965 - DNA, 1033 bp, Homo sapiens
ctgtctctaaagaaataagtaattttttttttttttttgagacagagtctcgctctgttgcccaggctggagtgcagtggtgtgatctcggctcactgcaacctccgcctcccgggttcacgccattctcgtgcctcagcctcccgagtagctgggactataggtgcccaccaccacacctggctaatattttgtacttttagtagagacgaggtttcatcatgttagccaggatggtctcaatctcctgaactcatgatctgcccaccttggcctcccatagtgccaggattacaggcgtgagccaccacacccagccaaaaattaaataaattttaaaaatgaaggtcaacagtctaaatacactaacttaagacattgtcagagtgcatcacaaaacaagacccaactatatgttgtgtacaagaaacctagtttaaatatgaagatgcatatagatttagaataagtgagtacagaaaggtataccatactaacacttatcaaaagaaagagacgtagctaaattaatttcagacacagcagacttcagagcaaggttaaagaagagcattgcataatgataaaggagtcaatactccaagaaagaaatcataaaaatccttagtgtgcatgtgcctaacaacaaaccatcaaaatacattaggcagagcctgataaaacagcaaggagaaacagatgaatgcactattacacttggggacttcaacacccctctttcagaactggacagatccagcaggcagaaaatcgttaagaacacagctgaacttaacagcaccatcaatcaactgatatcagtagactacttcattcaacagattacacattcatctccaattcccaagacattcacgaagatagacgcaattcttagtcataacacacatcttaacaaatttcaaagaatagaaatcatataatatgtgctgtcagaccacaatggaatgaaaccagaaatcagtaacagaaagattaaaaggaaaatctcaaaacacatggatattgaaca

SEQ ID NO: 12966 - DNA, 1081 bp, Homo sapiens
aacaatactgcaatcaataatattgtttatatattgtgctttcctatcaactgttctctacacttcccagggtgatccatctaaagtactaacctgatcacataacatttcacgtttaatcttcttctggcctttttctccagttaagataaaatctttttacaagaccttgctcaaactcttgccttttcaggccttatctctggttattccctttatcttcactgtctccctaatttaacctgtcctatttatcctttaggtattgtgtccttcatctgctttaacaatacttgtcacactttcacactgtattgcctgtttgtgtattgtgccctctacactgtaagttttggtaaggtgggaactttgtctaaatttttcattgttttattacttggcccagtgtaggtgttcagttaaatatttacggttcttcagcaaattttgtgccttttcttttacttaccattctagtggaagtttaacttaaaagctatttaagtgattgtaaggtaaaagttgcaaggaggtgggtgcaatggcctgtgcctgtagtcctatctgctctggaggctgacgtgggaggattgcttgagcccaggagtttgagaccagcctgagtaacatgagactccattatagtaaaaatgcatggaattaatttttcttctaggtataggaaaatgttgcaccataacaggtgtgcagaaactaagactgttaggacaacagcagtttaatgttatttatattatgtccctctcctagtccttctcctctcttccctcatcccactcaccaccaccccattcactacacagacttattttttgtagagcaagtgttcatattctgttccattatgtattataatatgaaaagggatgagttgaccaagtattggtgggtgtgtcgtatacttgctttagactaccaatggaagcgtaaattagtacaaacttactgggtgggtgtggtggctcacatctgtaatcccagcactttgagaggctgaggtgagtagattgcttgagcccaggagtttgaaaccagcctaggcaacatggcaaaaccccat

SEQ ID NO: 12967 - DNA, 1035 bp, Homo sapiens
aaaatatatattttgtagagacaggctcttcctacattgctcagactggtctgaaactcctgggctcaagcagtcctcctgcctttgcctcccaaagtgctaggattccaggcatgagttaccatgcctggctcttactgattttttttaaagcactacataaatacagtcaacgcagtcaccatattgtagaaaaacagaagtatatacagttaaatgttttatgttggatgtacacatttgaagaggaacatagaaaaaaagtatggaaaaggaatgttgaccgagcttttatgcttaagcagcagatgaagatagaaccaagatcactgaaagcaagtgtttagaacagcaaaaagagtatcccaacatttcagcattggaactacagaaagttttcagacagaggggaagttaccaattttaaatgctaagtaaagcatgagattttgctgcttgatcttgcagatactgaccagattagttctaacaaaatatggaaggagtggcatacggtggaagaaagaaggcagtagctgctgttgtagttattcatgttagcctcagaggatggtgagacatccagatgaagaggttggtacgcaattctagaattgaggaggtgtctagatagagatataaattgtagtgacatcagtaaagagacaataacaggctttggaaggtgagtaagaatgaaaagggaaggtctgccacctaccctgaagacatacatttaaaggaactatagtagagagataagaggaaaacaagaagagtggagtttcactgaaccaagacaaacaagtttcaaaaaggaaggtgaagttggccaggtgtggtggttcacgcctgtaatcctggcactttgagaggctgaggcaggcggatcacaaggtcagatcgagaccatcctggccaacatggtgaaaccctggttctactaaaatacaaaaattagccgggtgtggtggcacatgcctgtagtcccagctactcaggagctgaggcagaagaatcacttgaacctgggag

SEQ ID NO: 12968 - DNA, 1031 bp, Homo sapiens
tattctaaacatggaatgcacttcacacataatatgtttcctgtacctaacaatttgcatatggcacagaatgcctgtgaatgtaataaagatgaaacgctgtgtcatcaatcatcccttaagaaacaaggacaaactcatactgaaaagaaacatgaatgcaatcaatgtggaaaagccttcaaaaggatttctaatcttactttatacaagaaaagtcacatgggtgagaaacaatatgaatgtaaagaatgtggtaaagtgttcaatgattcctcaaccttaaggagacatgtaagaactcacactggagagaaaccctatgaatgtaatcaatgtggaaaagctttcagtcaaaaaacatcccttaaggctcacatgagaactcacactggagagaaaccttatgaatgtaatcagtgtggaaaatcctttggcacaagctcttaccttatagtgcacaagagaatacacactggagaaaaactctatgaatgcagtgagtgtggaaaagccttcaacacgagctctcaccttaaagttcataagaaaattcataccggagagaatgtttatgaatgcagtgactgtgggaaagttttcagtggggtctcatcccttagaatgcatataagaactcacactggagagaaaccctatgaatgtaaggaatgtaggaaagccttcagtgtttcctcttcccttaggaggcatgtgagaattcacactggagagaaaccctatgaatgtattcaatgtggaaaagccttcagtcagagctcttcacttattatacacaagagaattcatactgagagagaaaccctgtaagtgttatgaatgtggaattgctgttttcattgtcttaaggtggattccaagctccttgtctcagtctttgttctctaaaagaacgatttaaggttacaaatggctctttttttaatataacattttctgtaaatactaattatgactttttttgatccatggctgtttagaattaggtatttttaatatgtgaggtaggt

SEQ ID NO: 12969 - DNA, 1029 bp, Homo sapiens
gtttttggtttgttgttgttgttgttgttttgagacggagttgtcacccaggctggagtgcagaggcgtgatctcggcttactgcaacctccgcctcccgggttctagtgattctcctgcctcagcctcccaagtagctgggattaaaggcacgcaccaccacacctggctaatttttgtatttttagtagagatggggtttcgcaatgttggctaggctggtctcgaactcctggtctcaggtgatctgcctgccttggcctcccaaactgctggggttacaggtgtgagtgaccatgcctggcctgtttgtttgatttttgctctcttaaccttatcatccagcagaggatgaattcttttgtttaaggattgttggatatgataatgtttctaattttttgaggaatctccacactgatttctatagtagttgcaccattttatattcctaccagcagtgcacaaggattccagtttctccacatatttgccacttgttattttctggcttttaattttttatagtggcccatcctaatgagtgtaaggtatttcattgtgattttgatttacatttctctagtgattactgatgttaaaacatcttttcgtatgcttcttggccatttgtacatcttctcaaaagaaatgtcttcgtcttttgctctttttaaaatcaggttatttggtttttgttgttcagtggtaggagttctttgtatcttctggatactaaacccttatcataaatataatttaaatagttccttctagtctgtatgttgcctttaatttgttgattatttcctttgctatacagaaatttttgagtttcgtgtggcctcatttgtctgtttttgcttttgttgcctatgcttttggtatcatagccaagaaaccattgccaaatccaatgtcatgaagatttccccgttttcttccaggagttttagagttttccatctttcatttagatcttttattttttgagtcagagtttcactcttgttgccctggctgaagtgc

SEQ ID NO: 12970 - DNA, 1031 bp, Homo sapiens
atccaatttgccagtctgtgtcttttaattggagcatttagcccatttacatttaaggttaatattgttatgtgtgaatttgatcctgtcattatgatgttagctggttattttgctcgttagttgatgcagtttcttcccagtctcgatggtctttacaatttggcatgtttttgcagtggctggtaccggttgttcctttccatgtttagtgcttccttcaggagctcttgtagagcaggcctggtggtgagaaaatctctcagcatttgcttgtctgtaaaggattttatttctccttcacttctgaagcttagtttggctggacgtgaaattctgggttgaaaattattttctttaagaatgttgaatattggcccccactctcttctggcttgtagaatttctgccgagagatcagctgttagtctgatgggcttccctttgtgggtaacctgacctttctctctggctgcccttaacattttctccttcatttcaccttcggtgaatctgagaattatgtgtgttggagttgctcttcttgaggattatctttgtggcattctctgtatttcctgaatctgaatgttggcttgccttgctagactggggaagttctcctggataatatcctgcagagtgttttccaacttggttccattctccccgtcactttcaggtacaccaatgagacgtagatttggtcttttcacatagtcccatatttcttggaggctttgtttgtttctttttattcttttttctctaaacttctcttctctcttcatttcattcatttgatcttccatcactgataccctttcttgcagttgatcgaatcagctactgaggcttgtgcgttcgtcacgtagttctcgtgccttggttttcagctccatcaggtcctttaaggacttctctgcattggttattctagttagccattcgtctaatcttttttcaaggtttttaacttctttgctatgggtttgaacttcctcctttagctcggagtagtttgatcgtct

SEQ ID NO: 12971 - DNA, 1050 bp, Homo sapiens
ctgcacccagtgtcccgcacccactgtcctgcacccactgtccgacagtccccagtgagatgcacccagtacctcagttggaaatgcagaaatcattcgtcttctgcattgctcatgctgggagctgcagactggagctgttcgtattcggccatcttggctccacctcagtcacttttcttttgttgctttcaaaattctctttgcaattttgacaatatgtgattatagtatgactctatataggttttgctgagattatttttattggagtttgttgagcttcttgaatttgtatggcaatttctttcctcaaatttgggaaatttggggtctgatatgggttggctgtgtctcacccaaatctcatcttgaattgtaactctcacaattcccatgtgttgtgggaggaacctggtggaggtgattgaattataagggtgggtctttcctgtgatgttctcatgatggtgagtgagtctcatgagatctgatggtttttaaaaaaacgggagttttcctgcacaagctctcttctcttgtctgctacaatgtgagatgcgcctttcacctttcgccatgattgtgaggtctccccagccacatggaactgtaagtccaatatatctctttcttttgtaaactgcccagcctcaggtatgtctttatcagcagcatgaaaacagactaatacagggtcattatttcttcaagtaggatctcaatgctgtctctcttctatgtttgggatatccgtagtccatatgttgtttcattcgatgttgtcccataagctccttaagttcccttcatttttcttcatttttttccctctgactcaataatttcaaatgaactgttttcaaagttactgactctttcttctctttgatcaagtatgaaccctccagtcaatttttccattcagttattatattcttcagctccagaattttcatttggttcttttctatagtttctgtctctttgttgataccctcattttgtacatgcattgttttcctgattttgttttgtggtgtatgttct

SEQ ID NO: 12972 - DNA, 1031 bp, Homo sapiens
ggcatttaaaccgctgtttccatcagcactccaagtcaggagagatagaaatctgctccttgggcgaactgtcaaaaggcctgcgcattggactcatggttggttcccttctctttttctctcttgagggagaagaggattggaaattttcttccaattataccacagtgtgctagggataataggtagggtgacaaataatctctccttggccacactttagtcagattcctctgaaccctctacttaaccaggacttgacctttgagctcctgtattcatctttgcatcacaaaactatttcttgcagttttagcaagaatcctccactcttgacatctaatcaaattcatcatcctccaccatcctccagatgacattcgatcatcctggtctgccttcagcaagaatcctgtcaaatcagttttaccagaatgtcacccttcccttgacgttgcctcttagtaattttccatccaatgcccgcctctacccccaccccaccaccaccctgcactctgctctttgactgtaaatccccacttgtcttgctgtaactatgacaattgtccttgctgttctctaccagtggcaagtaaaatgccacaccgtttcctacctgtttcattgcatctcttggctttgtgcacctttgggtgctgcaaactctcaactggtttttggagttctcaggcaattttgtccatatgatgttgttaagttgatgtctctatgggagaatgagggtctggggtttcctattctccatcttgcttatatcactcagcacactgttacttcataagtacatcaaaactggacttttttgttttgtttttttggagatggagtctcactctgttgcccaggctggagtggagtgatgcgatctcggctcacggcaacctccacctcttgggttcaagcaattctcctgcctcagcctcccaagtagctggtattacaggcgcacgccatcatgcctgggtaatttttgtatttttagtagaaacggggtttcaccatgttag

SEQ ID NO: 12973 - DNA, 1047 bp, Homo sapiens
aaaagcagtcttttttttttttttttttaaacagggtcttactctgtctcccagcctggagtgcagtggtgtgtgatcacagttcactgcaaccatgacctcctgggctctaacaatcctcccacctcagcctacctagtagctgggactataggcatgcagcatggtgcctggttaatttttttaacttttgctgacatgatgtctcactatgttatgttgcctaggctggtctcaaactcctgacctcaagcaatcttcccacttcggcctttaaaatcacgctgggattacaggcgtgagccaccatgcctggtttataacaatctcttaattggctttcctgactttaactccttcaatttaatctccatagtgtaggtagagcaattctaaaatgcatatgtggccctgtcattctgccacttaaaacctttcagtgtctctctactgtcttagaaataaattctagcctcttttacaaaggttacacagctatttattgtttacaatcccctgctcacccctccagactcacaaaacaaatagttatttggtccaaaatgtcaataatgtgtgtcagggttgagaaatctagtcctagaggatgggctccagaaaatgaaggagtcagccatgaaagaggaagaaacggaacccccacaataagagatccaacaggagaaggaagcaaaagaaatccccaggatttatacattataaattaagagcagtgaccaacaccaagttattcctgctgctgttggacatctccaactttgaaggcttccacattagcctggtgcttatctttccttctttcattttcctaatggttaggctattcctgtgcccactgtcagtggtgacggggcagcctgagaatcatattctgggatttctgtcagctttagccttggagctggtccagagaggaacaaacttcagatgctctgaaagtcttaatatgggccaggcatggtggctcacacctgtaatctcagcactttgggagtccaaggcaggcacactgcttgagcccaggcg

SEQ ID NO: 12974 - DNA, 1940 bp, Homo sapiens
aattctactaataagaatttcacttctagaaatttatcttacagaaatatagacacacacacatgcactatatatatcacagtttatacgtagcaccatatattatatatgtagcagttgtaaaacaatatgcaatagagcccattttaaagattatgttcacatggggtcaggcacagtggctcacgcctgtaatctcagcactttgagaggccgagacaggtgggtcacttgaggtcaggagtttcagaccagcctgggcaacatggcaaaacctcatctctacaaaaatacaaaaattagccaggcgtagtggcctgtgcctgtagtcccagctacccaggagactgaggtgggaggatcacttgagcccaggagttcaaggttgtactgagctatgaccataccactgcactccagcccgaatgaccaaaaaaaaaaaaaaaaagattatgtgtgtgttggtgcttctatgtgtataggctaaaaatttgtgatgtcatattacaaattggttatctttgatgaatgggaactttatttctaaaatatatatggtgtatatatgtatatagtattttagtgtgtatatatatatgtatatatatatacacactaaaatagtatatactgaaatggcatatatatatattagagacagggtcttgctctgttgcctaggctggagtgtagcagcaggatcatagctcattgcaccatgaaactcctggctttaaacattcctcccaccctggcctctcgaagtgttggaattggtgtgagccatggtgcccaacattttttttttagagacaggatctgatatggttagcctttgtgtcctcaccgaaaatctcatcttgaattgtattcctcataatccccacgtgtcaagggaagagtcaggtggaggtaattgaatcctgggggcagtttcccccatgctgttctcatgatagtgagtgaattctcacgagatctgatggttttataaggggctctcccctgcttcgctcgtctcttcttcctgctgccttgagaaggtgcctgacttcctctttgccttccaccatgattgtaagtttcctgttgggaacaggccccccgacatctggccataaactggccctaaaactggccataaacaaaatctctgcagcactgtgacatgttcatgatggtcataacgtccacgctggaaggttgtgggtttactggaatgagggcaaggaacacctggcccacccagggtggaaaaccgcttaaagccattcttaaaccacaaacaataccatgagcgatctgtgccttaaggacatgctcctgctgcagataactagcccaaccgatcccattatttcggcccatcccttcgtttcccataagggatacttttagttaatctaatatctatagaaacaatgctaatgactggcttactcttaataaataacgtgggtaaatctctgttcgggggtctcagctctgaaggctgtgagacccctgatttcccacttcacacctctatatttctgtgtgtgtgtccttaattcctctagcgccgctgggctagggtctccctgactgagctggtcttggcaagtggcatccatcttggggccacaaatacaggttgaagggttgccagagcgatggttggagaacgtggaactagctggaggacacccgagtactcttaaagcaatccccggggtgagtaagaaggggagctcagaagcatcagggtaacaatgggacaagtgtgggctgtggttcattccaccttttggaactttttcacactgatggggaggaggaaggagagtataacaaagtaacagaagaggttacagagcaggtttatttgccagctaaagctaaagcagcaaaggagggagaggttcatccctacccttctgcactccctccttattattttg

SEQ ID NO: 12975 - DNA, 2025 bp, Homo sapiens
tgccgtaagtattccttcaacaagagctgacacagagaacaattattcttattgggcatatttatcaatcttggctggcaataatgcctggatgtaatcactctatcacacagttacacatgctttctgatctcagtatttaccataataaatctgctcctataattgaggcataccgccctcaaaaacctatttgtacacaggattggacccagttagacaaaatgaacatacttgtttaggaagattgcattgcagaacaggcagaggtgctgcacaacgattcctatggaatcattattaattggtcccctaaggggatgtttagcttgaattgcacctctcagtctgtgtgccactgctacactatgtttagatgatctgaacaaaatggtcagatggtagaaatgataaaaagtacggcaagagttcctcttatctgaaaccatggcggtatagtggcacctcaacctcagatgatatggcccgttgtaggagctaaacataagataaggatttgtggcttaataagatcaaaaatttgggaaagaataaaaaagcatctagaaagacactctacaaatttgtctttagatattgcaaaattaaaagaacaaatatttaaagcatcccaggcacacctgaccttaatgccaggaactggagtgcttgaaggagctgcagacagattagcagctagtaacccattaaaatggataaaaacacttggaagctctgtgatttcaatgatgattgtgcttttaatttgtgttgtttgtatagtctgcagatgcggatcctgactcccgcgagaagtagctcaccatgacaaagctgccttggcttttattgctttgcaaatcaaagaaggggaacatgttgggaacagcacccccccccccaaaatctggccataaactggccccaaaactggccataaacaaaatctctgcagcattgtgacatgttcatgatggccatgacacccacgctggaaggttgtgggtttactggaatgagggcaaggaacacctggcccacccagagcggaaaaccgcttaaaggcattcttaaaccacaaacaatagcatgagcgatctgtgccttaaggacatgctcctgctgcagataactagccaaacccatccctttatttcggcccatcccttcatttcccataagggatacttttagttaatctaatatctatagaaacaatgctaatgtctggcttgctgttaataaatacgtgggtaaatctctgttcggggctctcagctctgaaggctgtgagacccctgatttcccacttcacacctctatatttctgtgtgtgtgtctttaattcctctagcgccactgggttagggtttcgccagccaagctggtcttgccatttcctgaggcctccccagccaagctgaactgtgagtcagttaaacctctttcttttataaattacccagtctctggcagttcttcatagcagtatgaaaacggactaatacaggatctcactctgtgtcacccaggctggagtgcagtggtgctcaggcaagccacagtccttttgcctcagcctcccaaatagctgggactacaggtgcgtgccaccatgcccagctagttttttttttttttttttatctttgtagagatggtttctcactatattgcccaggctggtcttgaacccttggcctcaacatctcaggtgatcctccacctcagcctcccaaagcactcactggaattacaggtatgagtcaccatgcctgacagacagacagacatatatatatatgtgtgtgtgttttttttgagacgaggtcacactctgtcacccaggttggagtgcagaggcacaatctcaggtcactgcaacctttgcctcccaggctcaagggatcctcccacctcagcctccctagtagctggggccactggcatgagccaccacgcccagccaattttttgtatttttggaagagacagagttttgccatgttgcccagcctggtcacg

SEQ ID NO: 12976 - DNA, 1033 bp, Homo sapiens
cagtccttatggtgatgtttgtccagtcatttttggttatctgaagttcatgctttagtaccggacgtctcaaagtgtggactccggcaggagcatcagtccccagcagaggtgcatgcaagagtttgcaacccacctctgtggtaggaaggctcttgagaacaatattcactgacttcttttgtttcctaacagtgtgttggcagcctttctatctgaatgccagttgcagattccttagtgcacattttcttttctcaggtgtcttactgtgttaatccattgttatctggcacaaaacattgctcttgatgaccagttgagtttatttgtcttgtaagtgacttggggtctttttgcctgatgctccaaagtttttgtttgttttctcttctgttttatagacatgtctttttggtatgcttttattgcttttaggatagtcaacctggctaattaaaaaaaaatttttttttagatcttttgtttctgtcttctctggcctacttggtttggaatctaatcctagcagtttttcctccttgtggggcttggtcctggaagtcctgaggagagcttcactggtcccttttgcagggcctgggaggggtcagccacctctccccttctccgccttgcccagtgcacagcaggccccaccccacagctgctctctcaggcagcagcagcctgggcttttccagattgttgccttcgcttcccctgagtgaccatccacaccacatgggccttaccactgttttagttttggtaaggcctgtgtggtagggacttgggacttactaaaaccaaaagctgtctgtggggagttttgttttgctgtcctagttgccttgttttttatgaggtgattcagggagattggaaaggttaagccagtgccaccatattcccacttgttaaccttggtggtgtccatttcttaggcagtgcagggaagacatttttaaagtatatctggccaggcgccgtggctcacccctgtaatcctagcactttgggaggccgagag

SEQ ID NO: 12977 - DNA, 1033 bp, Homo sapiens
tcctcctttgctattttacaatgacagcttacctatttatctttatgccttcagagtaccatggcttctaaatgtggatcgttcatattacttcccaaagaaaattggggattttatcaattaaaagaccccattatacaatgacttgtgttaaaagtgtacataaagctttggttaagacaccacaaatttcataaacaacattgtgggttttttatacttcagacaaatgtatgttaacaaggctattgtgtgttccagatggcaggcagcagattctgagtttgggcatggacctgcagttggaatggatgaagttggaagatttccaaaagcaccttgatgggaaagatgagaattttgctgcaacagatgcaattccaagtagtgagtagttttggaaatattgaaatccctttcacaaatctagatttataaaatctaacttattttttctttcattttagatgtgttaagggatgctgtgaaaaatggggattatattactgtaaaagttgcacttaattcaaatgaagaatataacctggaccaagaggtaatatgtcgttgaaaaatctcatgaaaggaaaatggaaagtaacacttgaaagaattcagtttaacttttcatttattttaattacaaaaggctgggcgtggtggtgcacacctgtaatcccagcactttgggaggccgaggcaggaggattgcttgagcccaggaattcaagaccagcctgggctccatggtgaaaccccaactctacaaaaaatacaaaaattagctggacatggtggtgtacacctttggtcccagttacttgggtggctgaggtgacaggatcacctgagcctgggaggtcaaggctgtggtaagtggagatcacaccactgcaccccagcctgggcaacagagcaagactcccatctcaaaaaaaaaaaaaataatgcacgttcactttgtaaaataaaaaaattgtagaaccctataaatgtacaattatagtccctttaattccaaccccctcccctc

SEQ ID NO: 12978 - DNA, 1027 bp, Homo sapiens
ggccccaaatatgtattttgcgctgttttgccccacttacgcaggagggggctgttgtgcgcatggtgggggtaataatagaaggaccgaacctccttgacctcttattcccttctctgcctccttctggcagaaagggttgggttctcccaccaggttgtgtgtttttgatacatttttcttttttcctcctatcccaggaccaagaatcgccttcagccctgtctggtgcatccttggcagaaagtgaggaggaaaacacccccattgtgagtcctttgcccctaatttgttgctaatagaggacattgtcaggttgtaggggttaagctatgggacctggccctccccgttgttttgagggggaggagctttcccttgggtggcagctgcccccagggcgaagcctgggtaatggctggtgaggcagctgggagtgggcgctgctgtttccaccgctgcagacatcgctcctgctgctgcaataccaacctcagcaaccagacgacgggcttctgcagctgctcacgttacccgggaggaggggtggtgcgaaggagggcatatttctggtgccctctagagttccaaaatgggaattaaagttatttcttgttgaatgctgtgcatgcaacctgaacattttttcttccttaaacaatggctaattgattgaaggaattggaaacatagaaataatcatttatatttttgtttatgtctgctggaaacacatattttgacacttatggctcatgagttgctagatctttttcatgtatttgcttaggaaagggagtcaactcctctagtactatcttgttcaccaagtagtatgctgatcagtccagtgtactgatctagttaatttcttcgttccccatcttccatgttgatcatctttaacttaacgatcatttttgaatgtgttaccagagaattatttaatttgttggttttaaggcaactatgtaatgtgctagagaggaagatgaagatagccagtcatattttccttcaggcaatt

SEQ ID NO: 12979 - DNA, 1051 bp, Homo sapiens
ctagtgaatttcaaggtcagattagtttttgtgaatttataagttagtctaaagagtttttaaaaatttatccataaaaatgtttttttatattacaagttaatgttaaattgtaatcaggataaatttgctaggaatataactaattgttgcaacttcatatgcaaatgttgggaaagatctgttaaaactcttgcattaaacttatttgtctctaaccatgcatttaggttggataagaaaaatacttaagttagtgggtgcagcgcaccagcatggcacatgtatacatatgtaactaacctgcacaatgtgcacatgtaccctaaaacttaaagtataataaaaaaaaaaaaagaaaaatacttacatagctattctaagtaacattgggatgcacagttagaagttgcagacagaataatgtttgtaaaatgtgactataatacagtgagacaaattctttttactttatagccatacatgtgtatattactctctgccgtagtcacctggataccatctctggacttactagtgtaagaattgacaactaaatttttgggttttgttacttaacattaaaaaatgacttctcttctaatactggaacagttttataatcattcatttcaaagaggtatgtctttttcctaggaagaatagtgtttcttggaatatcaagttggactagacagagtgttcagggtaataatcaggggactgatttaacaaattggatattacaacacctgttatatattagatagtcataaaatatgtgttctgttaattatgggctagcagtttctttggctctgcttggaagagcatttcatctagacttagtgaattgtgtttctagttctatagaactaaggaaaggtttgggtggaagtgaaaatataagttaaatgaaaattttattttatcctcctgtttagatttgtactttttttcgttccaggcttgtcatatcttattttaatcattttaattatttctggccctgatatggtatctgaattcttttttttttttttttttttga

SEQ ID NO: 12980 - DNA, 1146 bp, Homo sapiens
tgggattatggtcgtgagccaccgcgcccagcctgcttgtttttttacctaaagaaaaatttgcacttgttttaattagttataggaaaatcatgattataaaatttaacaagttttagctttataactttactatgaatattgtctcactttattttgatttttgtctgtcttattattgtatagtcctgtttcttagccaaataagtgttaactcctgcctaggaagtcattccatcctatgtctctgtacggttttacattgcttatggaagagaagcttctgttccagttagtctctcttccatgacacagactcctgacttctgttatttcatgttttctttatttgtatatcacattttcctttttcaaggaccttactcttctgttttcattcagtcttcctcctggacttacctgttcatttgtctttccttttcctaactccttttgctttttttaaaaaaagagcacagtatctgtaatagcatcctatataaaagtctgattatactgtccttttagggggtatgtttccaaattacagtaaactcgtgaatttggtgagatcatgatatgtgagtatggttctagagatatatgagggcctcacatggaaagggaactagtgagtactaagagaagattggaagggtaacgacttaattttgcagattttctgccaaaaaaagccatttttctcattgtagcatgacatgagttggagtcatacagattcaggcttaaatctgccctgctcatgaagggagttttggggtgatagagtgttatataaaactggattgtggtgattgttgcagaagtatatacatttaatacatttatcaaatctttcacttaaaataagtaaattttactacacgtacattatgctttaatataactattaaaaacaattttgctccagtatttaccagtttgcgatatcaggcaagtcatgtaacatctgagctgtagttcagtcagttaacaaatgagtatggtaatgcctggtttcctgagattgttgaggtgaggactaaaaataatacagggtatgcagctggccaatagtaggtgctcagttaatagcagctgcaattcttaaactgtctgtttatatggaccaaacataatgaattt

SEQ ID NO: 12981 - DNA, 1279 bp, Homo sapiens
attgtacagagtaatttactcaactgcaaagtggggtcgtaatatagtataaggtcttttcaaggaacttgtgatgagagtgctgtcaagcatgtttttcataattggtagttattgtgttagatgtatgatgaaattcagaggcaaaagtataactcaagatatgaaggaagggattgaataaaagagatcagcaaaataagacttactgaggactgctttctttagttaagatttattgagggttgccttctttgcttcaggctcactttatttactagataatttaaaaaataaaaagctattgaattgtaagtgataagattttttattttctgaaatttgtctaataaggaaattctgatactctatgctctgtattcctttgactttttttttttcttttttaaagcaatctgaaacatttgaacatctcaagaaaaaaatgctggttaaaaaagagttttgagtcttatgaaacagaggcaagagatttttacttagtaatagtctgtattagagaaatagattcttagtacctgaagtctaccttattggatctctggtctcatttgcttattgatgcaagtattgttgtttctttaggttagatgaggtcttaatcatggaacatttgaagtcacgtaaagaaggtaatgtttttttaaaagccctctactccatctgtttaaacattatggaaaatttgttatcaaaaacagtcattacactagatcatagatttggaacaccaacaagtggtcataagaataaatgaatgtttgatgatttgtttccaaattaacgtgtgtagttgaagtttatttatgctgttgtagtttttaaactatgtttggagaaggaagtatgggtttatttaccttctttggtaaaggggatcacagggatagggtatgataacctttcattagggactaaaatcaggtcatgttactaactgtaattacgcagatgaatatagaagtaaaaaaaattaggaccaaagacaaaggatagagataaattatattttagcttgtttcatcttttgaggaagttattctaattttccatttttaacagggaaatgggcttgggggtgaagtgattgtcctatgcacacaagaagagagagagccagaattcagtgtgggtcagggaggagtgaaaaaaccccaaaccaaaaaaaaaaaaaaaaaaaaaagggcatcctctcagaaaggttatttgttaaagaaaaatattcattcagtaaatatttattggccaggcttttatt

SEQ ID NO: 12982 - DNA, 1020 bp, Homo sapiens
cagtttatgtttcttgtttgtaggcactggagtttctcttccattatctgtgtggtgaggtactgacctgacaaaaatttccttaaatgtctgcagagaaaagagaaaatggtcatgtctcagtaaatctgtgatagatgctacagggaaagctgctcctgcccagaaggctgaaaccaaggaagtgtctgctccagaccagcccaaacacacaatcccaaattttggtaaaagttcctatcagccctgtgtacagccagctgtgccaagaacatagtatgctattcccaaagctgagttgggatgaggaatgagggatagtggctggtttgtactattcacttatgaatgatcaccagcgtctccctggattgctcctgtatttgttttaggtgtacagtcaggttctagagatccaaagtagttggtttcaatcattttttcccactcaatggttgcttgggtggaagtacttatacctagaacttcttgccacaccatttcgcctaaagtctctgtcttcatctgtattttttcttttttaaaaatttgttatttcatctgttttttttatgtcagatttacaaggatcttgtaactttaaaattataaaaataaatgttcggtattcttgtaatttatttttacattaaattttttattaaataatttttaaatttaagactttatcttgtattaacgtttatgtatgatgaggggtaggtggctccccaaatttttatttttatgttggaatttctttcggtgtgagacaagaattcaaagtaatatttctcagttgcttcccagttgttttatactacttttctgaaaaatttatataccctattgaaatttcattgtatactaaattccttgatatattgggtctgtttcagactttttttgtctgtttggtccgtcttttcttattccctacctcactgttttatttattgtagcttcataatatgccagtttcttctgttactcatctctttttagaattttcctgttctt

SEQ ID NO: 12983 - DNA, 1055 bp, Homo sapiens
atgagatgttctgatacaggcatgcattgtgtgataatcacatcatggagaatggaatatcccttcaactatttatcctttgtgttgcaaataatccagttatactcttattttaaaatgtacaattagattattattgactatagtcaccctgttgtgctatcaaataataggtcttattctgtttttctgtgcccattaacccccacctcgccactacccttctcagcctttgctaagcatccttctactctatctccatgagtgttctgtaacttttaaaagtcatcagtataccttgtagattttttttcatgtcagtaagagatcttgcttttaaaataccctaatctgttcactttttctcatctcccatcaccaccctttttcagccactgtcatctctcacttggaccatttcaatggccatctagtttgtttctttgcttccagtttttccctcttgttcccacatagcagccacagtgatctatttaaaacctgagattgtatcacctctttgctggaaacatggcagtgtttcctgttccagtaaaatccaaactttcacctttagttagaattaatgctttctaagcttaggcagggctgtttacctgttttgattactgatttttgccatgtgcctagaaagtatcttgtgcatactaggtgctctgtaaatctgttaaatgtaattaatgaattagctagttggccttgatgtgttattctctgcctgtttatctcattttatcctcctctttgcttcttactttgatctgccacattggctttattctgctgcttggattggccaacttcattccctctaggctttgcagaagctgttttctttgcctggaatatcctgtccccagttttctcacagctgaatcttatcatttcgtatttcagtgtaaatgtcacttgcttaaagagatgttctctgatcaccaaactagttatctcttcaccttctgttattctgtttaaaagtttttaaatttagtttaaaaaaaagtgataaatcacgtggcccaaaattaagaaaa

SEQ ID NO: 12984 - DNA, 1513 bp, Homo sapiens
ttatatgatacagtgaataaatgggataagtgtataatgaagtaattattttttgtcagattttgattttttttttttcctgttcagatgtgtgggaggatttatccatatttttagtgataaattttatggagtaaatagtgtacccctgaaaggaggtggtggtggtggtaggaatatattgcatatgattaccatgaatatattgcatatgattaattatccaataaaaattggataattgccttccttgttatcctgcaaaagttaacatgtaaactatatgaaatgattaatgaatggatatcacatattttcctgaatgttagacaagaatcacttcatttagaataaaaataaaataaaagtaccctttaaatcaatggtttcagttagagtaacataaaaagtcatactgacattttaattcttttttctatcttcctaacaggttctttggcatggacacaagttcagtgggaggattagaattgactgatcagactcctgttttattagggagtacggccatggcaactagtctcacgaatgtaggaaactcatttagtggtccagctaatcctttagtgtctagatctaataagtttcagaactcgtcagtggaagatgatgatgatgttgtttttatcgaacctgtacaacctcccccaccttctgtaccagtggtagctgatcaaagaaccataacatttacatcatcaaaaaatgaagaactacaaggaaatgattccaaaattactccttcctcaaaagagttggcatctcagaagggaagtgtaagtgagacaattgtcattgatgatgaagaggacatggaaacaaatcaagggcaagagaaaaattcctccaattttattgaacgaagacctcctgagactaaaaacagaaccaatgatgtggatttctccacttccagtttttcaagaagtaaggtaaatgcaggaatgggtaatagtggtatcaccacagaaccagactctgaaattcagattgctaatgttacaactttagaaacaggtgtaagctctgtgaatgatggccaattagaaaatactgacgggcgagatatgaacttaatgattacacatgtaacatcactgcagaataccaacttgggagatgtctctaacggactgcagtcaagtaattttggtgttaatatacaaacatacaccccatctttaacttcacagaccaagactggagtaggaccttttaatcctggtagaatgaatgtggcaggagacgtttttcagaatggagaatctgcaactcatcataatcctggtaagcagtaagagatactctacttcatgtaaatgaatttaaacttttggctgctgcttttttcattgtagtaactggtattaccttgtttagtttcatcatgtgaaatatgtgaattatattgaattttatcttaagtttggtattttaataagaattgtaaaaccatgtatagtatttttctgtggattactaaaaagttaat

SEQ ID NO: 12985 - DNA, 1027 bp, Homo sapiens
tctggagtgcagtggtttgaacttggctcactgcagcctctgcctcacaggctcaagagatcctcccatctcagcctcccgagtatctaggaccataagaatgtgccaccatgcctggttaatttttaaaaaatattttttgtggagacagggtttcgctatgttgcccaggctgctctcaaactgctcaagcaatccacctgcttcagacccccaaagtgctgggattacaagtgtgagccaccgtgcccagccacaaaacagccttattgctgatgtggagaaagtttaagtggtctggatagaagatcaaaccaactatgacatttccttaagccaaagcttaatccagagttaggcgctaactctttttcagttttatgagaactgagagagataaggaaacaaaagaaaagtttgaagctagtaaaggttggttcatgaggtttaaggaaataagtcatctccataacataaacgtgcaaggtgaagctgcaagtgctgacgtagaagttgtagcaagttctccagaagatctaagataattgatgtaggtggcaacatgaaacaacggattttcagtgtagacaaaacaactgatggctctcttgttagaggttaatatacttagtgactgtaagttgaagccagtgctcatttaccattctgaaaattgtagggtccttaagaatgatgataaatgtactctgcctgtgctttatcagtggaacaacaaagccccgatgacagcatgtgtgtttacagcatggtttactgaatagtttaaactagtgttgagaccttttgttcagcagaaatgattccttttaaactattactgcccagtacacctggtcatccaagagctctgatggagatgtacaaggagatgagtgttgttttcatacctgctaccacaatattcattctgtagcctgtggatcaaggagtaattttgacttttaagtcttactatttaagaaatacattttgtaaggctataactgccatagatagtgattcctct

SEQ ID NO: 12986 - DNA, 1044 bp, Homo sapiens
aatagtgggtgaggttatttggggatggggtgtgtgggtatatttaagttcagttatccctctagaacgtataccatattccccataacccagatacctcttactttctacttatccaggggagggaattgaacaggttatacctcagtaaattaatccttaacattaattccatataactaataacagcttttctttttttagttttcccaatatttgaaatcctttttagtgaatttaaagataaattgagtagcggcaaagatttaatagtataaaatatttttgcttctcaaaagtctttatttccaaacatattttattaggaatgtctaataaaaatgatttattagatccaagaatgatgtttgatttgcaggacttagtctatagaaatgaaaaatgtcacttatgactcttatatttgatttcttttaaaatggaattttaatatgtaccacttatttttcagagatataactacaatgaaaggaaccattgttgctcaagtggattcaagtgagtccttccaggaattctgtagtacatcttgtttatctctctatgaagacaaacagaatcctactaaaggagctctaaataaatcaagatgtacaatctgtggtaaactaactgaggtttgtattttttttctttatcatttaattctaacaaataggaatattttaaacttcatttaagaactattagataatcttttatcagttccttaaaaatgaatatatataaagactatcttataaatatcctattatgtaatctgattctcccataggatcttatcttataaatatccttttatataatctgattctcccagaggatgatttcggaaaaatcattgtgttaattgccttgtttttccctgaggttgggaacactcacagacaaaaccatagtgttgaggttgatttttgtctagtaatatatttatttaaacaagcaggcagactacacaagaaatactacaaataattttgctgagaagtagaacgattggaatattttttgataacctcacat

SEQ ID NO: 12987 - DNA, 1107 bp, Homo sapiens
ctcgaactcctgaccccaggtgatccacctgcctcagcctcccaaagtggtgggattacaggcgtgaaccactgcacccgtccaggttaatgttattttaaggactttttgatttctagttttattccattgctcattggaaaggtagtctgtgtgatttcaatcttcataaatttatttattaaatgttttatcagaaattattattgctttaaagatctttttgttgtctgtggagaaggttatatgaactttctccctctttagttttttttttttttttttaaagacaagtttcgctctgttgcccaggctggagtgcattggcgtaattttggctcactgcaacttccacctcctgggttcaagtgattctcctgcctcagcctcctgagtagctgggattacaggcgtgcaccaccacgctgagctaatttttgtgtttttactagagatggggattcaccatgttggccaggctggtctcacactcctgagctcaagtggtctccgtgcctcggcctcccaaagtgctgggattacaggcatgagctaccacacctggccttagatttattaaggtgtgagttatatagtagtcctttctcacgcaaagttttgttttttgtggtttcaattactcacagtcagctgcagtttccaaataggtgagcagactacaataagataatttcagaaagtaattaattataggtgagtagactacaattaagataatttgagagagattaattataactaactataattgttgttgttttttgttttgttttgagacagggtcttgctctgttgcccaagctggagtgcagtggtgcaatctcagctcactgcagtctacttttcctgggttcaaatgattctccttgcttcagcctcctgagtggctgggattacaggcacatgccaccatgcccgactaatttttgtatttttggtagcgattgggtttcaccatgttgtccatgctggtctcaaactcctgacctcaagtgatttgcccacctcggccttccaaagtgctgggattacaggcgtgagccatcattcccgcccaattgttgttaatctcttgctgtggctaat

SEQ ID NO: 12988 - DNA, 1035 bp, Homo sapiens
ttgtctttttgcatctgggttattttacctgaaagctgaaacataatgctttcagtttcatccatagtatagccacgatcagaacatcattactttttatggctgaatagtattcattatatgtatatgccacattctgtttatcgatttgttgtccctatgatagatgttgctttgttgccacctttgactattgtgaataatgctgcagtgaatattggtgtataaatttgatataagtatcctggttttccattcttttggatgagtgtggatttgctcagtcatagggtaattctgtgttttaccttttgaagaattgtcaaactattttacacaaccgtaccattttatgttctcagcagcaatgtacaaggcttctgttttctctatatctttgccaacacttgttattttccatgttttaagcttttgatttttcttgtagatatcttagtgcatgtgcggtggtatctcatggttttgatttgcatttccctaatgactaatgacaatgaacaatttttctttgttgttgttgttttttttatttttgagacagagtctcgctctgttacccaggttggagtgcaggtgcacaatcttggctcactgcaacctctgcttcctgggctcaagggattcttctgtctcagcctcccgagtagctgggaccacaggcacgggccactacgcctgtctaattttttgtatttttttggagacatagggtttcattcgccatgttgttcaggcctggtctcgaactcctaagctcaagccatctgcctgccttggccttccaaagtgctaggattacagtgtgagccaccgtacctggccagtgagcaatttttcatttgcttgttggccatttgtgtatcatctttggagaagtatctattcaagtcctgtctctgtttttgaattgggttttgtagttcagttcttttttctctttttgttttttgtttgtctgtttgtttgtttgtttgtttttgagatggagtctccctctgttgcccaggctggagt

SEQ ID NO: 12989 - DNA, 1026 bp, Homo sapiens
ctaggcctcaagctttggcagccacaggactcacttgatttgtttcccttttgttaggtatacagttctgtgctaccttgtgtgtagagtttgaaaaccattgtttttttgtgtgtgtgtctaattttctagttgttaaaggtgggtgggaggtttaaatctaatttctgttagttgggagtggaagttacctctgctttaatctaaatagttccctagtttttgtttgtcttttatgacttgacattttgaataccactttggagagcatccctcaattcgtgtttgtttgatagttcctcaagattagattgaggtaatgcatttttggcatgaatacctcataagcggtgttgtgtccctcttcgtgcacatcaggaagcacatgatgtctatgttttccattattgtgtgttaacttgtttaaggggatgtctgtcaggtttctccagggtaaagttgctatttttccctctgtatctgtttaagttaagcaaacttttcacccactatttttagcatctgttgtcaattagaaaaaaatccttaaattacaaagttagaataagtctgctaaaagaaaaattgtaaattaaacagtaatagagaaaagtaaaacatgatggtatatacatttttaaaccgttttttctctgcacagacaaatcttgcaatatgaagagatgatttccaggttttattgaataaatgaattgtaatttttacttgaaattatcttatttagtataataaatattacaatattatgtcattgtttgagttttattgccacttcttctaatcaaggttcttcactatttcagtgctttggattcctttggtaataaggacagattcattctcagaatgttattaaatgcataaaatacctatgattacaaagacaaccaattatatcaaaatacagttaccaaaatattttttaaatttttgaaatgtgctgctttattttaatgtatttaggaataaaatccagtggttaataactataattttgaagtaaag

SEQ ID NO: 12990 - DNA, 1034 bp, Homo sapiens
tactgggtattttgtctgtaagctcctgcttaccttgttccttggattgagtttcagtgtgctcctgcttctcagtgatcttcatgcctttccatattctgaattctatttctgttatttcagccatctctgcctgattcagaacccttactggagaggtagtacagttatttggaagaaagaaggcactctggctttttgagttgtcagggttcttgtgcgagttctttttcatctttgtgggcttacattccttcaacctttgaagttgctgacctttgctttttattattattatttttttttatttttttgagatagggtcttgctatgttgcccagactggagtgccgtggcatgatcttggcttactgcagcgtccacctgccaggttcaagtgattgtcctgcctcagcttcctgagtagttgggattacaggcacatgccacaacacccagctcatttttgtatttctagtagagatggggtttcaccatgttggccaaactggtctcgaactcctgaccttaagtgatccacctgcctctgcctcccaaagtgctggaattacagacatggaccactgtgcccagccaatttttttttcttgtatcctatatttgatgaccttgagggtttaactgtggaataaggtggattcagccaagtgactgtgttctggaaggttttaagggaccggtgctaagttcctaactcctggactgtgtgctttaactccggggtacttatatcagtctcaacttgattctgtctcctggagcgcaggtatccactgtgctggggagactgacgtgtttggggccgctgatcactacacttgatggatggtgtcagtcacagcatttggtagtgcggtgacagcaggatccatcctcattggcatgtgccagcagcagtgcagcgtgatggggtgcacacttgttggctgtggtagggtgctagttggtgctggggtgcctgcctcccagcctgcacttgccacagtggtggatgcaatgtggctagggggtgg

SEQ ID NO: 12991 - DNA, 1532 bp, Homo sapiens
ccagcactttgggaggccaaggcgggcagatcacttgaggtcaggagttcaagaccagcctggccaacatggtaaaaccccgtctctactaaaaatacaaaaattagccatgcatggtggtgcatgcctgtaatctcagctactcgggaggctgaggcaggaaaatcacttgaacccgggaggcggaggttgcagtgaggtaagatggcaccactacactccagcccgggcgacagagcaagactctgtgtcaaaaaaaaaaaaaaaaaaaaaaagcatgtgaagacagacattatcatgacttcaaatttgttaaggcctctaaagaaacaaatgaaatagtcgaatatggagaacagtatttagtttactttatcaaggtattggtattaaaatgatactactaggagaattgcaggagttctggggcagttctttaatatctgcaattcaccatgttaactagcatattgtaaataaaaaaaggaagatgctttccaagttaagagctgtaaagtaattcccaagttgttaagagctgtgaagtaattgagactaagaggtttgatgtactaaaaaaagttacttcattactttactgttgcttctatatgatgtaaactttaaaaattaaggctcaaattttagaaatacacagaggacaaacatacactctaaaacgtgtttatttcagtctaaacaaatgttttgtttatggatattagtgtttttgagaaatcactcagaaaatgttacttcatggccttgcaatgcttgatgttagtttagcacatacaagtgcacttttatacccattgtttaggaggttttatttttaaaattttcttttggataatctcaaaacaataaaggcatttagtgagtacaaatttggaaatcccattttatttttatatctattttcattgtttatcttattgtttgagacagaaattgttaccatgtgatgatgatttccctgttgttttactgtacaaatatctgcctaattgtaaaattatgaatataaaattttaatattgtataataatctttcttggaggatttttttgttgttgttcacagcagatactgaatgtatttctctgtttggcttctttctttgaatgaatgatctcccagctttaaaaaatattactggggctgggtgcagtggcttatgcttgtaatcccagcactttgggagtatgaggtgggagaatcacttgaggcaagaagttcaagaccagcctggggaacatagtgagagcccatctctgcaaaaaaaaaaaaaaaagttaaaaattagccaggtgtgatttcatacccctatagtcccagatactcagcaggctgaggcaagagaattgcttgagcccaggagttcgaggtgagctatgattacaccactgcacttaagcctgggtgacagagcaagaccctgtctcaaaaaggaaaacaaaaaattactgagagcggtggctcacatctttaatctctgccctttgggaggctgaggtgagagggttgtt

SEQ ID NO: 12992 - DNA, 1032 bp, Homo sapiens
caaaggtacgttctttgacaaaagaccatgttattgtagatgtcgtgtgttccaccttgctatgttttttaaaagatagttatttctgttttcatttatgcagaattcagtgatgaggatttaatgaagcagtgcatttcagaatatacaagaaatactttagtcaaataccgggttacaatcatctagttatgtttaatgtcagtattctgtaccttaaatacattatatattcatgccttattttaaacagatctttgtataatatacataataggttatatattatactaatctgaggaataaaggtaagaatatttttgttagatggtagaaatttataaagcaagtagcaatgctgatgtttctgtacgatcaatatgcagcacaatctttgaagtgtgaagagttgtctctcttcattcatccttggttttgctgcctgcagccattattgtaatcaaatggtaactttattctctgtgctttctacttgagtcagactgtattttcttatacccccccatgcattccttctattcactgttgccatggtatcatcttgaaaatgtggtaaactaattatggggtcccccccttttatggtttatctttttttatttaaatactcacaagtttatatattagtacattaaaacctatgacccttacaaatcattccggcttatcagaaaaataagcttcaagccaaaggaaaaaaagtgcttcatcacagaaacttaaaaatcaacagctagccaatctggctattatttcatgtttagccatgaacatttcttaaatggtagtacacacacattgtatttttaccttctcttacctttgcactttagattgagagacaactacctatagtataaataacttctacttttttgtttatttaaatttagttttatgctttaaaaattgttttacttgacaagacactgaatgagctgtgttttctggtctatatcatggtttgcttctagatttaaaatagagatttattaaattctttctcttcta

SEQ ID NO: 12993 - DNA, 1142 bp, Homo sapiens
caggctttgatttgttttccaaagaagtaatgaatggtggcaatattaaattcttaatacaaatgccctctaatagtcttaacagtatgatttatgggctttaaattaataatattagacttgtataatttttctttataaacagctatatccattttttttaaaatttttttgaaattatttttaggaaaataatatttaatattcaaatattgccttaaatatatatttttggtcaccggagaattcctatgctttgcatagtacccaatcaccttttatccctgcattcttttttaaaaaaaatttgtagcgaatcactccattgtgctcagaaagctgtattgagaagtcataaaggatttctgcttaaaatgtctgtaaaatacccctatctttttcgtattcatggttctcccctggaaaattaggtttgtttggtgaaatagggagcaaatggataggaaagtttaaaaagatgtatatatcagtcaaaaatgaaaagttgaaactatccaagacatgaaagggactgggtcaggataggctgaatgaccttttgccagttattgaaaatgaaatttctgtttagctgataggttggattaaggtttttgagtcagagtttagtacctggctgttacttagatttgtttgaacctgtgacttgtttttttttttttttccccctccctcttagtttgctatccttgatttcacaatgacaagaaaaccacaaaatagatgatgcagtatttttaaaaccagagacttgtgtcccatttatttcattttttatgatgtcttaatagttcttttttgcaaatggctagggaatgcggcttagagtggagttgtgttggtgttggtaaggaatgatggtcattaatgatctttttaaattggccaccatattttagctgaattccaaacacttcactaggagtttgcatgagtggatgtcaaagaaacaaaagttcacaacctccaaaattttgattatggcattaaagttggaattattagtattgagttctcacttactgttttttcatgctgaaaaaatacatgcctattttgtttacatttgtaaattggtattaatcttgccccttttttctttgggtagagggaaattatct

SEQ ID NO: 12994 - DNA, 1021 bp, Homo sapiens
aaagccatttatccagcagagggagtgagagtatcagagagccataataactgttggatcttctttttctgaaataaatttaaaagtacccaagtattttcatagttcaggtttgcaaccttgattttgtacttaaaagttagattgtctttttatatttttctaaaatcattctgatggtatcctttgaaggtgatataaatctatagaatgaataattgctaccactttgctagtagttaggatagattcatattgatccttatagattaagagtatggtgaacatagggataatagcataatttggttatcctcttctgcttttgtgtgttcccttcttaggactgaaaatccttcattgacactaggaagtattgaaaattagacataaaaataaaaatgtttctctttgcttctccatagggttcagcaccacccccttctccaacacctaacaaagagatgaagaacaaagcagttctttgcaaacctttaacaatgacaaaagctacttactgtaaacctcacatgcagaccaaatcttgtcagacaggtaacttaggacaatgtgacttacatacttccccataccttcatctcacctaatgaaatacatgcttttcttgaatgacacctccaggatagattcatttggtcaatttgtcattttctgttgattttgcttacgtaattttagatattacctggagaatacagcatctcattttaaatcattatgatcaatctctgataaaggcctagaatacaaattatgtcaaaagtgaaaaaatactatctcgaaaatttccttggggataagactactaaaattataatgcttcctctgagaaaatcatctctttgcatgtggtttgtaatggtaacagttctgtttccttcctgtcagaatgaggtgaaattgttcaaatatgtattttttatgaaatttacagtgttacctgtgtattctaattatttgattaaataagcctttggggaggttgttgaggagagtatgg

SEQ ID NO: 12995 - DNA, 1018 bp, Homo sapiens
agatgataatataggtccaccattccacaaacctctgaaaagcagaatttttttcatgaaaacacagtaaacagtaaaacctaacttaaaggattgtgaagctgttgttgtctttattactcttggtgttaatattcgtccatagaacattaaccatagaatttactatagaattgttaatgtttctaaacaagtacagagtgtttacccacaccactctaggaatattaatgtattataattatgtacatgccctgtttcccctgtaaaatccaaacaatgatgaattccaaaacatgtgactccagtggttctggctgaggggttgaagatccatgtgtgtattttccctcctcttcttttattatacctaggagggagggggagactaggagtagcatttatactgtaccaggtgtagatgaaattgtcttggtcctctagtttcagaacaatttatttaaggagaacatttatattttagaaataattctgttatctagatcaattattttttaaagtgctgtagagagcactagcgttgtgccatatcaactcagcaggaagagagtttgagttctaggctcctcttgttttaattcattcctacttttgggggctgtgttttggggttatgtatggaatttcatttagaaatttcatttctggtagaaacaaggcttaaaaacatatttagataataaaacttttaaaatcaataaaaacaacaaaataaggggttctctgccccactgatctctagtctacctagttcctctccctaaggacgtgctttttgctcttttagctatttcccctggcattacttgcaaaatataactgatttttatatattcatcagttcactattctagtaggtggtcttgttttgttattttttaaatatatcttagaattttctatatacacaatcatgtcacctatgaataaggacagttttacctctttctgatctttctttgctttgctttactacattgcttgaaaccttccccca

SEQ ID NO: 12996 - DNA, 1541 bp, Homo sapiens
gggcaagatagtaaataatttaggccttgcagaccaagaggtaaaaatttagactgtaatatagctacttatatataactgctttaagttgtaaccatttataaaagaataaaaaacaatccttagctcataggtttgtgggattgggcccatggagctagctaggtctgtatagttggcctagacactcatgtagctaaaggtgtatcattttaatttttctcttgtattgagtctgagttgtattatttcctttcttaatttgctctctttttatccagtttcttaagatgtaagcttagataattgattttagtgtttcttctttttcaggaaagcatttaaaactaaaattttctctaaaactagtttacttacatcacgaatttttatatgttgtgttttaattttccttgacttaaggaaaatgctatcacaggaagttgaatctctggattgccttttattaaatgattatttaaataattaggacttcaataccgttaagaggttttgagagctaagtggattgtgtaataaattatgaagtatgtcttaaatagtttttttttctctcagtttttgttgtagtaaaatatacataacataaaatttacggttttaagcatttttaagggtgcggtgcagtggcattaagtacattcacattgttgtgcaaccagcatcaccatctatctctagaactcttttcatcttgcagaactgaaactctgtactcattaaataataactctccatttccttctctactgagccctgtaagccacttttctactttctatctctatgattttgactaccataggcacctcatataagtggaatcatgcagtatttgtcctttttagtctggcttatttcatgtagcataatatactcaaggttcatctgtgttgtgtagcatatgtcagaatttgtgtgtgtgtgtgtgtgtgtgtgtgtgtgtgtgtgtgtgtgagagagacagagagacagggtctcactctggcgcccaggctggagtccagtggcatgaactttgcttagtataccctcaacctcccaggctcaagtgatcctcctgcctcagccctttaggtggctgggaatgtgggcacgtaccaccatacctggctaactaacttctctattttttgtagagatggggtttcgccatgttgaccagtctggtctcgaactcctgggcccaagcaatccaccttcctcagcctcccaaagtgctggaattaacaggcatgagccactgtgcccggcttccttcctttttttttttttgagacggagtcttactctgtcgcccaggctggagtgcagtggcgcgatctcagctcactgcaagctccgcctcctgggttcacgccattctcctgcctcagcctcccgagtagctggcactacaggcgcctgcaaccacgcccggctaattttttgtatttttagtagagacgaggtttcaccgtgttagccgggacggtctcgatctcctgacctcgtgatccgcctgccttggcctcccaaag

SEQ ID NO: 12997 - DNA, 1823 bp, Homo sapiens
aggaatttatatttaaaaaaaaaaaagatacttttattggctgggcgcggtgtctcatgcctgtaatcccagcactttgggaggctgaggcaggcagatcacaacgtcaagagatggagaccatcctggccaacatagtgaaaccccgtctctactaaaaatacaaaaattagccgggtgtggtggcacgtgcctgtaatctcagctactcgggaggctgaggcaggagaatcgcttgaaccctggaggcagaggttgcatgagccgggattgcgccactgcattccagcctggcaacagagtaagactctgtctcaaaaaaaaaaaaaaaaaaaaaaaaaaaggatacttaatgaattcaaatcccataattgaagactttctgtgatgatttttttttaagaaatctactcttcagacaggcctattctatctataagttgctgctcttcttcgcagcttctcctttgcctctgttcctgaaaccacacacaggatttcttctgtagattctcattggttgcaagggctttggtgctaagggagccatatgtgtatagattagatgtttgtaagttgtgactgcctatggtggaaaataacagcaacaataatatggcattgcttcccatactaccacaataagtaataaaacattttgtaattcattctgtaacaagaacagcagatcatttatcatggattgcctagagaaaccttttcaggaggattaagtgttcgcacttcatttaggaactgcttttagtagagctgagttgggaacttagtttttggtttattattgctaaggttctaaatgttacatagaaattttctctttgtactagatttacagatgaaaataattatttcagaatcatttccctcattttttattacacatgttgctttatgataaaagcaaaaaatataaattgctattctaaacttggggattttactttagtgattgttttatgtaatacccaactaagtttgtatatttagaaatccagaaacaatgcaaaagtttatagtcccgttaaatagctggaatcatgatgttatattttaagcaatcactgctgttctcattcataacaatgaggatctccaggtagtttaggaaatgctatttttagagcatcaaccctttaactaacccaaaagcaggggagaaacctagcattgtcactttcttgatttgccaggcttttatcagttggtctatcattgtatttgaaagacattaattaggagtttttgttctactattttagaattttgctgactaatattcctttgactagtttgaataacattggatcaactcagatgatggcattcttatgttttgattagtgtatacatggtgtacattttttcttttacttttcacttatctgttcttttatttaaaataggctttttgtagacagcatattgtcgaaccttgcctttaaaaaaattgaatccgacaatatctgtctcttttttttttttccttgagactgggcctcggtctgtcccaggctagagtgcagtggtgtgatctcatggctcactgcagctttgacctcccaggctcaagtgattctcctgcctcagcccgtcaagtcgctggagctacaggcacatgccaccacgcctggctaatttttgtattttttgtagagacggggtttcaccatcttgcccaggctggtcttgaactcctgagctcaagctgtctgcttggcttggcctcccaaagtgctgagattataggtgtgagccaccactcccaccccagtatctgtcttttaattgctgtttagaccagg

SEQ ID NO: 12998 - DNA, 1058 bp, Homo sapiens
gaagatgatgagccagtatttgaacaaattgaaaacacagccaatccttccagatgtcctgtgaaaatgtttgaatgctacttgtctaaaaggtgagtgttaatgatacttaacttttaaaaatgttggtagaagttggctggtttaaatttaacattaccaagaagtgacttttttagatggattctttctcagatttcttctctctcagttatacccaagttcattcagttataatcttttattttgaaatacccagtttatacatcatacttagagtttaagcatgtgttaagaaatctctctctactaatgaaatttctactgctgtcattttcttttggagatggggtcttgctctctcaccgaggctggagtacagtggcacgtgatcatagctcattgcaacctcaaactcctgggcttaagccatcctcccaccctctgcctcctgagttgctgggactgcaggcatgtgcctccatagctggctaatttttgtattttttgtagagacaggatctcactgtgttgcccaggctggtcttgaactcctgacctcaagccatcctcgtgcctcagcctcccaaagtgctggaattacaggcatgagccattgcgcctgtcattgtcttttaaattacagcaattccaatgacagcaaagcaagggacacaaactttttcttaaacggtcagatggtaaatattttaggcttttgggcctatggaatcactattgtaactaatcggttctcttgtgactagaaagcagccatatactatatataaattcatggcatgtggctgtgttataataaaacttcacataagcaggtggctggctgtagtttgccaatgcccggtgtaaaggtatgctcaaaggtagtatagataggtggaaatgtaagtgaagtatttacatttaagagaaaacagtcaagcaggtatgaaaaatggaatcatgttctggaattttttttcccctcaatctcagaccaacaggcattttaaaaagtttaagccaataaaacgtttagagaccatagattattttat

SEQ ID NO: 12999 - DNA, 1108 bp, Homo sapiens
atttgcaaccagaatgctctagttctacagatagccctgtctggtatacgtctacttcactggaccgaaacaccttggaaaatatgcttgtacgggttcttctagtaaaagatatttatgataaagacaattatgaactggatgaagacacagactaaaaaggaacgttgcagaagcaatcgggataaaacagcattagatagtcatgctgctagatctttattatggaaaacatttcaagtttactccttctgttttgagttttgtagcagtgtacccacgctgggtattaccatgtaaataatctgtgagtgaaagttgccattattctatgtagtggttttaggatacttaacaaatacattcaaattctttttttattattatttatttgattaggtatgtttgtaactttttacattacagaatatgaatgagaatgtgccatgtataatttttttcttgtagtaagaaacatccatattgcacaactctactgttgcaaagcttccttggaagggggctcttttactgggttcttaaccagatggttgtgtatgggtagcactactaaaagtttagaacttgcagtgtctttcggaatttttaaaataaactgtaaactaataggctggggtttttgttttgttttggggttttgttttgtttggttttacattttagttactgaagccttacaaggttatgtagagagataccatcttctgtaccaaaaatagacaagagaatgctgtcaatattggtgtactgtaatgtgaatctatgctggtgaaaacaattttttgttccccttattaaaaccttagtgtccttttctcatttgtggctttctgcatcacccaatcaataaaaaacaaatatatatatgtatatatatgtatgtatgtgtgtgtgtatatatatatatatatatatatatataaatgattgtaagttgaaaacaagatcatcaagacatttcctttgtaaaaatgtctggtgaaagtataaaattctgttttcttctatgccagccataagtatctgaaatcctcttcatttatagaggtttgatttttatttctttttttccctcttaaggatacag

SEQ ID NO: 13000 - DNA, 1025 bp, Homo sapiens
ctcaagcgatcctcctgcctcagccttctgagtagctaggactaacaggtgcactccaccatgcttggctaatttttgtattttttgtagaaaaggggtttcaccatgtttcccaggctggtcttgaactcctgagctccagcaatcctcctacctcagcctcccaaagtgctgggcttacaggagtgaaccaccatgccccgccccataggtaattcttaatcatcgtattacttagcattttaaactgcagcgcatgacttcctttatgaaacatatttttaaacttagttgcctgtattctatggtctcctgatttttctcctacttcatatggctcttctcagtattctttgctaataccatccttagcccctaaccttttaaagtcaggatgtccagagctcagttcttgagcctcttatctaacttaaatctttggggttcttaggtagtctcaacggctttaaaagccaccaatacactgaaaactctactacatgtattgactgtatatctccaacttcgggaatagatgaataatgaccttattttgttctagtgttttagctgtattaactcagttagtacaactaccctgtaagccaaagggcagaaaacctttctattaagggccagagagtaactatttgaggctttgtgagcttcctaatgtgccccgaattccttctggtgggtttttggtctcgctgacttcaagaatgaagccgcagacctcgtggttagtgttacagctcttaaaggtggcgcatccgagtttatgccttcaaatgttcagatgtgtccggagtttcttctttccggtgagttcgcagtctcgctgacttcaggagtgaagccctagaccctggtggtgcgtgttacagctcataaaggtagtaaggacccaaagggtaagcaccagtaagatttattgtgaagaggaaaagaactatgattccacaccatggaaatggacccgagaagttgcggcgggtgggggtgggggtgggggggcaggcagg

SEQ ID NO: 13001 - DNA, 1110 bp, Homo sapiens
ggacgggcgtcgctgaccgcttggcgatgtcccaagtcccagtcacgcctgacggggaaacttaaaacccagttagattactgcgccagctctggaatcgcacagcagagatggtgcacatcgctctttaattttcttgttaggtgaagcacttcaaattgcctgatgaaagttgaatcaggaatgaagataaaagtacacaacaatgcagaaagcggtacttagcctcacaaagatggaaacattccaaaaacgtgaagtactgttgtcccaagattctttctaagcctaaaattacacttttactagtccgattttctggttgtgagttttttttgtttgttttttttttttcgagaaactgcagtaggcttcttggaagtagaccaagggtgtccaatctttggcttccctgggccacatcggaagaagaattgtcttgggccacacatgaaattcacaaacactaaggtagccgatgagctttaaaaaaaatcgcaaaaaagaatctcataatgcttccagaaagtttacgaatttgtgttgggccacattcaaagccgtcctgtgccacgtgcgggccggggttggaaaagcttgaagtagactgtccatagtcagtagaagagtattaaaaaacatacctttcacttaaaaaaaaaaaaggttttgccagcatttgatttatattaaacataggtggcatcatccccagattatttcaacatggaaaagtttgttacatgtataagctgctttggaaattgcctggagaatccagaaaccctgggttgtataacaacagttgttctgccacccatagctattagccatgcttgattcccttcaactttcctggcctcactttccacatcttttaatatttgtatgttccacaagatgtctattcaactaaagtctcaagtcaaaccttttaaaaatctggttacaacctagcagaaaggatttctcattctaaaagttgcttccttctataacttatgtgtcaactaagctgacttaaatagggttcataatcagaaattatggttcagaatagtggttctcaaagtggtccccagaccagtagcctcagcatcacttgggttt

SEQ ID NO: 13002 - DNA, 1049 bp, Homo sapiens
atttgcaaatattttctttcattttgtagattgcttttcacactgatgtgtcctttgatacaccaaagttttttagtttgatgtagtcccaattgtccatctttacttgtgttgcttgtgcttttggtgtcatattcaagaaataattgccaagaacaatgtcatgaagcttttcccctatgttttcttctagcattttttgtagttttaggtcttacctttagatgtttaatccattttgtgttcatttttatatatggtataagataaaggtccaaattcattattttgcacatggatatttagttctcccaacactatttgctgtacagaccgtcccttccctgttgaatggtcttggtaccattgttgaagatcatttaaccatatatgtaagggtttgtttctgggctttctatgctgttctattggtctatttgtctgcctttatgccagtaaccacactgttttgattagtgtagctttataatatgttttaaaatcaggaaatgtgaaccttccaactttgttctttttcacagttgttttagctacttggggtcccttgatattccatatgaattttaggatgaatctctatttctgtaaaaaaaaaaaatgtcatttggatagtaaggatttgataaggattgtattgaatacactgggtggtatggacatcttaacaatattaagtctttcagtctatgaacctatgaacacaggatgcctttccatttgtttatgtcttctttaattcatcaatgttttgtagttttcagtgtatctagtaagtgaattttaaagtatttgagatcaaatgatttcttatgttattcaaactaaatatttttattaggcatcagaatattgtttacctaaaaattcattgttttaaaaatatttgcttttctaatttttaaagtggcataaatattgatccctcaaaacattggggcttaatttacagattacccttccttgtattaatattaattaatactcaattaattttctacgagtacatgaattgctagagtagttttttt

SEQ ID NO: 13003 - DNA, 1073 bp, Homo sapiens
tgctgggattacaggcgtgagccaccgcgcctggtctactttaatggtcttaaattgctggtatatttacaaattattgtggagtggagtgactattctgttccagacgttgttctagcactgtggatgtagcagaaaacaaaagagaccaaaatccttgatgtcgtggaacttgtttctagtgggaaaagacaataaacaaataatgtcagtagttataagtgctatgaaggcaaaacaggtaaggagctagagaatgtgggaggggctggtatttgagacagggttgtcatggaacggctttctgttaaattagcatttgagcagagacctgaaagaatagacagaagcaagccatgacgatatggaggtcaatgtggttgaagcacagtggacgatgtgatggggagagagaggcagagtgggtgggccaggacctgtggatcctcacaggccttaggtcagggcttcaaattatatttctggggagatgatgagccattggaggattttgtgtggaagaataatacaatttgacatatgttttcaaaaggttctaaagtgtgattaactcaagcttctgtacctgaggtccaaatcaaaagattgttttggctgctgtatggagaataagctggagtgggcagtaccgaaatgcaaaatcacagtattcacttggactaatgatttagcagtggaggtgggcaggatggattctgaatatgtatcaaaggtatcagtgccagcacttgctggccatttagatgtgagacttgagggagagagtgtcaagggtaattgcacaaatatagctctgggagctggaaggatgccatccactgagatgtaggaaactggggaagaagcagcttttggagggaaaaatcaaaacctttttttagatatgttgtgtttgagctaccttttcgatgtccaagaggatgtattaaataggcacttagggagaagttgggggccatcttcatataaatttatttcagtatatttagcacatatttttgtgctctgttattatatatattatcagtaatacttttgaaaaaatggagtgt

SEQ ID NO: 13004 - DNA, 1053 bp, Homo sapiens
ttctttatccattcatttgttccccagaacttttaccaactattttttatgtgctggggatacaacagatatatcaacttgatttctgcctcctaggactcacaaatagttaactgatataggttaataaatgagataactgaaaaatgtgcaaagtgctgtcaaaatacagaggatctcttaactctgcccaaactaggggacgattgacataattaggttttacagaggaagtaacatttgaagtggccttgaagggtacggagggttttaccaggaaggaaaggcaggaacaggcactgcaggtagacagtagcattagtaagggcagagttagagggatgcagagtctatttcaaaaggtagtctattgtggaaaatgtagcagattgaagatgtgttttcttatactacaaaccaaaaaaagacagtttataaaaactataaatgcggctgggtgcggtggcacacgcctgtaatcccagcactttgggaggccaagacgggcgaatcacgagccaggagttcaagaccagcctgaccaacatgaggaaacccttgtctctactaaaaatacaaaaaattagctgggcatagtggtgggcacctgtgatcccagctactcaggaggctgaggcaggagaattgcttgaacccaggaggcagaggttgcagtgagctgatattgcgccagtgcactccagcccaggtgacagagcaagactccatcttaaaaaaaaaaaaaaattataaatgtacaagaacaaagagataattaaattttaggaatgttttctgcttagcagattagaagaactgcagaggtatgtaggtagtggagacgtcagcagaagcaaaacaattcttgacatagaaccccaggaaatcccgggaattggaggcatcagaaaatgggaggggtgctggctgcttctgaaaacaggagggttggctgcaagtctggatgtgatacagctagattttcaaatgccctacctaaatcgtacagcaggaatttaggcagaatgcaatgatgttgttggtggatgatgt

SEQ ID NO: 13005 - DNA, 1025 bp, Homo sapiens
tttatgtagttagccccttaaccttacttaatttattctgtgaatagagccttttataagactcactttcttgaactcctggcctcaaattctcctcctgcctcagcttcctgagtagctgagattacaggctcaggccaccacacccagcttaaaagtcactttcttaccaaaaaaaaaaaaaaaaaaaaaaaaaaacctcatatttaaaaactacgtcactctaaaatgttacaaataggtcatcttcttagtatgcattgccttgtaaaaacattggtcaagtcgggatgtagtcggccaccaactagaaatgtgttaagattttttttgcagacttgcttaataaggcaaggagggggtcaggttgttctggggccagcagaagggtctaaaatacagggtagtgaaaagagattagagattgtgagtttcctttaaatgcttaactgtcattattaagacagccacattttgtggggcgagccaaactgctgagcttggaatagcatatgcttggaatctgaatatgaataaggcccaggtgccacactttacacacagatcctttgctaaagaggcactatttgtctaacaggcaaggaccaggctggcagtcaggaaggctgggttttggtgctgatcttgtcaccaactatgcactcttgaacaagtcacttcacttcactatcctaagcctgttttctcatctgaaaaataaaggggttagacttagccttttaaatgacatttttgtatatttctactggctataaaattattacaaatatctatgtctgacggtaagatagtctaaatattcaggaaaactccaagtatagctctcctaaaaatgatatgttgcgtgttaaaaaaagaaaaaaaagaaaagaagaagggggaggaaaaaataaaatgaaaaaaacttcaaaaatgcacggctgagttggtagcaaagaaggaaattctttggaggccaaaaagatctagaaagtttaaatccaatgtgcaggagctggcattgc

SEQ ID NO: 13006 - DNA, 2006 bp, Homo sapiens
ttagtaaaagaagtctacccagaagctagaaagaagggcactcacttcaattttgcaatcgtttttacagatgttaaaagacctggctatcggtaggtaacttctcatttttaagtcctgtaatctctttgtttttagtatgttttaactgatacagataactccttcaatgaatcttgttagtgggagaatatgggtttatattaatacgtggtttggcttaataaagtagttaaattttggaagtgtgttataaaatgatggagaaaatccagtgccatattcactttgtagtacatactgggtttcattgatttggatccattaacagttgattttctttcttacagagttaaggagattggcagcaccatgtctggcagaaaggggactgatgattccatgaccctgcagtcgcagaagttccagataggagattacttggacatagcaattacccctccaaatcgggcaccacctccttcagggcgcatgagaccatattaaattctatttactatttgttgaatttatttttccgtcagttatgtaaaataaacatactcttcttcctcccctgattattgccattaagcctttaaattctaaacaaattataatgcatcatctatttaggagttagatttggatgtgctattgtatgattacgaatagtctgtatgtttcaagcccttctgtaaaatatgaagaaaagtgctcttagcattctgtgtaaaactgtactgttaaatatatgtgtgtaatcagcctgagtgtgaaagttaatggaggcctgggaacagggtttatactaagtagtggaggagcgtatggttaagcccaaaggggcagaacaagaaagccacgggattgtatgaaatcaaacatgagtttgtggtgtagactgctgtatgcagttggaaaggacacgtgagagtgagctcaagtggcagcagaggcagtttggaataagctgcggcaagttgaagaagctgtgttggacgagattgccccgccttgatcagggtaccatgacataaaaggttaaagaacaggcaacacaatgagcacttaagtttttaacatgtggggaatagggcattttaaaggctggaaccagttcagaggaaacaagggtttgggtagaggtagaaaggtttaattaaccctggagatctgcaaatggagggaggggtgaaggaggaatcttaagaccgagggagaagagccaaggacaaggtcaggttgaatgagtaggaggtgttcacacatcctcttgtgtgctaggtagtggcgtgcatctgatctgagaggcagtaaagcagtgatgaagacagtgcagcagaacattgaagtcctgattgcagcagtgactctgcaaccttggataaattatttcaatctttattttgtaaaacggagataacggcctataggattgttaagactgaatattttaaaagagcttagaatggtgcctgacaaatgagaaacaataaatactgattattggccataaagtggtattaaaactggatctcttttcttccatggcactactctcattttgaagtttatgaacagtacgacagtgtattgtaaattccctttagtttgttacagtagccaattgaaaatgtatatcccaaaatttaaaaaaaaaagtaccagcagcaataaaattgcactagttttatctggtacatacaaaaacagccatttaaaatctgatgattctgtggaattggtgtccctgttagcaatggcagagaccagcctggagcctagatctggtgcttcttctgtgctgtggtttaccccaaacctttaggttgtttattcattcagattagatagactggagccataaagttaatttgcacctagctttttggagaatagccatgattaactgctattcgtggtgggggtgggggggaaccctatgatttactatgcagatgaagagggtaggaactaaataaaggactttgtaagccaaagtg

SEQ ID NO: 13007 - DNA, 1030 bp, Homo sapiens
tgtgggaggacaaatacagactgaagtatgggctttatctcagggtcttccaacataaaacatactactgggagatttccttaaacctctgcagtgggggcagtgcgggcagcctctgagctactgttcctttgccatggagtggctccgtgggtgagcaggttgggaggaggtaggcctccacactcactctctccctgacttctgggatccatgtgtgggagtctggcccttcttggtgagtgttttttgatgggtaatgactatctacgtttcactagcattcgggaaggcccatgtgaatggtaacagaaacccttcgattgatgtaaatcttcagtgtttttatcttgaaccaactgaggaacaggagtatccttgagtctctgagtaggaactggtgggtggttcttacaagaaagagatgaatctgaactataaggaagcttataatagagttattttctattactttttcctcatctagttttcttttgacattttagaccattaggacatcttgaccaagctctaggggaaaggggtagagaggaaaaagaaaagagtaaagcctcttggtacagactatgtttgaagtttcgttcctcaaacgtgtgaacttgtgcacgcaatacagcaagggagacacgggaatgataaagaaggataagacgtgaaagatacagtctaactgctaatattgtttcgtgtatgtaccttttaataagagtaaagcttcccagctaaattgggttggggctctcggtggaatttccgatatcagctagtacaagagaaagtggagccaggggtgggtgggctgggaatggcattcagccaggctggggacttgctggaaaggcaaattctcaggctgtattccaggagtactcgggactggtcccagtgctgttttaaccaacgctccaggtgattctgagcactcgctagttggagaaccactgggttagggagctaaggtctctcaacgctgcttgagaagggctgccacaaccgccagtgaaggaga

SEQ ID NO: 13008 - DNA, 1016 bp, Homo sapiens
agctaatgtaatcgtctcctggaatgccccataatggccctgcagcagtttctgcaggctccgcctctctgcaggcagcagtctgcgagttcagaggaaaatgagctccctgctctcgggaaggtgaagtcagcctaggacagcggcaggactgcagctccctctggacaaggggcctgtgcagcagacctcaccaggtacctttccccacagaacctacacagaagcacaaggtcctttgctccttctttgataaggtgtcctctctcgtggttgatttcaaactgtgttgagctaagaaccctttctttaaatgaaaggtgttatggaagcctaaacaacacattattcaataacgatttcttgaaataagtgtgtgtcaaatgcagtgtcgagaactgggtacctggtggtaacccaaacagactttatctctgccttcatagagcttgctttagtgggcaaatacagccataaatgagtaaatatttactaactcttcattatggtcagtgtcgtgaaggaaaaaaatgtgggatggcctttcggttgcattattaggaacgatttccaggtcaggaagtgatgcttctgcacccagcagtacctgtcagtgtgaaatctggggtggagaccaggtcagagctttggatggctgatgacacccaggaggaagaggcagcctctacacgcaggtgggacagtgagcccctgccttgtggtctgtgctgagcttccccacaatgcaagccaaggcatcagctcccacccacaccccaagggacctgcaggaaaccaggctgcatttcaacaacaagcagaaagcacagagctttacacacaatctaaatacatcaaccatttgaagatgctaaactccatacaagagcatcaccagactccacaaaagaaaaaacttataactgaggaaaccgagctaatagtcaaatcagaacagaaacttataatctgtatacttcgtattttggagagatgtgggtgggtatctatatgtc

SEQ ID NO: 13009 - DNA, 1076 bp, Homo sapiens
cctggacagatcccagggtgcacctctccaagacatgtctgttcccatgacatctggaggaaagagacataagacttaacgtaagtttccttagagttcatttgagttaatctatctatgtattcctgggggcagcacatgaaaactaccaatattaataagtaccacacatggggtatctcccatatgccgggcactttttatacaggcatagctgattttaattgcacttggctttattgtgctttgcagagattgcattttttacaaactgaaggtttatggcaacatggcatcgagcaagtctacaggtgctcacttcctgtctctgtcacattttggtagttttttgcaatatttcaacctttttcattgttattatatatgctatactcatctgtaatcagtgatctttggtgttactactgtaattgtttttgggcatgataagccacacccacataagacaatgaattaatcaattaatgttgtgtgtgttctgactgctcgactgaggctgttctctctctctctctctctctttctttaagcttccttattccctaagacacaacaatattgaaattaggccaattaataaccctaccatggcctctaaatattcaagtgaaagaaaagtggtatgtctctcaactttaatcaaaagctagaaatgattaagcttagtgaggaaggcatgttgaaagccaagacagcctgaaacctagccctcttgtgccaaacagccaggctgtgaaagcaaagaaaaatttcttgaaaaaaattaaaagtgctactgcagtgaacacacgtatgataagaaagcgaaacagccttattgctgatatggagaaagtgtgcgtggtgtggatagaagagcaaaccaaccgcaatgttcccttaagccaaagcctaatccagagcaagaccctatctctttggttctattaaggctgagagaggtgaggaagctgcagaagtgaagttggaacctagtagaggttggttcataaggtttaaggaaagaagccatctccgtaacatcaagtgcaagatgaggtggcaagtgctccaga

SEQ ID NO: 13010 - DNA, 1030 bp, Homo sapiens
taaagacatgggtagttcagtgcctgaacacccatcagggcagaggtctgccctaggcagtggatgtccaagaaagcacaataatgctcacatatttaaaacataagtcatatccacgataatacatttttgggatgataaaccaatgttaacctcatccaaaacttccctcacagacatgtccggaataatgtttgacccaatacgtgggcacccagtggcccagccaagatgacatgttaaattgtccatcacactatcttaatgtttcacagtttcctggagcttaaaacgtcagatattgacctcagtacctcccccgtctctcagcacaaaaccctgcacactctgccttctacaacacatctcagacccatgcccacctctcagccccaccaggcctggcttgctttgggtctcatgacatcctgagttccaaccactgcctgtgtggcctcaggccagcagcatttcctccctgcacttttccccacatgacacctttctgtctctctgatgtcaggctcttgcctaaaatctgtctgcggtctcctctcagggtgaaatttccactcatgagcctgtcacggaggcctacctaacagagccctgacctgcccctccaggcccattttatcttccgccccaggagccacctgcagatctgaacacctctggcctctttctacctctgtgctgcaccttccttcccctctgtctgcctcctccctcgactaaccccagacccactaaacactcacagccatgtgaactgaactcaccacacacatatctcatttctacggtgtgtgtttgaaagttccccctttgccttcctttgatactccagtaggtaggaggagtatctcattactgttggtagcagtggtattttgggaccccccagttggcttccactgacaacacttctgctgggcgggggaggggtgcctcattactgctccccatgtggtctctaatgtcaccatgggaggtgtgaggcctcattatcgctggatggtgataaaaa

SEQ ID NO: 13011 - DNA, 1055 bp, Homo sapiens
agaaatgtggacctcagactgagggcttttctggggaccaagtactactccacagctccagctcttggtggcatggacctggcttacaatcaccgtatgcgggacacagctcctcttctgactgcagcgcactcggcccgacgtgacctccacccctagtgcctgcgatctgactgcccgacatgacctccacccctagtgcctgcgatctgactctgcccgacgtgacctccacccctagtgcctgcgatctgactctgcccgacgtgacctccacccctagtgcctgcgatctgactctgcccgacgtgacctccacccctagtgcctgtgatctgactctgcccgacgtgacctccacccctagtgcctgtgatctgactctgcccgacgtgacctccacccctagtgcctgcgatctgactctgcccgacgtgacctccacccctagtgcctgcgatctgactctgcccgacatgacctccacccctagtgcctgcgatctgactgcccgacgtgacctccacccctagtgcctgtgatctgactctgcccgacgtgacctccacccctagtgcctgtgatctgactctgcccgacgtgacctccacccctagtgcctgtgatctgactccgtcctgggtcttaggctctggctgcagccctgcccgcaggctccaggtcctctgcaaggacctaactgctgaggacaagcccacaagtgaggaaacagatgctcctctagctgacactaaagataagatgcctctagaaaaacaaactcctgttatacaggaacaggatgataaatgcgataagctccatgtttgtggtaatttcctacttagcaattttctcttgctgtgtcttttacaaaccatataacatagataaacctcttatttctttcttagagcctttaattttggtcatttttctctgggtcgaatttcctcaatagtggacaaaagtcacctttttttcttttttctttttttgagacagggccttgctctgttacccaggctggagtgcagcttgtgccatcttggctc

SEQ ID NO: 13012 - DNA, 1049 bp, Homo sapiens
ctttacagctgttagactcattcctcacagcaatttcaggaggtaggtactatcattctgccccatttagagatgaggaaactgagactcagggttaagtaacttattccaggttgcacagctcataagtagtggtctcaataacaacagcagcagtaacagcatcagcaactgctccgggcgctgggctcagcactttgtgttagcccagttagtcctcacaatgcccctgtgagatgggttctatttttgtctccttatggatgtgtagcatcaaagtgacaatgttaagaaatgcttcacaatttgtctgcctttttcagtagttagtgtagcatcccactagacgattctatccagactaattgctcgaatatggtatgtactgattgacttgtcaatttctttgtctcatattttgtgtaaatgctttggcattatccccgttttttcttattagttttaattccacctaaattacacattttttgcttttagaacttaatacattttttaaaatgtaagatcgtatcatgaaagaaataacctgaagcatgtgcttcaaagaatgtgatttttatcttctcaccctaaccctgtgtctacacaagcagtaagttgcatggttgagtaattgctggttgattttgagatatgccagcaggaaaaaaagttatgaccaagtagctggaaaagtgaaaaaagctgtttgaattcacttcaaatgggtcattcactcaacaaaggtaaatgatttttcattgccccggcaatgtgacctgcccaggcagtggacgtggttcatctgggttcagccacttccggggcacccgtcagctcacccctgatagccgctcagcctgcagcggaggcagctctgccccctctgcctccttggttgttgtcgttgttgtttttcttgagctgtttgcccatggttctggttctgtgctctggtttctttctaagtcagatgatccacttgggatctgttagttttggaaacttcaactttaaaggaaacagaaccgctgtttctctacctgatg

SEQ ID NO: 13013 - DNA, 1049 bp, Homo sapiens
taaacgtttcttctctggcagatggagccaaatctgtctctcctgtggggtgtacagtgtgtcctctttaatcaggcttctggcaggacagaaagtccctttgttctgtgcctcagtcagcaaaccggtcccagggatttgaatctcagagtggagtgcagacattttgccactgctcagctccttctgaagccttccctggcaccctgggtctgtaattcaggccactttgaataaccaggcggctcacatcctcactcttaggtcttcgtgccctggccccatgaattcctggattttcctttcctagtccccagacaggatcatatggtggcatctctgccttcccagagaagttcctctctgtgagtcacctgccctcactgtgtgtcactaaatggaacttagttcacttcatccattccttcttttctctcatttaacaaataaatgagaaaagagaactccattgcatgctggggatacaactgtatatgagaaaattgtgccttttcctctttatgttaacattagttactccttttgactatgtattttgtgtagatataaaaggtatttgtttcaagttatcaaccagcatcaattttgaataggaagaagagtggcctctcactctttttaatcctaagtacaaacctggtcaatagaaacccacaggaagggaaccggtgagtggcctctatgtggcagagcacgcttgtctgtgccacagcagggctcaggagagccgcacttcacggctcaggggagagcgaagggcaggagggaggacggaggaggctgctctatcccacacacaggtcgctcatgcctttctggggagcattgttttgatgtcattttcaatgcatgggctctgtcctcttgctttttgctatggtaaaagtcccctctgaactaattgaaagttagtgcgtcatttgataaggtcacatagtacttctctttccaagagtgtcatggaattttgcagtccatattagtgtgtcctttaccaaaatgcattattttctattcttcatttgaag

SEQ ID NO: 13014 - DNA, 1034 bp, Homo sapiens
acattttgccacacgatgaatcacacagtaagtctcctctgtagcttatttaaatgatgtagatggtgagaggagttgatgcggaaagtgttaagacttttggtaatgttgacatggtgcgaaaatgtattttgcacatgagaaggaaatcaattttgggaaccagagggcagattgggttgaactgtgtctcccaaaatagatgctgaagtcctaaccctcggtgcctgtacatgtgaccttatttgaaaatatggagtttgcaattatgattaagatgggtcatactagattagggaagctgttcttgtaagaagaggaaaatttggctgatacaggaggaggacagccacctgaagatggaggcggggactggagtgatgctgccaccagctgccagaagctggaagcagcaaggctgcatcctcctgtatcccctttggagggaggatggccctgctgctacggtgatctcaaacttccagcctacagaactgtgagaaagtccgtttctgttgtttaaagactcccagtttgtgtactttattagggcgatcctagaaaacaagtagagattcatgtctggcaaataatgatcaaacaatgatttgttggatagaatggtgattaaaacctaggttagaaaatgagcaaaatgggagggaaagcaccaggacaaatagctaatgcatgcagggcttaatacctgcataggtgatgggttgacagatgcagcaaaccaccacagcacatttttatgtaacaaacctgcacgttctgcatatgtattccagaacttaaaaatacattttttaaaaaaagacaaaatgagcagtgtctacagctttctggagtgtgacagcatcaccagcttaaagctgttactagtactaaatggaataaacatttccctctaatttccccttaatgtcctcagaaacacagatgagggatacatcttcatatgactcctcagagcactaaaatgatatcaaaacactcttcccacaagaaatgcacagacaaaggattct

SEQ ID NO: 13015 - DNA, 1119 bp, Homo sapiens
tttctgatacaccccaaaaacagctggaaagatcaggcccaaaatgctccattgaaatctgattggtttgtttcttctgtgctaaatggaccaattgtggggagaggcaaagtcacataaaggaaatagaagcttggcttggtggctgtgaggaaactgctagataggtttattttaaatattttctatttattttaatgttacaattttatgaaaagcttggttgctttaagaaccaaaaggcaggaagggtacaggggaaaagatctaggctgtggtcataatacttagaggactgtgtgtcaaagcctgggtcatggaactgtaagaatcatcttggatgcttgttgaaaatgtgccttctgggtggggggacctgatgcagcctcaactgtaatcagactatatacctcaggcctctccccgtcccggaggttagatgtcattgtgcagtaatgatgctgtaggccatgcctggaagaatggatgtaaacagtagatgtcagcatgaatgagtctctggtgcctgccttctataccggaatgtcctgaacagctctggagcagacctgggctataagatttgggagaagagcatgaacaggtttgtggggggcacattttgggtgtaaagccattatttcaacatgtcccaaagtactatttgatgcagcttggcagcacaaaaatgcctgtgcacccgtagggagtgtgatcctgaggactttggcgagaacatcgtggcctcacaaatgggaactcagggttaacatagaaaaaccaggttttgactgcagctttccacgggtacatttagtgattctgaataaggatttctgcttgctcagggttgtgaaaaacggatcaacattgtaggggaggattagataactcgaaaactgtcccatcgcaagatatctcagaatgccagcacacagcagggcaaggaaggcagaatggcatctgccaaatactgtgacgggacaaagctaggaggtgggtgcacagatatttgctctatagaccttattctttctttatgcttaaaatgtttttaaaaatgttttaaaatttaaaagcctaattgaagttagctgtgtgtggtggtgcacacctgta

SEQ ID NO: 13016 - DNA, 1105 bp, Homo sapiens
cattgtcacttgagggattctgtgcctgcctcagactgtctcccaccccagcatgccaggtctgccctgaagacccaccagcatccatctgcaccctccaagaggactctacctgtccaatccaggagaggggaagggccagcctttcccctccacccccattcataccagagcaggctttgtttcttaacactggcaagctctccttagagagaagtagagcacaggtccgaaatggccagactggagagtttcaatggagggaggcaagctgccttcctgggttcctgggccacccagtctcctgccctcttctcctctctcagcccttcccggttgcaccccccacccaccccaactccaactttagcagcaggaaaggggacatctttactcactgtctgggacagatgcacggggagggcaggcttttattgtcttattccaatgggggcaggaggctggcaatgagatgtgttgtggtattgctgatcagaacgttgatcacatcttttgcagaaaatgttgctctgtgtgataggaacagtccattgtacttgagtgttaatgcgacaattcagtctcattacacaggattcttaggtcaggccctagctcttagtcaccatgggtgatgtagagattggtaaatgtgccctgagtcctaaacaacttgcacatgtacttttaaacacatccgggttgtgtgttgtgactctatagctaaaagaaaaatagcctctggttcagaaatgtgctccacttccacccttcctggggggtggagtgctcttctgtaacgtataaaagtctttctcattcatcaggaatggcctatttagggatttatgtggatttgcagattctgctatcacaagtgtaataccgatgatacttcatgctggtttgtaagcataaatgtatatgtaatacttactgtgtatcttttgtgtactagatgctgaagatggagagattgatcagagacagtcccattttcatgaagagactcatattcttgtctagagggagaggcccatatgtaaaagcaaagcagtgaaaagtagtgagtgtggcagtcagttaggggagaagatgagagttc

SEQ ID NO: 13017 - DNA, 1657 bp, Homo sapiens
ttagctatttgttttttggttggctgtgctcatagtgttgtatttgagaaactattgcctaatccaaggccgtgaagattttctccctatttttgtctaagagttttatagtttcagctcttagatttaggcctgtgctctattttgcatatggtgtaagggaagatctcatttcattcttttgcatgtagaaatgcatttgtcccagtgtcatttgttgaaaggatgattctttcaccattgaatggtcttagtattcttgttgaaaatgaattgagcatgactataaaattttatttctgaacctttagttctattttcattgatctatatgtctatccttgtgctagtaccacactgtcttgattcctgtggctttatagtaagctttgaaattaggaagtctaaaatctcaaaatttgttttcttttcaagattgtttaggctattctgattcccttgaattttcttattaattataggatcagcttgcaaatcatgcaaagtcgtcagccaggattttgataggattgtactgaatctgtagctgaatttgggatgcattgccattttaacaataccaagtctctccaatttatgaatccatttactgaggtcttaaatatctttcaaaaatgttttctagcttacagagtatatgttttatacttctcctgttaaatttaggcctaaatattttgttctttctgatgctattatagatgggatagttttcataatttttttttgattattgattgcaagtctatagacatgtgatggatttttttttctatgcagccatgcatcacttaatgacagggatacgttctgataaatgcattgctaggcaatttcatctctgtgcgaacattgtcagagtgtacttacacaaagctagatggtacagcctacaacacacccaggctctctagtgtagcctgttgcttctaggctacaatcctatacagcatgtgactgtactgaatactgtaggcagctgtaacacaatggtaagtgtttctgtgtctaaacatggaaaaggtacagaaaaatacggtataaaagttttttttttaaatgacttgtctatgtagggcacttatgaatggagtttccaggactggaagttgctctgggtgagtcagtgagtgaggaatgaatgcgaaggcctaggacattgctgttcgctgctctaaactttagaaatactgtccacttagtccactctaaatgtatttaatatatgtgctgctgaagcaagcactctaaatttattgaaacttttttcataataaattgaccttagttactataagcttgttactttataaattttaatttttaaaatcttttactgttttgtgataacacctagcttaaaacacaaatatattatacagctgtacaaatataatttctttatagccttattcttctctactgtccctattccataatcttttttttattaaaatttgttttgcacttcttaagcttttttgttttgtactttttaagcttttttgttaaaaatgaagacagaaacgtacacattagcctaggtctacatagggtcagcatcatccatatcactgtctaccacctccatccacatcttgtcccactagaaggtcttcaggggaagtaacacgca

SEQ ID NO: 13018 - DNA, 1086 bp, Homo sapiens
ttctctgcttgtgttttgaggtgttcgtctcctcctccttgcagctctgcttggtgactgtgatgcctgctactctagttctcctcctgccccttcagtctctgtgccagttcctcttcctcctcctacccgctgaaacagcgtcttcctcagaatactgtttccagcagttcccatggcctcacctatcacctcatctgcactcactccagacatcttgagagtcaagacctgaagtcctgtctgttagtacatatttaatgtggtaggcacttgagtattgaatgaaaactcaggcaccttcctctcactaggtctgcacacctgccctggccccagagcacacagataggcttacccgcttctacggtgtgattgggtcaggctgttggagaagcagagagaagatttgttgtggaaggggtgccatggagacagatcttgaagatctcaaggattttgagagggtgacatgggaaaaaaaggccttctgcatgggtggaactgcctaaaactaggttaggcaacaggaggcacttccagagcccagcaggtggtcctgggagcactggtagagatggacaggaggaaaaggattctttcctccccctgctgttctcaaaacaccaagcactgtaaccggcacattataagtgctctttaaggttttgagagaagttgaaagtcaaggtgtgtgggctgagagccctggggggccaggctgaggagcttgacacataatccaggaagggacaggagccactgagcattgttgaggagggcagtgactgactggggaggaccttcaggaagctttgtctggcatgtgggcgctggatggataggagagtagaaaagtggacaagtgagtacactgagggggaagtgacggagctctgaggaaggggagttgcaggggaaatggacaggagggaatgactccagtgagctgggggcacaagggaaagtaggtgagggtgggggagagagatgacaaaggccagtgttggaggaactgggagaacggaggcattgttgacacaggcggtggccatgttgtttgtactgggggcctggtgagcagat

SEQ ID NO: 13019 - DNA, 1027 bp, Homo sapiens
agatagacatcatgagcctctggcttaggtgcccaagaactgtactcaggacaagccgatttcaggaattcgacttgaacacagatgtgatcacagtggtatcaagagtagatattttaaaggtgctatccccgtttctctattaaacctcagttaggcttttagttgtctcagatagaggtgtaagactttaatttcatttcatttttaattttaaaaggtcagcgtttttgttgaaactagattgctgcacttaaaagtatggggtaagggaattaagagatgaaaagacagctcttgccaaggttatttgatgaaataaaaggaggccaccagaggaggtgagaggacagcactgttctggtctctgctttcagttctgcgtgttaagtgagatcatgtggtatttgtctctctgtgcctggctcatttcactcagcataatatcctccagctttatcagtgttgctgcaaatgacaggacatccttttcatgactgaatagtactccgttgtgtgtgtatacaccacattttctttatccattcatccattcagggacacttaggtcaattgcgtatcttggctactgtgaatagtgctgccatgaacaagggggtgtagacgtctttttgaggtgttgatttcgtttttttggatatatacccagtattgggattgctgtatcatatggtagttctatatttagttttctgaggcgcctccatgctgttttccacaggggctgtactaattcacaatcctgccagtagtgtgtgagggtctcctttcttgcacatccttaccaccgcttgtaacctctggtctttttgataataaccatcctaacaggtgtgaggtggtatctcactgtgagtttgatttgcatttccctgagaattttgatgttgagcacctttttcatatatctcttggccatttgtgtgtcttctttgaaaaaatgttcagttcctttgtacattttgtgattgagttatttgtttattgagggctttgtttgtttttg

SEQ ID NO: 13020 - DNA, 1054 bp, Homo sapiens
tatgcgtgtgaggtgcttgcaagagctgccacttcctggtacctcctcacagattttgctttctttttgcagccggcttccaggccgcccatgcctgctcaccaggtgccaccctacaaggctgtgtcggcccggttccggcccttcacattctcccagagcacccccattgggttggaccgtgtgggacgccggcggcagatgagagcatccaacggtgagtctcagagtccctttcctttcagagctgctatgggcccatctgaccgtttccagctaacctgaggcagcaggttctgcaccttcgcgcctcccttgggccagggcgcgtttgtctgggagtgaggacggctcatctcaggagaatggtgcatcatttgctgtctggggtagatgctctgtgtgccaggctggtggctctaagtttgagaagtttgcccctcctgtggtgtccgtgtacatacattcctgcatgtggagatccctaaagaaccgagacccaggctagaaatccgagatcaacacgtcagcagggtcagtttcttctgagggctgtgagggagggtctgctccaggctgctttccttgcgtctggtgccctcagtgttccttggcctgtaggagcattgcctcatctctgccttcatgttcacatggcattctcccctgtgtctgtctgtgttcagatttcccctttttataaagacaccaggcttactgcatgtgggcccaacttagtgacctcatcttaatgtgattatctacctaagactatttccaaataaggtcacactcatgggtactgggggttaggacttcaccatcttttggggggacacaattcaatcaaaaacgtataccatgtttgtaacaatatgcaacgtgtacccatatggcagaagattttgaaagaacaggcagaaataacagtagcattgttagggtggtaggaatgtagagcacttctcctcccaccccgtacctgtgtacacacagcctttccctgctttctgtaacactggtttttgttgttatgttaaaaatgttttaattt

SEQ ID NO: 13021 - DNA, 1042 bp, Homo sapiens
aactctggattctgcctgtcaataagaaagcaagtaaaaagtgtcacagatgtgtgaaattggtccttgtttataccggagtttaccatgagaatgaagagttcatctcaaaaaaaaaaaaaaaaaaaaggccaggcacggtggctcatgtctgtaatcccagcactttgggaggctgaggtcggcagatcacttgagcccacaagtttgagaccagcctggccaacatggcaaaaccccatctctactaaaaatacaaaaaaattagccaagagttgtcgtgcgttcctgtagtaccagctactcaggaggctgagatgggaggattgcttgagcctgggaggcagaggttgcagcgggccaagatcgcaccactgcacccagcctgggcaacagagtgagacctcctctccgctaaaaaaaaagagagactgaaaagttagagatatgagtgaggaataagatacttaaattttgaaaataaatgtcttagtgataaatccagcatgctacatttccccttttaccacaagaacaaacaaaggactattttaaaagaaatgctgagttctaaacagaacactttctaccacagaaacaggtcctcttccccgtacgatcaaggttactgctcttccactactcaggtccacgtcaggagctttgtcagggcaggaaattcataaaaggagagcatatcctagctagccactggggagcaaggttagcatccttggggtggaccatccatatgggtaagctgtagttttgataagaatctgcaggctgcccgtgagcatctcgtctcatgcctggccttgtgcactctgagctgggtgctgggcctcccaagaacccctggggcccaacaggcacgtgcaagtgaccctgcaggaatgctgctacctccttgctaagcccaagagaacggggaagaccacagctcccaaaggtcttagggagtcttatgggggctcttcttgtgaacagatcagtgcatctttctgctgctgtctgcagggagggggcagagcaaggggct

SEQ ID NO: 13022 - DNA, 1058 bp, Homo sapiens
actgcctagtggctcccaggaggacgccatgtcagggagggcgggtttatgggttgtctgccatcttatgctgtcctgtcctgttctcctgtcagtgtgagttgaagccgagcctgagacaggctcatagcaggatcgctttgctggcagacacacctggctttgaatccagccccgcaacttggggaaagttacttaacatctttgagccacggtttcctccttcataaccagacagcaacactccaagatgcttgtgaggctctcaagaggatttattccagcgctgagcgcagtgcctggcgcacattaagatgccaggaagccggatgggtgattgctcaggtctgtccagccagttgggcagccgtcagaaactgggagggctgacgagacaccagcccagagagctgtcagggagcggcagagcagaggagagggcccaggatggatcggcaggtgtcagccaggatggacgggaggagccgtgctcagagccagcagccccaggacgagcagctcctggctaggaacagaagacaggcactgtgggacaagtcaaaggtaaaacctaagagctcaccgcaagatacaaagaagcccagagccaacgacgccccagctctgaactggagacgggacagaggctgagttttgagagcaggagggagtggagctgctggcttggttgtggggtctggagccaatggggtgttggctgcccagggtgcagggccctaagttgaatactgatgtgaagctatacattaagagaatgattcttcaaagctccttagacattaataacagattattagtgagagttaatatgtcagtttctaggattccttttgatcttattgttgtccacatgtttaaaagattgaaaaatactatttgtgaagaatggcttgaaagtctagattagatatactagtgacttttccaacactaacagtttacattctggaacatgaaacatatttcatactttaattcagtcacccaacactgactattaagcatgttccttgtccttgagaaagtcatagctagga

SEQ ID NO: 13023 - DNA, 1006 bp, Homo sapiens
ttatggttattatccacattttcatcaacgctctaaggaaagatgtctaattactggctggcgaatggcagagctggaggcacccatgtatttctccctccaaatctggtgttcctttggccaccctgcagctttagctttttttttaggaaatcattctggaagatacctccagcttttggcattcttgagcagaacgtgtggagcataactccttagtgagtcagcgtctttactgagatggccagtgatgtgtatcgttgggcgctaaggagatgggcaaaatcacctgctcccgtggccaggggatggaggagccacatctgttcctgactttttaattgttaacgatctcaagatcatgctatgttctcttcaattgctgtaaagtgtaaagttagatgcaaaacttactcgaattgtgaataaagtatgaatgatccacactggagggagatgtgagggacttccaatagcatatgtgcataactttagtaggcttggctctgtgacatctagtacggctgccagaaaccatttttggagcaaatatttcagaattcaagtttgctagataactgacctgctgctaagtgagcagctagtacttttttaaaaaggggcctgcctgcctgcctgccttcctccctccctccctcccttttttcttgcattttgctcttgttgcccaggctggagtgcagtgatgtaatctcggctcactgcacctccgccttccaggttcaagcaattctcctgcctcagcctcccaagtagctgggattacagacatgtgccaccacatctggcttttttttttttttttttgagacagagttttgctcttgttcccagactggagtgcaatggcacgatctccgctcactgcaacctccaccacctgagttcaagtgattctccagcctcagcctcccgagtagctgggattacaggagcccaccaccacgcctggctaatttttgtatttttagtagagatggggttt

SEQ ID NO: 13024 - DNA, 1050 bp, Homo sapiens
gatgttataaagggcaagccagtacgcatcatgtggtctcagcgtgatccatcacttcgaaaaagtggagtgggcaacatattcgttaaaaatctggataagtccattaataataaagcactgtatgatacagtttctgcttttggtaacatcctttcgtgtaacgtggtttgtgatgaaaatggttccaagggttatggatttgtacactttgagacacacgaagcagctgaaagagctattaaaaaaatgaacggaatgctcctaaatggtcgcaaagtatttgttggacaatttaagtctcgtaaagaacgagaagctgaacttggagctagggcaaaagagttccccaatgtttacatcaagaattttggagaagacatggatgatgagcgccttaaggatctctttggcaagttcgggcccgccttaagtgtgaaagtaatgaccgatgaaagtggaaaatccaaaggatttggatttgtaagctttgaaaggcatgaagatgcacagaaagctgtagatgagatgaatggaaaggagctcaatggaaaacaaatttacgttggtcgagctcagaaaaaagtggaacggcagacggaacttaagcgcacatttgaacagatgaagcaagataggatcaccagataccaggttgttaatctttatgtgaaaaatcttgatgatggtattgatgatgaacgtctccggaaagcgttttctccatttggtacaatcactagtgcaaaggttatgatggaaggtggtcgcagcaaagggtttggttttgtatgtttctcctccccagaagaagccactaaagcagttacagaaatgaacggtagaattgtggccacaaagccattgtatgtagctttagctcagcgcaaagaagagcgccaggcttacctcactaacgagtatatgcagagaatggcaagtgtacgagctgtgcccaaccagcgagcacctccttcaggttacttcatgacagctgtcccacagactcagaaccatgctgcatactatcctcctagccaaattgctcga

SEQ ID NO: 13025 - DNA, 1044 bp, Homo sapiens
ttaggcatagaatgaacattgaatgaatgaatgaaattatagcatactgtggagttttatgatagataattccgatttcattgcagcatttgcggttttggatatgacggtgttttaataactttgtggtttttaaccagcttttcaagcttttgtgccacatgggaccttatctgtttttgttaaaaaaaacaaaaacacttttttacagtgtttattagtggtaattttctgcagtatgtgcagattagtatatctgatgcgagaatgttgtgttgtaataactcaatttgtcttttacttaaattacaaaacgtaggtagcatgttccttgtttttgtgcaacccattagttcaggtggcgacaaaaacataactatccagaaagaaacaaagtggtgagacattttaatgagagatttaagctttagaactcaattttttttaagataaaggtggaggggttcataaagttaaggagtgtgcacactgtcaacaagatacttcctgaagcttaaaagatgtggctgtagatttaaaaggcaaatacttaagcatgacctgcagtttaaaaagggagggaggaggaaccacggactacacagtcaattcagaaatttgaattttcatccatacctccgttattcttactctactcgctcaacaacaggttctgataatgttacttctgccatttctgtttgtctttatttccagttccacaaccctgcttaggctattgtcattcgtggaacaaatatttattggacagattcccatgtgcaaggctctgttttaggtattaagagtcttgctctcttgatccttacattcttatgaaaataattttgattcttgtcagatttttaaccagctgtctttcttgttttagatgaaaactactccaatcaacttcttcaatctgttctgccacattttagccagagtaattgaaaaacaaaattcccattgctctctctttaatcattacccgccatcgttagaatgaagtttaaaaaagaaaaaaaaacttaccatagtctg

SEQ ID NO: 13026 - DNA, 1033 bp, Homo sapiens
cctaatgataacagtcataacaacatttattgaagttaattcatcctgtgctctgaacccttatatttaaaaaaaaattctgctggccgggtgcggtggctcacgcctgtaatcccagcactttgggaggccgaggcaggtggatcacgaggtcaggagattgagaccatcctggctaacatggtgaaaccctgtctctagtaaaaatacaaaaaattagctgggtgtggtggcaggcacctatagtctgagctactccggaggctgaggtaggagaatggggtgaacccgggagccggagcttgcggagtgccactgcactccagcctgggcaacagagtgagactccgtctcaaaaaaaaaaaaaaaaaaaaaatctgctaagtgggtactgttaattcctgttttgcagatgaggaaatagaggctcagaaaggttaagtaatggcacacaagtaccagaacatggggggattggtactggaacccagccacactactgctgccagggcttttgagactttaaaaatgacattgggttctcccatggtgattattctttatggaagggcagcaaaggaaataataaagataaatatgtaggataaagagaatttgccattatgctgtatagtctcccttaaatctcctacataattttggaagtgtcaacttgtcaaaatttgcttattttcacagtttgtcttcccaccttttcatagcaaatctgaacccctgagtcttgataagagtagttgaaaagttgtgaagtttgttcactttcacttgtttttatcagctgttctttttttaagctttgcactgtgctctgaagagtttctgttaatgaatacatgatcctgagacagggtgattttgctttgcgtttaacttttgccaggaaatgtccccactagtttttctatgctttttttggtggtaaaatacctaagtctatactctccccaacaccacattgccccatgaatgtggtaatgtagcaatggaaagctagtgaagataatttaaaata

SEQ ID NO: 13027 - DNA, 1049 bp, Homo sapiens
ctcccaaagtgctgggattacaggcttgagccacaccaagcctgagtcttgttttctgaggttgtaaccccatacgtgatttcaaagcactgcactctggcaggaacttctagttgtgatcagggcaatccagaagcatagtttctggcttcttttctctcagtgatttcaggttaagtcatgcaggtcattcatacatttctttatttaatattgtttgagcagttactacttcctaaccatgcagccttgtgtctacataatgccttgaacattgaatattgtggcactgctggtgaggatggtccttgatgatgacattgggaactgctaagggttggagcaagacagtcagtctgttgtgaggtgaaagggataggcaggtatattaacatgttcttgtataatccgataaatgtcctaaaagatgtagaggcaccatgaaaggcagaggaagaaaacagtatggtttactttatgggcaggaagcacttcagagagaggagtggcaagtgcaaaggcccagtcataaaagcgttctgggaaatatgaagtattttggttttggagcttagaaatcagaggtggaaatggtgggcagagttgagaattgaggagcaggttgggaccagataggaaagggaggtatatgtcgtgcctttagactctattttaaagacaatctagagctaataggaaccttaaattgggcagaatcaccaggatatttgtgggggttttttgtttgtgttttctttttgtttttgttttttatgagacggagttttggtcttgttgcacaggctggagtgcaatggcgtgatctcagctcaccacaacctctgcctcccaggttcaaacaattctcctgtctcagcctcccgagtagctgggattacaggcatgcgccaccacgcccagctaattttgtatttttagtagaaacggggtttcaccatgttggccaggctggtctcgaactcctgacctaaggtgatctgcccactttggcttcccaaagtgctgggattacagacgtgagccacggc

SEQ ID NO: 13028 - DNA, 1446 bp, Homo sapiens
caaggagaatatatacaataaatgaaataaatgtcttagatatgacattaaattttataaatatttatgtacacacaaacatgtatataaataacttgggtgtgtttctactatggatctctgattactacatcccagttcccttttatctattgcttatatcaagggattctttttttttaatccaaatgatttctgtgtttctagtagctgtatcagttagcttgggccctgcagtaccagtgtgggatttaaccagatagagagtagcaataaacagcattcagtgaagaggggacagcgtcaagtgagactagagatgagaaggaccttgacccttttgaggaaatgatagaaggccagattagccatagagcagaaagatgaggttccagaagtcatggagtccttatttgccatgttgagttttgtcattatattaatacctcaggcaatttgggtctattaaagggatttgatgagatttgtattttaagattaagagcattctgacagccatatggaaaatagcattcaggaaggcaagaattgtcatggagaactgttaggaagcttttgtagagctccacgtgtattactgaggcaaagctaggtagattaattgggggtccatggtaatcagggatccatggtagaaacaggctcaagttttttttatatacatgtttgtgtgtatgtaagtatttacaaaatataataaaatgtcatatcaaagaaataatatgctagtcaatttaaaagttggtgaattatttggagaaacataaaatgaaatccttatttttatttccatgtctcataaaatctaggacgtctatagaagataggtggcaattttagagatactaaatatgaaagaaaaaaatcttaataaaatacaaaacatggaaacataaattacagttggatgaaagaggtaaaaaagtaaaaccccatgtgcagaggtaaaaggtaaatgaggaaagtaaaatgcttgatttttttttttttttttttttgggatacagtgacttgctgtgtcatgcaggttggaatgcagtggtgtgatcttacctcactgcaacctccacctccctggctcaagtgattgtcctacgttaacctcctaagtagctgggaccacaagtacgcagcaccacgcctagctaatttttaaaaaattttttggccaggcgcagtggctcacgcctgtaatcccagcactttgggaggccggggcaggtgggtcatgaggtcaggagatcaagaccagcctggccaagatggtaaaaccccgtctctactaaaaatgcaaaagctagccgggcacagtggcaggcacctgtaatcccagctactcgggaagctgaggcaggagaattgcttgaacctgggcagcagaggttgcagtgagctgagatcacgccactgcactccagcctgggc

SEQ ID NO: 13029 - DNA, 1049 bp, Homo sapiens
aggaaaccaaagatacattttttaaaactcagttttaaatatattttttaggaaatttgtgaaggagcagaaacaagttcaagaagaaattagtagaatgtcttcaaaagcaatgcttaaggtacaagaagatattaaagctctgaagcagctcctgtcgttggctgccaatggaatacagagaaacactctcaacattgacaaattgaaaatagaaactgctcaggtataccaacttatggccattttaccgtagggtttttttgttttgttttttccaaaatggaaataaggtgttttgttttgtttgtttttaattatgaaatttgatacatgcataccggtagaaaaccagataactcatatactttaataatgagtttttattaagcgttttctgtatacaagacagtatcctaagcaatttatatctgttaaaagcattaagtatttctgaaaagacccaacaaggtaggaattattatccccattatataaataagaaaaaaagcacagagctttgttagtaagttgaagggcctggattcagaccctggtaatccaactccagagtttatgctgttaactaactaggtttcgtaagtgtggttgctggctaaattggcctattatataagaggaaacatagctagtcagaaaataatgttttttaactgtcggtttttaaataaaaattatatcatgctgtgtggatattaaatttgatgacttgcaagtcgtggttaaatcttagtttaaaaatagtaggccggccctagtggcccaatcctataatcccagcacttttggaagccagggcaggtaaatcacttgatgtcaggagttcgagaccagtctgaccaacatgctgaaatcccgtctctactaaaaatacaataattagccaggcgtggtggtgcatgcctataatcccagctattccggaggctgaggcaggagaatcgcttgaacctgggaggcggaggttgcagtgagccaagattgcaccattgtactccagcctgggcaacaagagcaaaactccgtct

SEQ ID NO: 13030 - DNA, 1059 bp, Homo sapiens
tgcattgggtaaaagcagctcactttatgaacttgggaatttttcttactctggagttacaaacactttttttctttgaggcgggtggttgggttcataactttaacatgaatcaagtctcattgtacaatggtcaaataatagcaataaagtagaagccctcatcataccctccaaccactgctgaggtgcaacaccttattttagcatgtgttacccaggccttctaaaaaatgtatttaaaagtatgtatatttagtgctgacttttttttctttcttttttttttaaactgttttaatcaaaaggctatgaaaaggttggacatttgaggggaaagtttcttgaaaaactggaatatttatttttaaattcttttcatccatccatctgcacattgatggagtatttaaatattactctgtctaaaagcttagctgatttattttaaacaaggcctcacaaagacagtattttaggaagcatattgtaaagatagggagtaaactattcaagggagcagtagaactcttgaactcatcatttcctacaccaaagtgcattattagcactctaatttgcagtttggattgaatgtataatattgggactgtctttggtaatttatggttatattcatccacatattaaccatagtcaatgtgaaacttcatttagccgttttgtttattattcttttaggttctgaaagaacagtaccttggctacaggaaaatgttcttgggagatgctgttgatgtgtttgaaacaaggcgagcagaagccaagaagtggcagaacacacccagagttactactggacccactcctttcagcaccatgccaaacgcagcagccgttgccatggctgcaacacttacacagcagcaacagcctgctacaggtctgaacgcattcaagttatagcttcttactgttccaatgcagaacatttatgtgcgtttttataagtcttccatttgtgtgagcactgaagaaatttctatgagtagctgttccaatacaatctaaaattgtgatggacacgattataaacat

SEQ ID NO: 13031 - DNA, 1066 bp, Homo sapiens
atgctataaatgccctttagaacatggtgtttcactagtgaattacatttaagaataacattagattctgaaatcatgactgtaccatttattgttttaaagtcagagatcatccatccattctttgaatttttcatatatgatactgataggtggtgcattctcattttcctcatacatagtgattacaaagtacccacattcaggatgaagtatgcttttattgactgaaggtatgttgaagatcaataggcttgtttgtatgtatgttgactgtaaacagaatacaagccctctaaaccaaattttgaagatgatacatgctagaattgtacctttccaaggtgaacagaacagcaagagcaggaaaaagatgttttgagatgtggattgcacattaaggagcaactgggaagttgaacagatgaaaataattggtgacatggaaagcagattgttttatttcttggtttagttacacttctaattagagaaacattttttgtggtcattctacagtgttttatttggtcctgtgtctttcggaggttaatagttatcttaatcctgccatcccttttgtcaggtttgaagcttgacatggaaaaatagtcttaatcgatattgatttttttattttaatcattcataaatttcttagtaatgcttactattcaatagcatgtgtctttctgagagttccatatagtccagtagtacattataatacacacaaaaaaattaatacatatttagattgcattcaagctacctatactagggaagcattctctggttttcactattggcagtttaaaaaattgttcttcacatttggagatgacagaattgacttgccataagtaaagggttgatgatagatttatgccaaatcctccatatcccgtggctggacccatgtgaatagtggctcgcacgagcactgtctggtagctctctagctggctggagtgtaggattgcattgttaagttatggagggaaaaagtcattatgggattgattcctttgaggattgatatttcttcttaaaaggattcaatccc

SEQ ID NO: 13032 - DNA, 1048 bp, Homo sapiens
aaggtctcccaggccttcccagtcaaaattttcgttatttttagtcatgtcaccatgatgtgagatttctgagctctgttagatacatttagaaatgtccctatttatcaaatggtgttttgtaccccataagttatcccttatgccctgtgacttctgtgaaatctttgtttttaagtgccagtaacaaattttagaccatctagatgagggtagagagagcttatgcattgtttttatacatcactgttgatctatacaagatttgagttatcagaagggttttgcttttatttgcatatgaaatttttattaacatgaatatgggcacagagcaaatagcttcttagactgctgccttctgaaggtggcttctgtatctttctcagaggaggaggaatagacttaaacgacttctttgtcctccttcaattttttttttaatgaaaaagtatactagggcttaggcatgtgtgatttacagttatttgttctgaaggctgcagagaattgaaaatccagcaggctatttgtgtatgaaatcatgagcatcgataacgtggataacgtagttccatgttggcagaacttgacacttgtctataagtgcttcccaagcctcctgaaaaactgaagacatttacattaggcttttcagtataattttaatttaggataggttttttagcaatgtatctgggattgagttttgctattgtgttttgacactttaagagttcttgatgtttacataataagactttcttatgtgacttagctgctgttttaaggagagccaagacgttttgttaggaattcctaatttttagcttagtgtaggtttggacatttaaggtgtagtgttaaataggaaacattaagtatttcatcttagtttcttgtggttttgtgattttgttgtatttaataaccaaaggaacattccccattaaatcagtaagagtaaaatttttcaaactggggaaaacgcattttaggttttttaaagaaaaattattttaaaatgtgacttagaaataaccatact

SEQ ID NO: 13033 - DNA, 1124 bp, Homo sapiens
tttaaattatttttttaatagtagtataagaattctggctgctattagttattgtttgttttctgggttagaagctattcgaaaagtccagtttctgtcccagtgtagcaaaatgtagttcctcggttgtttttctttaaatgctttataattttacactacctttttaatatacaaacctcattcttcattggataacttgaaggctttgatttctttaaaaatttaaattttagtgtgtatattactttgacagttccctcatctttgagatgcactgatcactgtgcttgaaaaagacaatactgaagattgtactatgaagtttattgaataattttcataaattatttatccaaatgagagatttttagatttttgtattctgcttagttttaaaaaaaaaaaatagtagtttaaaagagaggctagtaagtttgatgctattcttgccaaacaaactcagccaaaatctttaaagtaacaagagggaaaaggatgactaatcgttctgcttctgagtacattttccaaaacgttggaaagaaacttctgaattgaaatcttgaatgtattgaatctgtcaaggtacacagcggtgcctttgtaaatgttcattactttatttaatcaggtgataagtggtgtaatgtagcagagcttaagaatagaactcaattatcactttttgtgaacaagttggaattgtcatgttactgtgtaattgatttgctttacaatgaacaataaatttaataaaataaaacattgtcttgttttttatctacttattgtatatatcatttatatttcatatgagaaatcatgcctagttttttgggtacttactcttatgaaataacatgatagttttgccatgttagtgtcagtctctcttgatcaattgagacttgactctaacactaaggagctcgattaaaaaaagtaaaaaccatttactgattataccaactagttttatcagaaaacaagtgaggagatctaaaataattctagaagtaaatctaaaggaatgataatttatgatacattaaagatttcaaattatttagtagattaaactaacgtctttcattgcggtaagcctcttttaattgtctagt

SEQ ID NO: 13034 - DNA, 1024 bp, Homo sapiens
cttatagggctattgatattgacaccaaatggagtggcttctcagcctcttaatgtcttaagtaagtgcttaatttggaatagagaaaccagtatattttaaaaaagaaaaatattctttgtagcaactgtaaattctcccattataacagtgaacagagctccaggtaataacgcataggcatgtcaggttgcatctgtatatttgactacattagtattagtgacatcaggtggatataaaagaaaacccttggaaagagaactgccttagccatgatttcgttagtagacctatttatgattcaattgcaattttcagataggatgtgaacatggaatttcattgaaaatagtttaattttttatataaaaggttttgtatataatgtgtgtcagtgactattttcaaaatcattttcatcaagacaccttttttctaaaataggcattgcatacacatatgcacacgtatgtgcatgtgccacacattttttgtataatgttgggtttgattataaaagtgttgtcaaatgttttatttatctgcatatagcagtggttggcttttttgaattgaaatttttgcgcattgatgcattgaaataaggaaaattatttatctctgagcactaaacttatttttgcatatttctgtaatattgcagtccccagatccagaacatgggaagttagggaaaatgtgtgattttgtgttttgaattactgtcagaattacatacacaattacaacaaactttttttaaaagacatttcattgtactgcaaaaatctgaatatttatatttcttgtttttttctttatatgttttgcattttaatatgttgagccactggaaatttgtaacagattaatttgttataggagtttaaatgtgttgtcattgtctccattgtctttgtccagagcctattattatggaaacaataaaatttattgtgtcagttgctttgattctttataggtgtcagtagctgttcttaatatgtaattttattattgc

SEQ ID NO: 13035 - DNA, 1089 bp, Homo sapiens
ctttcctttaaggttgaataatgtttcattgtatgtatagaccacattttgcttatccatttatccacggataagcaaaccaacttgggttgcttccacgttgtagctgctgtgaatagtgctgctataaacatgggtgtacaaatatatctttgaaccctgctttccattcttttgggtacatatatactcagaagtgaaattgctggatcagaagataactctacttttaattttttaaggaactgccatactgttttccatagcagctgcaccattttatattcccaccaacagtgctcaaaggttccactctcaccacatactccacaacacttgttattttctgtttgtttttctttttgacagagtcttgctctgtcacccacgttgaagtgcagtggtgcaattatggctcgctgtagcctcaaactcctgggctcatgtgatctccctgcctcagcctcctgagtagctgggactatgggtgcacaccaccgtacctgcctaattaaaataatttttttgtagagataggaggagtcttgctatgtcgtccaggctgttcttgaacttctaggctcaagtgatcctccagcctcggcgtcccaaagtgctgcgggtgtgaggtggtatctcattgtacttttgatttgcatttccctgagtattagttcatgttgagcatcttttcatgtgctttttggccatttacttgcatatcttctttggaaaaatgtctatgccagtcccttgcccattttaaaatctactgtgaaatatttgaccattcaagtactgtgacagagcaagactctgtcaatttgttgttgttgttgatactttttaggagttctctgtatagtctagatactaatcctttatcagatgtgggatttgcaaatattttctctcattccgtggttgcctttttcctctgtttatagtattaatagttgcacaattttttgaactttgatgaagtccaatttgtctatttttcttttgttgactgtgccttttgtatcatatctaagaaatcattgccaaattcaatagactgttttttacggtttaatttcatcctta

SEQ ID NO: 13036 - DNA, 1056 bp, Homo sapiens
tgggtgacagaatgagactctgtctcaaaaaaaaaaaaaaaaaaattttaaaaagagtatctggctgctggagtgagcagagactaaagctgaagggaggcaaaggcatggaggcaggagcccacctagtagctggggatgctgatccaggcagaagatgatgggggtgttggagtggaggttgtggtattggtgatgggaggtggtgagattctgggcatatagtattttgatagtaaagctgacagggtttgctgatgtattggatgtgggatagaagaaggttaagacccgaggggtttggatctgagcaattggaaggatcaggttgccatttctgagaagaggaagaccataggaggagcaggtaaggtgggggaataaggaatcttttttgggcattttaaggttgagataactcttagatatccttagggcagttgaatatgtgtgtttgggaaatcaggggaaaggtctattatggagaaaaatactgagtaatagtctgtgtagtgttttcaattctgtgaggctgaatcaggtcaccaggattgataagagatagcaaatctcaagaattcagctcttgtgggtggtggggtggggggtacttcattgtttaaaagtttgagagaggagaggcagcaaaggagatcaagaaaatatggccattgaggtaagtagagaagcaagagagtttgagaaaatatggacattgaggtaagtagagaagcaagagggtttggcattttggaaaccaactggaacaaagtctttcaagaagaagggaaggaactgctgtattaaatgctgctaatgggttcagtgaaatgaggtctgagaaataattattggatttagcagcgtggaggtcatgggtgacttgtcaggagctgtctggggcattatggagatgaatgcttgattggagtgagtgcaaggaattgggtggagaacaactggagaaaacaaaagaagtttacagtgagttttgctgaaacttcttgtaggtcttaggttagcatggtaatggatttccctatcatggtgagcaaa

SEQ ID NO: 13037 - DNA, 1018 bp, Homo sapiens
ttataagttgaaaataacgtttagtactctgataaaccgattgttaagtcaaaaaatcgtaagttaaaccatcaaagtcagtgaccatctgtagttgcaacacaaaccgcatggcccacaaattgtaacatatttactatctggttctttaccaaaagtttagtgaccccctgccctgtgtaatcagatggaaactgactcaattccagttccattgccagctgtagctatatttctgaaacagtgtttttaaaaatgttaacaagcatttttgggagaattggatctatggctaatttgagaagatgcagagttgtaaataatgaagtagattcatctactacactttttacacaatctttaatccccttatttcactataaatcatgcagaggtttattatatagaatattttgttaaccaaatttatttgaccagtgattttcttttttggtaactcttgttataagggacacagacttagaaatgctgctttttaaaaatagtgagttttcctcttaatagatgatagtaaaataagaagcatgtgaaagagaatcctcagagtaggacaaaggagaaacggattgaattagtctattttgtgttgctataaagggaatacctgtgcttgggtaatttataagccaaagaggcttatttggcttatggttctgggactatacaagaagcatggcaccagcatcaacttggcttttggtgaaggcttttgtgctgtgtaaaaacctgtagataaggtcaaagagggaacaggtatgccaagagggcctgaaccccacaatggggagcaaatctccacatgagatttggggtgacaaagcatatccaaaccatagcgtgcatatttaatttctgggtttcattaaagcaacagatatttgagtacttttaataggtctggcagtttgcccaggttgtagacataggattacatgacagtatgttctctactctcaagtttctgtttgtgctgttataaatttgagcagtcatcatt

SEQ ID NO: 13038 - DNA, 1099 bp, Homo sapiens
ttatggaatggaaaaaggggaatttgttctttctacaaatggtttcaacatgtcctaaatgacaatttggtggagttgttgtggaagaaattcaagtagtggattgatgtttgaattgggtgacttgtatggtcctgccagttctgagattttatgataaagtgtcaggaatcactatttcttagagaacatcagcctgaatgggcaataaatccagaaaaagtacaagaaattttgctaaaatgtggagatggctgttttgcctttaaaagttgatgaaccatagcctcattttacatttttaaaataatgctctttaaaaatgaaatggtcatgaaagaaatatagacagtgtagaagggcatgagctagaaagtaatagtgctctaatcctccgaccaccgtttccctttccatctagtagtgagggaaagggtggtgttgagaattagtctttgttttttggcttgaataattgactccacagtggcagtgccattaactgagagatgggataaaacttgcaagaacaggaagctatgcggagcaagcttcctgaactgtcttacattgtttgtctgattgaattatttaggccttgaattctgtttgtgctctagtgacattttgtcttcaaagatgttaaattattccaaaagtaatagacactgacttggagaggtttttattggccagatttgggataatttgaacattagacagaatatacagttgaccctgtgtatctgtgggttccatatatgcaggttaagccaaccacagattgaaagtgttctgtagttgtgtccgtactgaacagttacagacttttttcttttcattttcccctaaacaacataacaattatttacatagtatttacattgtattaggtatcataagtaatcaaaagacgatttaaagtatatgagatggtgtgtgtaggtttcatgcagataccacgtcattttatgtaagggacttgagcatctgtgcattttggtatctgctgggaggtcctggagccagtgtgtcccatagatattgaagagggctgtgtattataatttgtcctataacgaacccgtgaatccatctc

SEQ ID NO: 13039 - DNA, 1005 bp, Homo sapiens
agccaaatacttacagccaactgatctttgacaaagcaaacaaaaacattaaatggggaaaggacatcccattcaataaatggtgctgggataattggcaagccacatgtagaagaatgaaactggatcctcatctctcaccttatacaaaaatcaactcaagatggagtaaagacttaaatctaagatctgaaattataaaaattctagaagataacatcggaaaaacccttctgggcattggctcagataaggacttcatgaccaagaatccaaaaacaaatgcagcaaaaacgaagataagtagattattaaacgaaaaagcttctgcacagtaaaagaaataatcagcagagtaaacagacaacccacagagtgggaaaaacaatattctcaactgtgcatctgacaaaggactaatacccagaatctacaaggaactcaaatcagcaagataaaaaacaatcccatcaaaaagtgggcaagggacatgaatagacagttctcaaaagaaaatatacaaatggccaacagacatatgaaaaaatgctcaatatcactaattatcagggaaatgcaaatcaaaaccataaggagataccaccttactcctggaagaatggccgtaatttaaaaaatcaagaaacaacagatgttggtgtagatgtggtaaaaagggaacacttttacactgctggtgggaaagtaaaccactatggaaaacagtatggagattccttaaagaactaaaatagaactaccatttgatccagcaatcccagtactgggtatctactcagaggaaaagaagtcattatttgaaaaagacacttgcacacacatttatagcagcacacttcacagttgcaaaaaaatggagcccacttaaatgcccatcaacaaacaagtggataaagaaaatgtagtgtctatatgtatatatacagctctgtcgcccaggctggagtgcagtggtgcgatctcggctcactgcaacctccaaca

SEQ ID NO: 13040 - DNA, 1026 bp, Homo sapiens
gtgcaacttaatttatcactttatgagcagtgagctttttgtactatttaggaaattgttacctactgtaaggttacagttttttacatttagagttttttacatttagagttactgtacatttggtattgatttttgcatgttggttttaggggtcaagatttattttacattttgtcttaattactatagccttgtaataattctaattcataataaatataataggtaatataaatcttccaatttgttatttaaaatcaccctagtcatttatttcttatttttttttttagaatttgcttataaatttctaccccaccccaccccccacaaacacacacataaacacactactaggattttgcttggggttgctttgaatctgttgataatttggggagaattaacatctttccaatactgaaacctaccaacccatgaacatggtataacccccatttatttaggactttcatttctccaagcttctgtaagttttttgggttgattttagacagaatctcactctgtcacccaggctggagtgcagtggcgtgatctcggctcactgcaacctctgcctcctgggttcatctgattctcctgcctcagcctcctgggactataggcacgtgccactgcacctggctaattttgtacttaaggtagagatggggtttcactatggtctcgaattcctgacctcagatgatcctcccacctcagcttcccaaagtgctgggtttacaggcgtgagctgctgcatccagactaagcttctgtagttttttttttttttttttttttttgagacagtcttgctctgtggccaggccggaatgcagtggtgtgatctcggcttactgcaacctctgccttccgggttcaagcagttcttctgcctcagccttccaagtagctgggactacaggcgcatgccaccatgcccagctaatttttgtatttttagtagagatggagtttcaccatgttggccaggatggtctcaatctcctgacctcg

SEQ ID NO: 13041 - DNA, 1049 bp, Homo sapiens
tttcaaaccttgtatttaatttttatttctgctttcatatgtatatataatttgtcatctgaatgttctttttcataaccttacttatatttcatggatgcagtagcttacctctttgtgataatagttttaattgacaaataaaaattgtgtatattggctgggcatggtggctcacgcctgtaatcggagcactttgggcggccaaggcgggtggattgcctgagctcaggagttcatgaccagcctgggcaacacagtgaaaccccatctctactaaaatacaaaaaaaattagctggccatggcggtgtgcacctgtagtctcagctactcgggaggctgaggcaggagaattgcttgaacctgggaggcagaggttgcagtgagccgagattgcatcactgactccagcctgggcaacatagtgagactgtctcaaaaaaaaaaaaaaaaaaaaaaatttgtatatatttatggtgtcaacatggttttgaaatatgtggaacaaatttttgtgatatacagttttaattgataaatattgtatatatttatggtatcaacatgttttgaaatatgtatacattatggactagctatgttgagctaattaaccataagcattaactcacacatatctactctgcaattttcaagtatacgtttactgtagtccatttgttctataatatatattttgaccttatttttcctgcttaattgaaatttggtatacttttgcaaacctctccccaatcactcccctcctcctccagcccctggtaaccaccattctactctctacttttataagttccacatttttaaattctacatataagtgagatcatgtggtatttatctttctggcttatttcacataacaacataatgccctctggtttcatccatgttgttgcaaatgaccagatttccttgtttttaaaggctaaataatattctgcaccttttttttttttcttcagaggtgggatcttgcttggttgcccaggctggaatacagtggcaggatcatagctcactgca

SEQ ID NO: 13042 - DNA, 1024 bp, Homo sapiens
tgtgttgtgaccattttgagagcatctagacaacttcactaactgcagctatgtggcctcatttttttcttcttttcttttttttgagatggagtcatcactctgttgcccaggcttgagtgcaatggcatgatcacagctcacttgaacctctgcctcccaggttcaagtgattctcctgccttagcctcccaagtagctgggattacaggcgtgtaccaccacatccggccaatttttgtatttttagtagagacagagttttgccatgttggccaggctggtctcgaactcctgacctcaagagatctgcccacctcgacctcccaaagtgctgggattacagacataagccattgcacctggcctggcctctttcagtagaactgatttcagtagaacttcaaactattttttataaaacttaaaaaaggaatgcttttctcattcagtttgtgaaataaatttcaaagtcagttaatatttcttttactgggaagaattctgtgataaattaaaaatttgaggcaaagcatgatggcttatgcctgtaatcccagcactttaggaggccaaagtaggaggattgtttgaggccagaagttagagaccagcctgggcaatatagtgagactctgtctctacaaaaagaaaattgaaacacattgtcaaatatgctggtatttgtgaatctaagtgaagactgatatgtagtccagctccaatcttcttttctttccctatcttactccttaagctaattttccagccaactcagaggttgccctgcctgcttgaatcccctcatcccttcatcttcatagctcgaaattaaactctctctagtcaccctagctgaaaatgagaatgtttatatctaaaatcctattacagctactttgaaccacccatgggccacttactagttttggtaatatggtaatctatttgattataaactcctgagggcaaagactgtgtcttactctgtgtttgtatgcctcccactgcctaccaaaataca

SEQ ID NO: 13043 - DNA, 1041 bp, Homo sapiens
tttctttttgtctttcttttcttttccctttttttttttttttttttttttttttttgagacagggtgtcactgtgttgcccaggctagtcttgaactcctgggctcaagagatcgtcctgcctcagccttccaaagtgccgggattacaggcctgagccaccacacacagccattttgtaaattaattttctaatgcacttattattggctgtgttttatgctttttgttgaaagtattcataaagctgtatcagaccataggaatgatttatactaaatcaacatctaagtattaaagacttggttttgatgtattttctaagaaaattaattgaaagtagagtagtagttatatgactggcctagtagccattaatttttgtaaagtacatgtattagagttctccagagaaacagagtcaataggatagataggtagatgtatgtgtggatgatagatgatagatggatggatggatggatggatggatggatggatggatggatggatagatagatgaatgacagagcatttgctagaggaatcggcttatgcaattatggaggctgagaagtcccatgatatgccaactgccagctgaagaaacagggaagctggttgcatggttcagtctaaatccagatgacctgagaatgagggagctgatggcataactctcagtcagaggccaaaggtttgagaagctggggagctactgtacaagtcccagagtccaaaggccagagaatggagagttctgatttccaagagcaggagaagaaaggtatcccagctccagaggaaagagaagttgcctttcctctgcctttttgttccatctgggccctcacctaataagatggtgtccatctatgtacgttacttggaggtggatctttccactttagtctactgtttcaaatgccagtctcttctggaaacaccttcaccgaaatacccagaaataatgctttgccagctatctgggtattctttagtcaagttgacaccttaaatcaaccgtcacagtctatatca

SEQ ID NO: 13044 - DNA, 1061 bp, Homo sapiens
cctctctgttcccaaatagatgtgtgaatttctaaaatcaatttctattctaatttccagtcttttcagatcacagacaggcttgtaattcaggtcagtgtagtttaagatgcctatttaataaaaacatagaagttgggaagatagattgctaatttttaaaaattcatttaacatctgtttatgtaaacatcttgaaccatttgaaataagatcattttttgttttccctaatttcacagactaataggccttaaagttggaaggcatcttagcagcaacagactattccagtctcttagctgccatagtaattcttggtaatatgcggggcagacaaccctgctgacactggtcgaacatttccatcatggctaactttctgtcttattagagtaaacttgttgttacacagctataatccttgaaggtagagtcagaaatttggaattcctaatactcatcctttgggccctctcttccttgattggtcttctcttttttccccccttctggttaacactagatggtaaaatcaaatgtctgaaaaacaaacaaacaaaaaacaaaaacaaatgtctgaaccttgatgctgaagaggggctaagggagatccaaaaataaaaggcagagcaaaataaagaacaacaaaaggagaaattaagaagaaaaataagaaagggttgcacatggtaggaagcgatagaaaatcttgggttatctatccttgaataattttttttttttaatcagcatgggccaaagaggaaaaattaagcccctgttatagtggacctgagatttgtttgaatctttgttctaccacttaattgtgttaccatgggaagcattaacctgtctgtcacttttctcagctataaaatggggccagacctatttgttttttcctttgggtagagattgatgtgaagactggcacataataaatgttcattaagtacatttcacttttcaagttgccctgtgaatattaagtacatgaggattaagagctttatccgttttgtttactgctatatcatcactatccagaatgttac

SEQ ID NO: 13045 - DNA, 1027 bp, Homo sapiens
tcttatgatcagcgtttttgccggttgtcaaatcccttacccaaaacgagaatttttaacggaagaagaacctgatgacaaaggagacaaagtaagtattaaagtactgttagcagcttcttgtttcgtgaatgcctccataacattttccattgtgggtatattttgttctccctctgagctgaactttttctgtttaaccaattgagaagaaccagcagcagcagcagggcaataaccacactaatggaactggccacccagggaatcaagacagcagtcacacacagggacccccgttgaagaaagtgagagttgttcctcctaccactacctcaggtggacttatcatgacctcagactatcaggtattccaagtttattttgtattgactgcatgtcagtgtttacatatgggtttatgatcgtgggaaaatgtgatttaattgagaaatactgacgtctgtatacccagggaaatacattaacatgaaatgttactggcatggaaaagtactgacagtggtatggtagcaagggtttagacttttgaaccagacttggaatgatcaaatacaaattatgccatttattaactgtgtgaccttggacaagtaggataatatctcctggcgttttttcatctgtaaaatgaaactagtaaaacctaacttgcagctgttgtcagattagacatgaagtggcttgacacctagcttatggtaggagcttgatagctattgttttggaacaatgtttcacagtgattaagaacataggctttcagatcccagtctggccacttacttctctgtatccttgagtaagtgattcagatgttctcagtttccatttgtagactggataatgatcaatgtgaagctgtagtaaggattaaatgagataactctgggaggttaagtgttgcagccatttcaggaaactgaggcttgtagaggttaaataactttcacatggatccccagcaagctgtagatgcaggactcatatttgatctgaccacaaa

SEQ ID NO: 13046 - DNA, 1845 bp, Homo sapiens
ccagctcccttctcccagggttctaatgacttcagtgtagtactcatttttcttcatcttgaaagattttcttagttggtattcacaaaagctgtgtcttttcacatgtttaaatattggaaagtttggtcaactattatatttaccttccaacctgtgcttattctagaactatgtacatatagaaattgttcttgcatttccagttggctgacatgaagttgcttaatagcatttgtttttaaaaaatctgtttgctttaaaatttacaacctaatagtcaatgatgtgcttcactatcttcaacaattacgaaaacaaaggtggaacacactttgctaagtggtcatgccaacattgtaacctcctatctcttgtcagtgtgtctttgtagtcacacgttacggttcccatagaaacctatgtatggcaggtaaccttttggttattgggatgttttgattaaaacaattgcgttataatgcaagtattaaatgaattgtccctactcacgggctagtactagtgatcgtctttggaattccaaggactttctttgaagagtactcccagattgtttttcactttgggtggctctccattgctgtagaccttgaatctctttttcttttcttttctttctttctttctttcttttttttttttttttttttttttttgagacggagtcttgctcttgtctcccagactggagtgcagtggtgtgatctcggctcactgcaacctccgcctcctgggttcaagcgattctcctgcctcagactcccgagtagctgggagtacaggcgcccgccaccatgcccggctaatttttgtacttttagtagagatgcagtttcaccatgttggacagattggtctcgaactcctgacctcaggttgatccgcccacctcggcctcccaaaatgctgggattacaggcgtgagccaccgctcccggccgaatctctcaacttctcttctcagtccgttttaagggccctgtttctttcaagtcaggctttttttggctttgctcttgggcatgtggaactaaatgcttctgacagccccacacattcttcttcagggctggttctttacctgtggcttgactttatgctggtaatacagaaatattttatgccagtaatacataaatgatgtacattataaaataaacaatatcaacacagagatttatagaggtaaaaagtcttaagttttctttttcccgtcttattgttgtcctattcctatttctttcttcagaggtaaccataatatagggtgtatccttctggattttttccatttaatactgtagatgaaatatataaccctgtatgttaaaaaaaccatttcatgaatgcctactaggtaccaggtactattttaatcactagggttgcaaaaataagagacagacgctttcaagatgttcatagtctaccaggacaagcaattacagtgcagtgtgataagtaccatgatagagtcagtaatcagtgagggatgtaggagcctcatgcatgacctaatccattcattcatttgctttattcattcagtacacttcagagttttaatatgtgccggggatacagagataaacaagacagatacctctgtcagcccccgatgagcttgctgtgcagttcagtctcaaagagttttaaccgttggttacaatgtattgtttgatatgggatctgaaaggggccagcaacaagagctcagaggaggaccataaacccaagcttagggacgttcagagagacaggaaagcctcccagaggaagcaccatgagaaggaattggtcgaagtctgggttgaggagagg

SEQ ID NO: 13047 - DNA, 1033 bp, Homo sapiens
actgggggatgtttcacattgttgaggaaaacacatagttccgtctcttcaagcctgtggaaactactagctcaagatagttaaaaatgtctagattagattgcactccattccattcgatgacctcatgtttgtaaagaaggatttttggtggttgctgtagcacgtgaaaatcagtgtagaaaaggaaatgagggaggccattgtccagtctgactccaaggtttgagagaaattgtgcagtgctcaacaagtgtacacatactgtattagtaaatacttgtggttatctaagaatgaaataaaaatgccattttttctctctattaaagtgtacttttttcaagttggtaccaagttgttaggacattaagtacttacgtttttaacattttctttgctcaataagcatttgttttggcctgagactccaagggtgcggtgaacagagaaagttttggaactcctgcctttgcctgtgcagtatttgttaatggaagctgttggagtagatgaggtcatttgaggagtgtgtatagagtaagaaaaggagtggtgtggagtgagatctgaggcactcttgtgtttgaaagggaagcagataataggctcccacactgggactaagaaggatgggggtcatggtgtccgaggaaacctcagcaggcagggcgtgctcagctgctgcgagctgttagtaatacaggggacactagaggcaacagtgacatgacagggatgggagggggaggccagtttgtatcaggatttaatagtgagtgagagtgagggagtggagcccagcatgtgtagacagcaatgctcaagaaatttgatgctggtggttaggggtggttatagggagggcagataaagggggaaccctttggtttttgttttttaaatggggggatttgagcatgtttaaatgctggtaaagaaccaggagagggtaatttcagagtttccattggagttagcccactagatagcggtttcagagtttccattggagttagcctgaggacatgat

SEQ ID NO: 13048 - DNA, 1050 bp, Homo sapiens
atttgtttgtatatcccttttcacccaagagttgtataaatttttaggtggaaaggcttttttgttcttaatttctagttttattttccttgatttaattactagtattattatttttgtatattttactgatatgaatacagaaaagtctacatcagaagtatagttgaattttcacaaaatgaattcatccatgaaaccagtactcagaccattcccagaacttcagaaggccctcacattcccttcatctcatgcccacccctctccaaaggtaaccactaagttgacttctaatattgagttttgtctgcttttgaactttacagaaataaatcattattatgtagttttgtttttaaatctttcattcaacaagttttgttaaattcatctgttatttttgctgtataattttccattgtataactgtaccactgttcatttgtccacctctccttacagtatttgtatcattttcagtgttttgtatttctagttttgtttttgcactgtgatcagaggatattttttgtgatatttccattttatgaacatagtaatgatttctttgtgccttaacatataattttctgtgagtgttcaagaagctatattctctgttaccagagtggagtgctgtctctctctctatatatacagaacaactactttgttggttatattgttgaaatcatttatatcttttttttcctatgctctgctttgtatcaagtagtgtgttttatttatggtgtgtttctatttatttactcttggatcaggcataatttgttatttagttcatagagattaataatgtattctgcattgtgaaattaacttttagtatttaaaagtagttaggactattcagataacttttgtcttgattttttttttgtctgattatttttattcacctggtaaatttttgttcctttatttttagcctttttgaatcactgcattttaagtatgtcttttatatacagcatagtctttgctttctaagcaaatttgaaaatatctttcttttaataagcaagt

SEQ ID NO: 13049 - DNA, 1107 bp, Homo sapiens
ggcaaaaacttcctaacttccttggcatggatcttacctgtgacaaaatgtgttccatggtcaaaaaatggcagacagtgattaaagctcatgttgatgtcaggactaccgatggttacttgctttgtctgttctgtgttggttttcctaaaaacaatgtaacaatccgatatggaaaaccttttatgctcagcaccaacaggtccgccaaatccggaagaatatgatggaaatcaagacccgggaggtgcagaaaaatgacttgaaagaagtggtcaataaattgattccagacagcattggaaaagacatagaaaagacttgccaatccatttatcctctccatgatgtcttcgttagaaaagtaaaaatgctgaagaagcccaagtttgaattgggaaaactcatggagcttcatggtgaaggcagtagttctggaaaagccactgggagcaagacaggtgctaaagttgaatgagctgatggatatgaaccaccagtccaagaatctgtttaaagttcagacttataataatggcaagtaaaaagtcctatttgtggaaaaaaaaaaatcaaaaccaggaaattgacattggtacaatctgcagaccttattcagatttcactagtttatacatgcactcagttgtgtgttctgtgcaatttaatcatgtgtataggttcatgtaatcactaccacatcaagttacagaactgttccatcagcacagaggaactcccttaggtttcctctttgtagtcactacagttgatttctttatattaatttgtatcatgtgactttgttgaatttgtcttttaattctagtagttttattgtggattccttagacttttttttatgtataggatcataaaatgtggtaatcatgaaattgactagcaagacaattttacctcttttccaatctagatactttctcctcctttccccccttcttttctttcctcctgccttattgcactggatagaacttcctttagaatattgcgtagaaattataagattagatattcctcccttgttcctgatttcagggggaaagcattcagtccttcaacattaagtgtgattttagttgtttt

SEQ ID NO: 13050 - DNA, 1054 bp, Homo sapiens
gatttataatcctttgggtatatacccagtaatgggattgctgggtcaaatggtatttctagttcaagatccctgaggaatcgccacactgacttccacaatagttgaactagtttacagtcccaccaacagtgtaaaagtgtttctgtttctccacatcctctccagcacctgttgtttcctgtctttctaatgatcgccattctaaccggtatgagatggtatctcattgtggttttgatttgcatttctctgatggccagtgatgatgagcgttttttcatgtgtcttttggctgcataaatgtcttcttttgagaagtgtctgttcatatcctttgcccactttttgatggggttgtttttttcttgtaaatttgtttgagttcattgtagattctggatattagccctttgtcagatgagtagattgcaaaaattttctcccattctgtagtgcctcttcactctgatggtagttccttttgctgtgcagaagctcttcggcccgatgattttttattgtttgctggacattaagaacaagaaagactgaggaatatctatcccggcaaaaggcttgctcttccttttgtcacactgttaatgagggggactgagctggatctgggctttgaagtagcattaattagagtcagtttaccattggattcacatagtttgagagtgggatcacgagtttgttttcggcagttttcactccgaaccccagtaagatcttggagatctctttatgcttcagagccaagctgccagcttcctgagtggtgggagatttctctttgttttatagcttggctgctagcctttctggacagtggtgagttatttatactctttcgatggctttcagctcctcagaaggtatctctttgccctgctctttttaattttatttattattatttattttttgagacggagtctcgctctgttgcccagactggagtgcactggcacgatcttggctcgctgcatcctctgtctccagggttcaaacgattctcctgccttagcctcatgagtagctggga

SEQ ID NO: 13051 - DNA, 1050 bp, Homo sapiens
caaatcaaggaaataaaaacacaaataactagttgtttggttgagcaggtgctcaggaggcaataggaagtcagagaccagggatgggatataggcatgggagaaaggcagagactcaaaccagtaaaggatataaagcaactttaagcacagttaagaaaacctcttttgggctgtgtgtggtggttcacacctataatcttggcatttgggaggctgaggcaggaggatcacttgaggccagagtttgagaccagcctgggcagcacagtgagactctgtgtctctctactaaaaatatttgtaaaaaactttaaaaaagggaaacctcttttatacttatttatgatggcctgtgaacaacttcaaggattttctggttggagacaggatggtggggccaaagctaagggtaatgccctggtttggttgctgaaattaaggaaagaaagacatttgtctaccaggtgattcataggtggcatgataaacagtagtttaatgtatagagttgagaagacaaaacacaggcctctgaaggtaaatcccagtggaaagtagcatgtgttgggtttcacactggtgatactcctagtgagttctgttggagttaggagggtggggtgatctagctaggttggtgtggtcctgcagccatagtgaagaagatagagtcagtcatagaaggagtggagtttggaataaaccttgggacttaggtgagatagatgtaggtgagtgtgtcttccacctgtatttactgtgtgattttttttggatgagtcttccattagactgtttcctaatttgcaagatagttaaactaattcctaccttgcaggtgtcaaggttgtaggggattaaatgagatgatttatgtgaaagccctttgtaaatggcactgtggattcagatgtaagttgttattaataaattgccagttgcaatggggagcctgttggataagagctttaattcattcatcatatgtaaatgaggtggtactctttgcaatcaaagctgtttaatgaaggtcatgattagggggaa

SEQ ID NO: 13052 - DNA, 1047 bp, Homo sapiens
ttcctcactcacattagcacatttcaagctggatccatgtggctggaggctgccctctgggacactgtcactgtgtagaacatttccatcactgcgggacattcatttggacagcactacctcagagcactccttgactccaggggagtcagcatccccatccccatccacttaatcttccgagacctacgtctgtcagatttgttccctttaaagaatcctcccttgtcttagtttaggtcttcatcacctgtcttctgaattatggcttaaattcagtgaccagccttgtgaagctgtccctgccgttgcccctccagctgtagccaccttctcccttgtgctctgtgcatccgccatatacacctgtcagagcactggccccacggaatgctacatggttgtttacagacttttcttcttgtggactgagaggttcttgggagtccagggttgggctttggttttaccagggggaggggcaggcacagtgactgacacataactacatatatatgtgtttattgagcaggtagaggcatggatggatggaggccatagcaggttgcagtttgaaggcaagagacctttggatacctggaaactagacgacaggagggcatttgtgacacagggagtgtaacagatgcaaggccagaggtaggaagttacagggcaattctgcttctggacagtagccacaggagagcactgtcagcaccattcagagtgtagccatgtatggaaatagaattggagtgatggtgttgcatagaagcatgcttccctgttctggccagtattgcagctcgtagtagaggtgctgtgtttccacttagcagccttaacctgtgacttcaaaggagttactgatatgctctccattgtcaaatgaggctacgtattcacaaagtctagttaattcttcaagacttttatggttcttgacttatgttagaaatgttagcagctcagcagcaaagaaaaaggcatgtgtccgtgcccaaaaggagacaatccaatgtagatattacttacttactcctt

SEQ ID NO: 13053 - DNA, 1045 bp, Homo sapiens
tttctttcttttttcttttggaaggatagggagagaataacacgtcttttggttttaagatgatattgaaagagaacataaggtagaagaaaggctattataccagaattagaagctggaagattgatctctaatcctagcttgccttgaccttgggcatatcattacatattaatttaccataggaaaattgaacttgatttccatactttcactttacaggtaatttttcaggaatgtatctgtgttctctgaccaagtttaattaagctagaaatcagtatcacatacccaagaaattccaaaatattttgaaattaatgatcacagcctgaaaatccatggttaaagaggagcttacaaggcaaaatactttgaattgaatgaaaaggaaagcgtaacgtatcaaaatatatgcgatgcacctaaagcactactttaaggggaaatttatagtgttaaatgcttatattagaaaataaaagttaaatagcttttgggcttttcctgtatgtcatgatgggttacaggctgattgtagttctgataaatggtttctttcacttcctatccaatttatatgaaaaggggagatagttaaatttttttgtcaggcaagcatttattttttaacacggatactgtctagtatttgtgttccactttatagtttttggggggctttcaggtgtgtcatctcaccacagccttttgagataaccaggcagatattactgctttcatatttagaataaggacttgaggcttatggaggtctcagctcttgaagaactcggggcttctgcttgccacgccatctgcttgttttgctgctgtgctgcatttccaggctttttgtagaagcgctgtctgtgttcagactgttgttgtaggtggcacactctgattagcttggtgaggcagattctgttggatgagggaattctctaggaggagtgctttttcttaggcatttccgttggtgtttgtattatgcccatcagaggtggcctttttttaagtaccgttttggagctatgtctat

SEQ ID NO: 13054 - DNA, 1058 bp, Homo sapiens
ctgtatcagatctttatcagatatatgatttgtagttttattcattttaatagcattttttttcctttttaccccagaatgaaatttttgggagccaatatgggattattttttggttttattttttgcactttccccaactcccataaaagtagttactctttgtcatcttccttttcttccattttctggcagggcacttagtttgtattctctttttggggggctgtacatgagtcaatagctgtgcaggacagaagacccctaattagtgaatatgtttgcatggctgggatggtcagctctttatttctggaggttggagatctgccattccaattgtcatcagtattgactcgttgtccctggggtgtagtcaaaggcctcacctgaagtactacaaggtcagaagccagaacagggccagattcagattcaatgatgaaaatgctggcgacaattcaccaacatcccttgatttttacatgttcatttctgattgaattgtattgtgcttactgtgtgattgtaattttctgtgtgattgcagttaacttttttgtgtgacctaattcatagctttttttcttacaacttttccgtgttttcttttttaaatatgcattctcacatctatgtataacatttttaaaaactatcaattaacacttgttaattgtattattcaaatcttggtctttgttggtttctgagaaaagtatgttgggtcttctacaaaaggataataaaagttcataattgtcatttttagtgttttttttttaccaattgaatatgataagtgtcttcccctccatctgtttttgttgcgttcaccttgagtttctcttgtgtcttagagcctgactcccttttgttgttagcatttgcctggtgtatatttttaatctctttatttttatcactcctagttatttcattttagatgtattcttgaatatttatcttacaaaacccaaacaactcagtgtgttgctgctttgttcagtggaggctgtttggtgagtggtaaggacatggactgagtccaggctgcc

SEQ ID NO: 13055 - DNA, 1132 bp, Homo sapiens
cccacgctcgacgtccttcactgtaaagtgggtcccctcgtcagatgcgatgatgtgtggggtccatcaggctgataattctgggtggacttatcgatgatgcaggctggcggattttgcctgctttgtgttcagtgtctctttggtgggaaactttccagtggaggttaacaagtgatacagaaatcttcaccctgtgcccactcccgaatttctacccacatggcctttatccagatctccttgttcctcatcttccagttctttttatttcagtaccttgaccatacaaccaggctgttggccactgcccacacatctgcacgcatttcagatcaagctacgcggtgtcatgaactggtgtcctgcccacagctccacctgctgggaagattttcctttccactgtctctgagggccatcctgagtactgctgcagcacacacagtccatttttgactaacaccatgtgctgagctgatccgtctgaaaaaccaagctcaggctttccttcctccttcccctggatgtatgagtctgctgcctgtgtaacctaggcacacaggggaggggcactacagctcttgggggtgacttggaggtctgggcttcctgctcatgggactcacttgtatcctgtggttctactgtggttcaatcttgaatgtcccatttctattttatggtcaactgctgctagtttgaattaataacttgactgacagaacttagctcattctggggagctttgcatgcctggacccctggttctctgtgatctctaccaggtcttggtaatatagtacatttaatactctgatgtgatggcaggtcctagggccttgcctttgattctcctgctggagcttgccacaaactccatattgtcctgttttccttattttttaaatttttcttttatttttatttatttattttttgagtctcagggcatttattttgtaaggaacatgtttgaaaaggggcattttaattatcctgtaaatgtttttacctcagcaataatgtttacatagctagtaatcatggctctcaggcatgatgagttttactgttgttaagttttgttttgtttttatacttaaagttctagggtacatgtgcacaacat

SEQ ID NO: 13056 - DNA, 1100 bp, Homo sapiens
gcttcatccatattcctgcaaaggacatgaactcatccttttttgtggctgcacagtattccatggtttatatatgtcacattttcttaatccagtctatcattgatggacatttgggttggttccaagtctttgctattgtgaatagtgccgcagtaaacatacgtgtacatgtgtctttatagtagcatgatttacaatcctttgggtatatacccagtaatgggatcgctgggtcaaatgctatttctagttctagatccttgaggaatcaccacactgtcttccataatggttgaactaatttacactcccaccaacagtgtaaaagcattgctatttctccacatcctctccagcatatgttgtttcctgactttttaatgattgccattctaactggtgtgagatggtatctcattgtggttttgatttgcatttctctgatggccagtgatgatgagcattttttcatgtgtctgttggctgcataaatgtcttcttttgagaagtgtctgttcatatcctttgcctactttttgatgggttgtttttttcttgtaaatttgtttggttcattgtagattctggatattagccctttgtcagatgagtagattgcaaaaattttctcccattctgtaggttgcctcttcactctgatggtagtttcttttgccatgcagaagctctttagtttaattagatcccatttgtttattctggcttttgtttccattgcttttgatattactgcacagggactcatggagtcctgaagtccttgcccatgcctatgtcctgaatggtattgcctaggttttcttctagagtttttatggttttaggtctaacatttaaatctttaatctgtcttgagttaatttttgtataaggtataaggaagggatccagttttagctttctacatatggctagccagttttcccagcaccatttattaaatagggaatcctttctccatttcttgtttttgtcaggtttgtcaaagatcagatggttgtagatgtgtggtgttatttctgaggcctctgttcggttccattggtctatatctctgttttggtaccagtaccatg

SEQ ID NO: 13057 - DNA, 1026 bp, Homo sapiens
aatgtttgtttttgtaattgcaaagtattttcaagggtaatcactgacccagcattttttcctttgactcttcctcgctcttcaatttattcaaaactgagttagtgttagagacgataaaagctgtctgggagaagaatacatttgttagagtacgctatggtttggatgcagtttgtctccatcaaaactgatactgaaatttgatcccccagatgttgggaggtatggcctagtgggatctcttatgaatagattagtgctttccctatgtggtaagttctcactcttgtgggaatggattacttcctgtgagggtgggtggttaaaaagagtctggcttccttggtttctgttgtttcttctctcaccatgtgatctctttgcatacacccactgtcctcctattttccaccatgagtggaagcagcctgaggcccttaccaggtgcaggtgcccagaatcataagccaaataaacctcttctctttataaactacccagtctcaggtactctgtatagcaccactaaactaagacaagtaattgacactgaatttgaaaaccataaaaatcattactacattattagaactttaaagaagagctgcaaagccgtcttttctgaagttgtagacaggtagcatggcctctctctcttgtcttttgtatttatacaggcataggagttccaaatagaggtttaatgaacatgagaaatgaaggctggggattaattagtcaaagctgaaatactgcaacaacaatatatgaagtaccccaagggaaggccaaagagaaatatatatgtaaatgtctatggctgtacaatcagcaaacattttttgaataatcaggttgtgtcgagggctgttcagggcattgtggggaacacagaattcatggactcagtcccaaattcaggcagctcatagttcatctgggaagaagacaactgtgagtcctgcctctgccaggcacagagacccctacagtttgcttgggatggttaatggggaaatgaat

SEQ ID NO: 13058 - DNA, 1008 bp, Homo sapiens
aaattgtttttgcgtgtatttatttttgtaggaatgcttttagtctcttgtttttatggctgaaatgcctgttggcacaaagtgtaagtgatgaaagccgacataaactgtcagagttttaataatcaatctgtatctcatgctgtaataatcggcggagtgttgtgttagttgtgtttatggtgtttgcttggccacagtctcctgtaagtgaatctgcccacacagtatgccttgttctacatggcccttgtggtaaatagaatagtaatagcccctccggatatgtccatgtccttatccttggaacctgtggatgtgttatgttacgtgtaagagggaattaggattgctagtcagcttactttaagagaaggagattaccctggtttatctggtttggttcagtgtaatccacaagggttctttaaatgggaaaggagggaggtagaagaatcagtgccagggtgacgtgatgtgggaaggacccaactgccattgctggctttgaagatggaagaagaggggccatgagccaaggaatgcaggcagactggagaagctggagaaggcaaggaaattggttctctcctgaagtccccagaaagaacacagatctgcccgtacattagttttagcccagtgaaattcgtttctgacttctgacatccagaactgtaggatagtaattggtgttattttaagctgttatgtttgtggtaatttgatacaacagcaataggaaaccactctagctttggttgtgttttgtaccacccaatccactgtagcctcatgattgggccggggctgggaacctgcctagtggatagtcagttctgagttacgctactgcagtgcatctcaacctggcttctctatcagagtcacttggtgagctttaaaacaggatgctaggaatcacccgagagattgtgcttccggtaagcaccagagatgacccacaaaattagacacccatgtgtctggatggaaaagatgagctgg

SEQ ID NO: 13059 - DNA, 1053 bp, Homo sapiens
atgaatatgcttaataatcaatgtctgttatctaagttcttaaaatgcttagaatattgtaaagaagtattttaaaagttcattatagttaattatggttgacttttctttctgtttttcttaatttttcaaattttctatcatgagcatgtgttagttttataatcaggacggtagcagtagagtctttaattggactttgggccatttttcctaccgtttactttcctgtattttctgtatttcttacaataagcatgtgttgcttttataggagaaaaaataggtttaaaaaagaggaaaaaactttaagcccaatattatgacttgttattttatggaattcaataggaactgacattacagatactataataaagtttcttttttaacttttcattttgaaatgattttagactttaaaaagaccaaaaacagtacaaagaatttccataaactttcacccagatttcccagattttgttttacatttcttctttttctcagacttctcttccactttcccaccatacaaatgcatgtatgcatatatattaaaaatgatctcttttttgtctcctttaatctgaaatagttcctcagtctttctgtgacttttatgaccttgacacttttatgaccttgacacttttatgaccttgacactttagaagggaaacagcatttatgttatggaatgtccgttggtctggattttctaatgtttcctcgtgactggatttaagatattgaaagaaatatcacacggtgatgatgtgttctcccctgtgcgtttcattaggaagctcatgtgtctgcttgtgtcataactggtggtattgactttcatcagtggattgattaccccaagtttctgtaatgcaaagatttttttccctatgtgattaaaaagtgtcatatggggagacactttgagactatataaatgttctgtttcccatccttctatgaacccactagtctcagcatccattgatgatccttgacagaaacagttgctgtggtggttgcagaatggtgatttttttgtca

SEQ ID NO: 13060 - DNA, 1028 bp, Homo sapiens
gaagtttatttagctgatgattgtgcaggctgtacaagaagcatagcacgagcatctgcttctggtgaggcctcagaaagtttccgctcatgaaggaaggtgaaggggagctgtgtgtgcagaggtcacatggagagagagaggaaacaaggagtgggaggtgccgccaggctctttttaacagccagctctcacaggaactactagagcaaaaactcgctcacccagggagggcattagtctattcacgagggatccacccttgtgatccaaacaaattctatcatgtcccacctccaacattggggatcacatttcaacatgagatttggaggcaaccagcatccacgctgtagcaagtaatgttaaccactgtgtacacatggctgtgcagcagatctccagaatgttgtcatcctgcagaagcaaaactctgcgctcgttacagaactccccatttccctcttcctctgacccctggcaaccaccattctcctgtctctatgaaatggactactttacatgcctcatataagtggaatcgtacagtatttgtcttttgtgactgattaattttgcttagcctaatgtcatcctcaaggttcatccatgttgtagcatgtgtcagaatttccttcctttaaaggctgaataatactccattgtatgtgtgtaccacattttgtttatccgttcatgtattgctggacactcaggttcttccacctctgctactgtgaatagtgcttctgtgaacataggtatgcaaatgtctcttcacatccttgcttgcacttctttacgggtatatactcaagtagagttgctgggtcatatgtttaattttggggggaaccaccacacagttttccacagcagttgtaccattgtacattctcaccaacagcgcacagggttccaatttctccacattcttaccaacacttttctgcgtttttgtttttgttttttaaatagtagcatcctaatgggtatgagaggtggtggtgagagggatttcagtcatt

SEQ ID NO: 13061 - DNA, 1052 bp, Homo sapiens
ttttattttgtcaagataaaaaagtcctagaggtatattagctcatgaatatcaagttcggggtcattgtaggacggtgttggatttgccttttttttttttaacaccttataagccctgtctaccaagagtagatacataatctgtatctaatctcgaggaaacatctgatacacccaaatcgacagacattctgcaaaatagcttcctatattcttcaaaaacgagaaggttgtaaaacacaaagactgtgaagaactatccagattaaaggacattaacaaaattgacaaccaatgtcacggataatttccactggattctgaaccaggggataatcttttccatttgcaattagattgggtctttttgcaaaatttgaataatatttgtaggatagatagtagtagtgtatccaaactaattttgtgattttgatattttgggtgggcgaggcgggggcggtaacacatgaactattttaggggtaaagggacattatatgccattcactctcaaatggtccagagaaaagtgtctgtgtctgtctgtgtaaagatgataggggaagattgggaaataaatgtggtcagatgttagcagttggggaatccaagtatatgggaatgtttttctgctggtctcatagctgttctgtaaatctgaaattatttcaaaacagttaaaaaatgaatggataccatcttgggcaacattgcaagactctatctctacaaaaaagaaaatacaaaatttaaccgtgcatggtggcgtgcgccggtggttccagctactcaggaggctgaggtgggaggattgcttgagcccaggaggtcgaggctgcagtgagccatgatcgtaacactgcactccagcctgggtcacagagtgagacccaatctcaaaaaaaaaaaaaaaaatggataaacattaaatcatcaaatatcttactttgttactaagctagaaagtagatgattgtattttatgtttgtttccacagtaattgttgaaataaaggtttctcagttacttcttgggttagctgagag

SEQ ID NO: 13062 - DNA, 1905 bp, Homo sapiens
tatatgttctctaggccttttagaaaacatggtaagtaggtttaccttccttgagagaagcatggcacacatttgtgttctgttgtgttcaacatgtgttgtagttcatagaatgtgtatcaatagaattaaataactagcgtctacccagcttatttcgtgataaggtaaataaattaccaaaattatatggtgattttgtgactaagtattgatgcaagattaaactttggagagaggttgtgatttagtaggctgattgtgctgtcaggagaaattgtccattgggaagataataagcatgtaaccatcaaaaatgatatatgtgttaaaagctagtaaaattgcatttcttttactctagatttttagccttaatactcactataccaaatttatttttgtaggagttgttcctttggccacatatatgcgaatctataagaaaggtgatattgtagacatcaaggtaaacataaaattgggaaaataacactacagaagatagaaaagttggatttaatctagtgtaggaattcaaatactagtgtatgttgcatctgtaagagtatagaatggatttttttttttttttttttggagacggagtttcactcttgttgctcaggctggagtgcaatggcatgatctcacctcaacctccgcctccctcccggattcaagcagttctcctgcctcagcctcccaaatagctgggattacaggcgtgcaccatgatacctggctaattttgtatttttagtagagaagtggtttctccatgttggtcaggctggtcttgaacacctcgggtgatctgctggactcagcctcccaatgtgctgggattacaggcatgcaccatgattcctggctaattttgtatttttagtagagaaggggtttctccatgttggtcaggctggtcttgaacacctcgggtgatccgccggactcagcctcccaatgtgctgggattattacaggtgtgaaccaccgtgcccggcctagaatggattttttaaagtgctattcttagcagaatttaaattttcctcattacccgcttggagttaacagctagtggaaattgggtggtagggtgggaaattatgagtttatcaagttggaaaggaacgccttagtgcaaagtttaattattgatgaagattactattactatgattaaaaaccctcctagtgaaagctgtgttcttctgtgacctggatttaaatgtatcttggcactcgagcttaatgatgactgttttttttgattgcttgaagcaatgtgaaaaacacatttcaccggctctgaaagctcttgagttgccatttgaaagaaatcttagaatactttgcagttacttaaagtcagaattttaaaggaaggggaaatgctggtatataacattggtttctttaatagggaatgggtactgttcaaaaaggaatgccccacaagtgttaccatggcaaaactggaagagtctacaatgttacccagcatgctgttggcattgttgtaaacaaacaagttaagtaagtagtgttgtagttctttgtggctaaccagtattccctcatatacccccttttcactttgccagttggacttatgtctttattggtcattcaagtggggcaaaggaaatatccttttaaaactcaggcaaactgggtgtttgtctgtatcctgtcagaggaaacaaattgaaatagatttactggaaagtcttacacagttagttactaagcggtttgtttgttttgtttcgagacggagtcttgctctgtcgccctggctggagtgcagtggtgggatctctgctctctgcaagctccacctcctgggttcacgccattctcctgcctcagcctctggggtagctaggactacaggcg

SEQ ID NO: 13063 - DNA, 1016 bp, Homo sapiens
agaaggagaaaattgggatgactagaaaacattttcagtccttaagtaggtatagcctagggtaatgtagaagaagccctatttgagagaaggtaaagccaaggagaaggaaaattccatataggggaaatgactgttttggaaaacacatatcccacccgccagtgctctgtgctttgggcccttgtttatctatcccctcttcctgggccagtcttactcctgccgtactcttaagtcaaagcttatgtgtcaggcctctcagcctagtttgggtacttctttgtgctttcattacaccctgtgtttcctggccttggcatttactatgctattggtagtgcttatcttgtttacccactaaaccaacttggaggtcaacatgattctggtacctggaacacctgacaggtagtggacacttagtaaatactctatgaattcatgtaagtagttatggcatgcagcttttcagtcactcaaacctgacctcttacactagcgtgccatagagcctacatttcctacactcagccaaattctttaaagagatatccatatttttgagcactagtatgttccaggccttggggatagatatatagctatagtggatgagacagagtaagtcctgttctcataaagcatgtgttataagagccccttaaaaaaaaattgtgaggctcggcatggtggctcacacctgggaagccaaggtgggaggatcacttgagcccaggagtttgagacaagcctgggcaacatggggagtccctgtctctacaaaaaaataaaaaaggtagccaggcatggtgacacatgcctgtagtcccagctgcttgggaagctgaggcgagaggatatcttgaacctaggaggttgaggctgcaatgagccatgatcacaccattgcactccagcctgggtgacagagggagaccttgtctcaaaaaaatatataaaattaaaaacttgtaattctgtaaaagcagcaaatgtagggtcaagatagaaaa

SEQ ID NO: 13064 - DNA, 1079 bp, Homo sapiens
tactatacggaggcacagtttaggggccaggatacggcagtgaacaagttggcccacatgcagtttattttctgatggcagagttagacaataaagaaacatgcaaacatttaatttcaggtagtaaactaatgatgacaaggagaaaacactgaatagttaaggaaggcctttctgaggaggtaacatttgagcagagaaatacaagaagagagagaccaaggataaaagagaatgagcccagaatttttttaaaaacctgagcttagattattcagcaatgaaagaaaaattatgaacctttctagaggaataaattgtatatttcagccttgtgtttgtgacttttattagtgcctaaatttatatcatctgtttttaatctgtatatgtatttacctaacaattatagtaaagaatattggactactctgtgggaaggaggatatgtaggatattggagttgttttcgattggctgatacatgtatgtatattggaggggcttattttaattgaacttttttattcttcttttgagacagtcgcactgttaccaaggctggaatgcagtggtgcaatctcaactcgctgcagccttgacctcccaggctcaagcagtcctcctacctcagcctcctgagcagctgagactacaggcatgtgccaccatgcctggctaattgtttgtttttgtttttttgtgtgtggagacagtctcactatgttgcccaggctggtcttgaactcctggactcaagtgatcctcccatctcagcctcccaaagtgctaggattataggcgtgagccactgtgcccagccaaaatagaccttccttaggaacagaaattgatatgtgtggaatcttgggtatcttttcagtaagcataggcatagcaaacttaggcagtataacattggaatttagagctgttggactcacaatgcctgggttttgatcctggctctagacgttagccatgtgaccttggacatactgtttgatctctttgtgcctgagtttcttcttctgcaaattgggataacaataataccatatagggatgttacaagtgtt

SEQ ID NO: 13065 - DNA, 1102 bp, Homo sapiens
gctcagtgcaattcataacccaggaaacaccctactcatgttttgacctgcacccttgaatgaaaggaaactgtttaaatatgtgaagattgtaccaatgttgactttccagtggacactaatttagagtatggaaaggttttgaactgcagaaaagttaaaaaagacattaacttgtcaaatccttcatcttggcatgaatgcaatagatccttcactaagaaaatattgtttcccactagtgctaagcttccattttcttgcttgtcatattatttcagttcatgactctgaagatactcatgatttaataccgtacttgaaacagctgcacctggaaactgagtaacattttgcaatcttaaatcatattactcttatatttgtatatgtgtaggtctatgtggaacatacaagaaatttgacactgattcatagatcattttattattttacattttgttttttaatacttttagactattatggtttatagaacatataaccttccctcagtatccctgggggattgcttccaggacccccatggataccaaaacctgatataaaatggcatagtatttgcatataacctacatgcctcttcctgtatactttaaatcatgtctagattgcctgtaacctaagtaatctattattactaatattacattgtactaggtataatctagtcttacctagtacaatgtaaattctaagtaaatagctcttattccgtattggtttttatttgtgttattttcattgtattgttatttttttgcttctttaaaaaaaattttcaatccatgtttggttgaatccacagatacagagggccgattgtacactcttgtgcttacaaaaaaaggggcactgcattttcaatacaaatgcctggaaccatactttcacatctcatgtgaaatatcaaatgcctaaattcacaattctctcttagcgtttgcttgacagcaattgggccatatgctaaacttccatattaattcctacacatctggtgtttctagataagccccaagtcaaagtatttacaaggctctttttcctataatttgcaaggaatgaaatcacttttaat

SEQ ID NO: 13066 - DNA, 1037 bp, Homo sapiens
tctctctggcatggccagctcccactctaagactcttaggtgtgaccagctccaccctaaacaaagacatttctatgacattactttctggaagctaaggcaaaggccagccctctctttgggccaaaccaaactcttgactacatgggcaggaaatgtataagagaagctggaaaatcttgtcacaccagaaagcaaagaaactgtcaaagaccaatgtactcatttcagaaagactcaggacccacttgaaaggtctcccactagtcaaagatgatataatttgatttaaaaaacaaataaatgattaaaacacctaaaatatgttaaaatctgtaaggtcataatgataatcataataacaaacctggtagtcccttttataggatgctagagcaccaaatcactattcacaaaactgataaataggaagaagtaagcatttaccctgttccctgtacaaattatacttcaaagtcaccaattaattgatgaaagaaaactttacagaagaattgtaactaatatattagaaggattatagaataatattatcatcatttgagtttcaacacattcattaacccttataccacagaaagatgcaagaagagcaaaccaccacctctggggcatccttgtcaaaaaattgaacctgaatctgatcaagtctctagttagaactactagtttgcaagaaatacagagggcagagaaacatgttaaatgacaccataaggctgcaatcacaaaaatccaaaatgtgagaaatgctacaggacaaagaacccagtttctttaacaaatgaattgcaaggagaaaagaaagaagagtatgctgtgaattaatagatttgaggaacatcaaataaaatgggtaccttgtttgtgtctttatccaaactaactgtaaaaagttattcaacaattgagggtatttgatgatattaaggaactgatgttgattttttaggtgtgatagtattgctgttattttaatttttaaaagccattatcttttagaaatgtattctgat

SEQ ID NO: 13067 - DNA, 1089 bp, Homo sapiens
actagaaaatataatgagaaaaaaggacattgtttgattatctatgattgtgtggtatagtatatttacatgtaatacacaaacatataattcttggctgaaccatgtgaaaattaattgtaggcatcttgatacttcagccctaaattcttcagcatgcagatctcaaagacattctcatgcataaccacattgtaattaccatatcaatgaaattaatgtataatttcatatcatcatctaacatcccaaaaatgtcttttatagtggttgccttttgtttgggatgcagattcaggatccaggcaaaaatgttccacatactggatttgccttattatgttttcttgattagattcaggtcaaacttgtttgacaggaaggaatattacacaggtgatgtttttatacgtcttaattacaacagatcaggaggacttaatgtcaggttgcccttgataaagctggtgactaccagatctctccattataaaggtgcaatttttcagctaagatatttttgggaggaatgagatgagaatattgcatgctcaatataataatagtatgtaaatttatagtaattagtatgagattcgtgtaagactaaagacattagtgagagaatagagaatcaagaatagagactgggggaagaaagaggcaggaggaaggaagggagtggagaaggaaagaaaacaaaaaaaagaatggagaccgacatatgtgtatgaactaactgtgtggaaaaaggtcattgttcatactagtggagaaagggtggattatttagtaagtgatgctgatacagttgactattcatctgtaatactgaaaattaaaaactaaacatacaaaatatgaatcttataggagaaaatacaggataatatttttataatattggcaaggataaggtagaaacctccctcagccaggcacaaaacctagaagctatgaatgagacaatggcagattcaaccatgtcataataatagtaaacttctacatagaaaaagataccatacaaaaagttaacttgtgaaaagacaagtggtagactggttgaaattatttgccatatataac

SEQ ID NO: 13068 - DNA, 1034 bp, Homo sapiens
gcggagcttgcagtgagcaaagatcgcgctactgcactccagcctgggcgacagagtgagactccgtctcaaaaataaataaataaataaaaagcaaactttgtaaatattaccaatgattaactttgagtagagggattacagatgattttttttattatttgaatatttatattgagaaaaataaccattatttaaaagaacatcgactacattgttgacactttttctgcagaaagtgcaacaagtgtatcaagtgacacgtaggtctggctcttagaagtctgtgaacccttcttcacctcattaatcattggctgacctatagagactcagcaaccagaaataaaggcatgaggtcaaactgcacagggcttgggaaggctgtctgacttcagatccttcaggccctcagacctcaccgttcaaggtcagactgactgggaaaggagtgggagttttcctggggcgtggagtgtggacaccatcagaaccaggctgaggaataccaggtactgcagagcaagtgaccgttgttaagggattctttatatggtgtgactgcttattgtggttttctgtttgctttcactccattaacttgtgtgagctgcttattatttaccaagcactgtgctcatgcttggtgggggatagaaagaggcaaaatataggatcccagcccccaagaagtctctcatcaaaagtaaaaattagacaggtagaaaagataaattataacacagcaagacaagtgatataacacaggtttattcctctcaaggaacgcagaggaaagaaaaatcaagcctgaaggattcagtgagtcttagcagagtttctcgtacagtaggcagcctggaggaaggtggctgggagagggagttccaggcccagagaacacctggggcagagatgcagaagcaagaaagagcacagagaaggcacccacacctaatccctgtgttccttttgaattgctgctgtcaaattaccacaaatgccgtggcttaaaatgacacagggagatttga

SEQ ID NO: 13069 - DNA, 1031 bp, Homo sapiens
cagccattggaaaactgaagcacaaaggctttttcttaatacacttagttgcaatgatgtttcaaccttataaggaaactgcaatttgattttttgtttttgtttttgtttttgttttttttgaggagggggttgggagttcttgctgtgttgtctaggttggactccaactcctgggctcaagtgatcctagcacctcagcctcctgagtagctgggactacaggtatgccgtaccatgtagcttacgtaacatttcgtatttctgttagtcttgggatttttctaaggcttaagagtgatttgatttgtattcaactgcattatcgattcttgacatttaatgatgtaattctaatattttcaactggctagattttcaaaatggctttaatcttcaaagtgtacaatttttaacaggtaaaatatgccaatatttgtattttatgtacattatttgaaacccagtagttttaatttaccaaaatacacttttcaattctcctaatgtagttactagtgaataagacatgtttcagatagaatcctggctctttgactagctttgtgactgaacgaatttttaacctttaagcctcagtttttctcatctggaaaatggagatgttatgaaaattgcatggcattgcctgcacatattgaggtttcagtcttagttattgctattattaaatattaataatctatagttaacctctgtatttccttcttcaaatttttgagggcatacattgaagactagtaaaatagctacagattattgaattgtgattgtccaaatggaggagagcagtgccatggataacttgaagttcaaatgttagctttggaatatgtaatgtgtagcgtgtggcaaagctgtttttgtttaagccaagactagccttttcatcccacaaacctatactaagtgacagagaagtgagtactggcgatttgctgttaggatagctggcataagtttaaacatttttattggaataatatacttagtatatcatgaaggcttta

SEQ ID NO: 13070 - DNA, 1029 bp, Homo sapiens
cgctgcagcgttgaactcctgggctctagcaaatctctctcctcagtccactgagtagctgggactacaggcatgtaccaccatgcctggttatatatttttaatatttaaaaaaatgccagtgtcagaaaaataagaacaatatcttgtttttggaattagaaatgtaatacatgcacaggttaaaaatttaaatagtgcaaaagagtacatagtgaaaaatagcctccttccctccctagttacctgatccctgtctcccagagacactctttctagcttatttggggtagccactgacaaatattctttgcctatactattattcatatgtttatatttctctatgtctaacacattaacacacatatatacacatatgcatgagtgcacacatggaagcctaatgtactctgaattttcttacctaatggcttatcttgtagtttgttccacattcgcacatagaaatctactttattctttctcgtggctgtgtaaatattccattatatgtttatattattagattctttataatggatattttagtggtttatagtcttgctattacaaatgttggcacaaagttatgttttaatgtactatgtatatttatttacatatatatttacacaattatgtgatatatacttaaggagcatatagagtcttcagtaatctggttcacagttgatacattaaaaaaaaacactgtgtggggtgtggcgactcatacctgtaatcctagtactttggaaggccgagacaggaagattacttgagctcagaagtttgagtccagcctgggcaatgtagtgagactctgtttctactaaaaataaaaaaaattagctaggcttggtggtgcacctgtagtcccagctactcaggaggctgatgtgagaggattgcttgaacccaggagacctaggaggtagaggatgcagtgagccgtgatcatgccactgccctccagcaagaccctgtctccacaaaaaagaaaaaagaaactcactgtatttatat

SEQ ID NO: 13071 - DNA, 1039 bp, Homo sapiens
gccaacactttgggaggccaaggcgggagaattgcatgagcccaggagtttgagaccagtatgtataacataccaagaccccatctcttataaaaataaaaaaaattagtcaggtgtggtggtacacacctgcagtcgcagctgaggtgggagagtcgtttgagcctgggcggttgaggctgcagtgagccaagatcatgccactgcactccagtctggacaacagagtgagaccctgtctcagacaaaaaaaaaaaaaaatcagttaataactagcatttcagacatacgagtagaaagtaaaactagaatgacaaattaatgtttaaaagtatttctaatataagaggttagtgggatgtgtcttaaagtggaaatatatgatttagagctcctgacatttacttttgagaaaataataaaaattattagaaattgagaatatatagtacctattctttttataatttattttaatacaataaaatgttactagaaatgttactagaaatttgaaaataatgttagtagaaatgtgacctaaatatttggagagatattagaatatatccaatggaagcagactaatatagaaaaatgagcactctactgtgatatttgaggccctggatctcccattttgtgacctatggccaactttctaggctgtaatcatcccatctgtgaaatgaagagcatgacctcatcattaccatagttgctgtggtgtccttcatctctaaaacttaatgtctgtctaaattgaaagcatccatatgtcagtttctacctagaaatttgtggttcatatattcatatagcttgaaggactatattttcttgccatttatatttaaaatgatgtgtaatctacagacacagagtttttccagtagtgagcaatatagttagaatctttgtgggtacaggttgcatatattttaaaattgttaatggttgagttgagaaggtttcaaatctcaaaatctctttacattagaaatactcttggcataggagtatgacatattacacatag

SEQ ID NO: 13072 - DNA, 1030 bp, Homo sapiens
tgactcacacctttaattccagcactttgggaggctgaggtgggtggataactcgagtccaggagtttgagaccagcctgggcaacatggcgaaacactgtctctacaaaaaatacaaaaatgagcttgacttggtggtgcacgcctgtagtcccagctacttgggagactgaggtgggaggatcacctaagcccaggaggttgaggttgcagcgagccgtgtttgcaccacttcactccagcctgggaaacagagcaagaacctgtctcaaaaaaatacaacaatttttttcactcaaaatattttattaactttggcatgctattttatttctttatatctggtacgtattgtggttccagtctaaagcacaaggatataagaagttgcagttggtgttccagttctttagaaattgaatgtgcccttgcatagcaaggtcttccaactgattttatttttggtagcataaaatccctttgtaacactgagattttaagaacataagtaaagactgctttgtagacttccttaaattactatgtagataatgtttgtccccctcaatgacctgactcatagcagaagctacaaatacgtgtatatgtgtttatacatgtaaattatgttctgctgtgtttgatataatttatttttctcattttttacgtatttttgttttttgaggggcagtgtcttgccctgtttcccaggctggttcaaactccgacttcaagtgatcctcctgtctcatctacccaacttagctgggactacaggcacatgccaccatgcccagctaattttttaaattcttgtggagactgggtctcactctgttgcccaggctggtcttgaactcctggtctcaagtgatcctcctgtgtcagcctcccaaagtgctgagattacaggcatgagccacctcacctggcccaatgaatgatttaaatgacactttaaaatgatctatgttttattaatcagaacatctttacaaacttgaaaaatagtagtatacaaatgtga

SEQ ID NO: 13073 - DNA, 1047 bp, Homo sapiens
atactgaaatgttgagtaaatcaaggaatgaaaaaatatacatgtgtgtcctaaaattaccttctgttctttcctttgacatagtgagtctagaggcttacctcccttgtaatgagagtggacttcccttagccctaaaccactggaactggcttttatgaagtggggcaaaggtttttggaaaagctagggctttgagggctacaaatagtgatcttaaaagctctcagtgttagccaggcgtggtggctcacgcctgtaatcccagcactttgggaggccacgccgggtggatcatgaagtcaggagttcaagaccagcctggccaacatggtgaaacctcatctctactcaaaatacaaaaattagccagatgtggtggtgggtgcctgtaatcccagctacttgggtggctgagccaggagaatggcttgaacccaggaagcagaggttgcagtgagccgagatcatgccactgcactccagcctggggcaacagagtgagaccccgtctcaaaacaaaaaaacaaaacaaaacaaaaaaactctcagtgttaagatcaagctccaagggggcaaggagctacaaggacttgcgatgctgaatttttaaacccctaccccttttcattttgaggagtgactccaatttctgtttgtatcactagttatttcttctccagatctctctgacgttattgagaactttagtactcaaagtgcgatcaccagaccaggagcatctgcagtcttgggagcgtctttagaaacacagattcttagacctcgctctaaggcctaccgaatcataatcttttattttagcaagatccctggaagatttctgtgttcactattgtttgagaagtgctactctagaatatattttcaaaccttttcttcttgaaaacttttattcaagccttgagcttttttgtttgttttgatattttacttttgagacagagtcttgctcttatcacccaggctggagtccaatgacacaatcttgactcactgcaaactctgccccccgggttcaagtga

SEQ ID NO: 13074 - DNA, 1146 bp, Homo sapiens
attaaaaaaattttttggcgggggtgggggtagagattggggggttctcactatgttgcccaggttggtccttgaactcctggccttaagcagtcctcctgccttggccttccagagtgctaggattacaggtgtgagctgctgtgcctggcctctgctggatgttttaccacgggaaaaggggtgtattagtccattttgacactgctataaagaaatacccgagactgggtaatttataaaggtaagaggtttaattgactcacagttacacatggctgagaggcctcaggaaacttagaatcatggtaagtgataaaaccatcagatctcgtgagaattcactcactatcacgagaatagcacgggggaaaccactcccatgattcagtcactcccttaacacatgggcattattaatataatttgagatgagatttgggtggggacacacagccaaactatatcaaggggattgggaattttgttatacaatgttaacttacacgtgtggagcacaaaagctggttatcaataggatgtggcattttcaaatgcttttatttcataataaccagcaagatgggactggtcaggctatcaagaatagaggatcaataagggaatttaccttttttgggggaccactgtgttcataaggttggtctaggtaaggatttctagaagctcggaagggaagaggagttggtgcttttgtttgctctgaaggaggggcttggatcttaaagaactgaaaaaactttagtaaataaatatttcccttaaaattgtgtttgccctgtttattttctgatcttctctttaacctcttcctttcccttagcacctgcttccagttaatcaccaatagtggtttttaacctaccagatgttgccacaagtaagctttcactagttctctatttctgttattattgcctcaagttcatatccttctttctcgactagtgattcgtagccagggcagttgtgtctttttacccccagagaacatttggtaatatctggagacatttttggttgttacaactgggtacttggtgcttagtggtatttagtgggaggatagagatgctgctaaacatcctacaatgcacaagacagccccccacaagaaagaattat

SEQ ID NO: 13075 - DNA, 1052 bp, Homo sapiens
attttttgtaaagatggggtcccactgtgttgcccaggctgatcttgaagtcggctcaaacagtgctctcatctctgcctcccaaagtgctgggattacaggcatgagccactgtgcttggcactaaaacaatactttttttttttttttttttgagactgagtctctgtcacccaggctggagtgcagtggcaccatctcagctcactgcagcggcaccatctcagctcactgcagcctccgcctcctgggttcaagagattctcctgcctcagcctcctgagtcgctgggattacaggcgcctgccaccacacccagctaatttttgtatttttagtagagacagggtttcaccatgttggccaggctggtctcgaatttctgacctcatgatccgttcgcctcagcctcccaaagtgctgggattataggcgtgagccaccgtgcctggccaatactttttaaaaattgcattcaagcttcatcttttgttctcaaacttcaccttctgctaatggtgaactgcatacttgtggtttcctctaaacaccatcatgtctgtatacatagttttcccctaacctatactacatacttccatctcatattttcctatctaggcacatttattcttccttcagaactttactcaggcattcacttttctctgtgaagctacctttgtttctgctctattcatacatgattacttatgcattgttatatcacagtgggttgtggtttgtttacatttctgttacctcctagcctttaatctgtcttcgagcgtaaggtgtgtgttgtgttccaaatacttagaacagttcctgatacaaagtagattctcagatgtttagttgaaagtacatttttttcttcagggattaattagtaatttggaaattagcttatagatgagatattgttataatttacattctatgcaataaaacttttctatgtaatctttcgcctcaccatcatgttttacattgctaccatctcttttcagatgttattttgtattttgtcgcttataatggtaccttaa

SEQ ID NO: 13076 - DNA, 1032 bp, Homo sapiens
tgaaatattttatcacctgtcctacagagttgttgtgaggattcaaatttccaagcacataatagatattaaataaatgtccattgtccagttttaccttatcaccttatctcctaaagttgatgtttgtttatatttatttagagtacagcctgcagttatattcatatgtgcttaaatcatgatatgtgtataatggggcagtgacacttggtctcttttaagggctcacatttaaatgctaactcacttgaatattttgaaaaataaatgctttttttgaaaggacaacttaatgtgttttttcctgtgattttacatttcattttgaatgaaaggttctgggaaatgtatgattttgtaaatttctcataatattgcaggttaagatttacctaaaagtagtgatacattaaataaaatcacgctaattttgtctcagacttttgaaaattgtgtggttgtgaatcataagttataatattactattgttttagtgaagtgatacaattaaataagaactgttggactgtgcatgtgttaggggatccatttgatttcattgtctccttgtcagcatctcttttgatgctacttttttccccttgtctgattaaatggcattttttgtaagaggtatttaattataagaatgcttacattaaaatctcttggcctataaattctcatgtgagttctagttgcttgttactgcttcctttaagatctcgggggcggtgggtggttggaaactcactagatttacttccgtctttactcactgggttttggtattacttcaggtgatttgtaatctctaggccacaggaaatgggataatgtaggcttttgatgcaatggattggactttgtaaaggtgaagcttcaagctatctacttagggtgcctggggactttgaagagttatagaactatgatgcagctgcagtggcctttctgtaaatgtactactttctgttcacacatctcaccctggacctcctcttctctctagctgatactcgaaatct

SEQ ID NO: 13077 - DNA, 1078 bp, Homo sapiens
aggttcaagcaattctcctatctcagcctcccaagtagctgggactacaggctgcaccaccacacccggctaattttgtatatttagtagatatagggttttgccatgttgtccaggctggtctcgaactcctgacctcaggtgatccagctgcctcagccacccaaagtactgggattacaggcgtgagccaccacacgcggcccctaactgacaaaatcaacggcattcctcttacttgccctctgctacaattgacagttgaccattcttctttttttgaaacttttattttcttagctcttagattgttattagtgggttttttttttttgtaagacttcttggcctttgtactgccctcaagaactctgccaagctctgtcattgactgttttttctttcactctttcttcatagtgctcttctgtaatctcacatgtcttcaatacttcagctccttcctagtcacatttgactcctggatacttttttcccctcctagtcctctgcactcattctattatatttctggtttcttctgaacatcttcatctccatgacataggacttaaaactcaacctgtctaaaatgaacaccaagttagggatcctccccctctcacagaggcagggcgggttcctgtaaaaaataaaaataaatgaataaaaaataaaatgaacgctgtatatttttcttcaaacctgtttttcatttacacacatctgtagacacttattcacaactatatgccaccatatatcttggttattgatatcatttggtgtctaacttgtgagctctttttgacccctcacttccttacctgccatatccttcagcaactaagatctgttgctggtttgaaattatttttactctgttagttataatgtagatccacctttaattcttgcttggattattatattgtggtgtcttagctggtttcctgcttctagtcttctttttcaaacaactacctgattgtctgatcttgcctctcatctttgtcattgggggaaaaaaggtcaaaatcccttatgaaggcatccaagctgctccttgctcttgttc

SEQ ID NO: 13078 - DNA, 1203 bp, Homo sapiens
gaatattagtttctcattcatcccatcattgtatgataacaatttttttcttataggcctttttgggccatatatgcaatgaaatgttacatatcttacgttccgttatcattcaacagaaacttcttgtctttccatctaattaaaaaaaaaaaattaggccaggtgtggtggctcacgcctgtaatcccagcactttgggaggccaaggtgggcagatctcttgaggtcaggagttcgagaccagcccagccaacatggtgaaaccccatctccactaaaaacaaaaattagccgggtgcggtggcgggcgcctgtaatcccagctactctggaggctgaggcaggagaatcacttgaacccggggggcagaagttgcagtgagccgagatcacgccactgtactccagcctgggtgacagagtaaaactctgtctcaaaaaaaaaaaaaatgataataattacaacaacatttaagctaacggtcaggattcttgatttattatatttgggtctagaaggtagcagtagggatcatttttgaaagttgggggatgatgtcattttggagaactcactatataagaagcacttggttgttttggacatgaaaattggggggcaggctgggcacagtggctcacgcctgtaatctcagcactttgggaggctgaggtgggcagatcacttgaggccaggagtttgagaccaacttggccaacatgatgaaacattgcctctaccaaaaatataaaaattagccaggcttggtgacacacacctgtaatccctgctactagggtgactgaggcaggacaatcacttgaacctgcgaggcggaagttgcagtgagtgaaggttgtgccactgcactccagcctggcaacagagtgagattctgtctcaaaaaacaaaaaaaaaacaaaaaaaaaattgtggggtaaatttgagtgtatgagaatcttagactattgaatgaacattaatttttttaaaatgtccacttagaactatttaaaatataaacgtaaattagggttttaattatgaatataaatgagtgcatatctgtatattttacagaaaccaaaaatttaatattatagagaaatatctgtctttaggaaaggattattcaaacataggtcagggatagtaaaactttagttttttttatttctatttttcttatttatcccaaa

SEQ ID NO: 13079 - DNA, 1106 bp, Homo sapiens
agatatcttttatttacatgttacactttaatatgtatgtttttaaattgttacaaaaaaatcaactaaattgttcacatgagaacatgtcctggcaaaaaaagaaagagaaaataagagaaaacaactaaattgttgttaatgttagataaataagaggcacttattgattcaaccacagttttctggagatcaactttaatttttgtttgtactttggtggtagcttttttcattggaaagaaatccaaaattaaaattacattgttaactaaatcttacttttttgtgtgaatttttgtaattaattttcataagacactcttgtctttaagtttcttgtttgtaaacaacacaacacaatttatcactatgaatgaaggacaccatttactcaaacagtcactaccactcaagaagaaaaaaatggttcttttcaaccaaaacagttatatttagtagctaacacctttcttccctctgttttgatgcttcgtttaagtaagtgttattatttaaaagattgccaccattgtagagtctagggagatcccatcattttagatcatttggccaagtttggggacaagcaggtaggttactgttttgtttcttcaaacatagagaccgaagtaagtaacctactattataggccagtgggtaagattcctactagtatagttaaaaccctgatgctggttttttaaaatatgttgaattattcatgtttttgggatttaggcactgcactttatacaatcaatagtctaatgatatttgttaaattaattaatgacagttcatctagaaatgacaccattaatacaggcaagactgaagttatgtcaaagggaagattactatgtgtagaccaggaaaacaaagtagttgtgcaggctgtgatctctatcaaatattgaggactgtgtgtttgataaagctcaggttaaattcatcatataaattgacattatgtgcctgagtttggtcaataagattaaatacattttatgagaaagctttaaggtacttaattattttgttaatgcttacagtatttctaataccagatagtcttaagtatctatcatagatagatattcag

SEQ ID NO: 13080 - DNA, 1032 bp, Homo sapiens
gattgagctcaggagttcaaggctggagtgagctatgatcacacaattgatctccagcctgggcagcacagtgagaccctgtctctgaaaatgaaaataaataaataaataaatctttttagagtactttgaaatttgtcgttttattgcataatataaagagattttgtacttttaatcagttcatggtgttataattgaaatgtcactgttacgcagtcataaggtaaacatttagcacttttcctttatatttacccaaaagtgaaaaccagttcttgtttacttctcaaaaaaatgaaaaagaatactttatttgtaatatctttgtagtctcattcacagaattcctaatcccccgcaacccggaggctgtaaaaatgaggataaggggttagaaatttccaagaagtgactgttgttaagatagacattgaaggacagcaaaataagagtagaattaggtatcataaagagcatagtctttgaatccaaggttcagtttaccccgaatctagatgttggatacttcaagagtagaaaattgttctatcacatcctaaaaaactgttgttttaatggtaactattgatttgacccactttaaatgggatatattatatttgcatatagaagatgaagctctagtagcttcaacgtaaaaaaaaaaaatctttgaaatgtatgctcactttggcagcacatacgctaaaattagaacagtacagagaaaactagcatggtccctgtgcaaagatgacatccaaattcatgaagtgttctgcattataatatatttttaaaaaatttataaagattaaaaaataaaaaatttataaaatactgtattgagaatttaatttccattggcataaacacaaatgatatgcacagaattacatatacatgtattaggaatcacattaagtgtttagataagggatctgttaatttgagttcgagggtgagcaacccttatccaaaaacttttttttaaagactcccttttattatgttaggctaaaattgtaa

SEQ ID NO: 13081 - DNA, 1042 bp, Homo sapiens
ccccacccccgccaacacacacacacacacacacacacacgcatgcacacacgcacacacacacacacacacacggaaagtaaccaacttgtcaaagaaaaaatacaacaaaatgaaaatagctttggcccttataatactttccatttatgttcccttcatattttttcccagtgagaaaccatatggtttgtgctatagcttctcttgaaaactttgttagctatttaacaatctcactgtaactgagtgaaagctttaatcaagaactgcccatgacatatagatgcctttggttcattggctacttctgtagttgaaaggaagttgaactatttttttggacccagtaagtttgtcctttccacttgggtgttgaaagagcttatgagcagtagctgttctgatttttgttggttgttttctctagggaacaagctaccctctgagtcagcactggacttgaagataaatcctacaattcatgaaactgactgattcgactaaaggatggatagtttgggcagcgttggacagctctatgaggggtctgtttgtttaactgaagggattgttgagttcagcaacttttaattcccctaatcataaggggttgctgttgtgaaaacagggtttgtgaaggaatcagttctggcaattaacatcagtattcttactgacttcgtttttattttattgtcaaacttctttaaagtggataaattttactgctttttttgccagcaagaatttgtatgcactgagaggtcagcatagaagctttgcagtctacttatgaatccaagtttctttttttaaaatatatgaggttataaacatttctctcaagtaaactttttgacacttggattatttcatctttacaaaggtagtatgcatttgtggcttagaatttttaagatttaatggaacttaatttgagtagtaaatattttgctagtttagtgagtatattttggcttatggctaacatgctttttagataacttttattaataagatataatgaatttttacccta

SEQ ID NO: 13082 - DNA, 1023 bp, Homo sapiens
gacatagaaaatcccaaagctgtgtctgtgtgataacgcatataattttgttatttaagaattaaaagattataaatgtataaattttattttaatcatttgaaagttgggatggttgaaaatatataggagtaatgatagtattacctagccagtatttgagtagattctttaaatatctttgattgattaggctagaagtacaaatagtcatccatcatggcagagtttagaaaattgggctttagacaaatgagtttgcagaaaattcaactttcgctccatagctgcatgattcttattaccttgttaagcttgatacttttgattaagaacattttttgccagatttgattttctctgcaaaggttaatttgattgaaaaaatgaaattattttgaggaaagaagtaaaggctagtattattttagtgtctactttctgattctgttgatttttggatggtgaagtggttggttttatattgtacactctattctgggatgagatccatgtttaaaacatacatatgcctatgtcttgtttgtcccagtcatatctttatttgtgtccacttttaaattttccttttcggccggatgtggtggcccatgcctgttatcccaacactttgctgggaaccgaggtggcaaggttgcttgagtccagagttcaagaccagcctgggcaacatgttgagaccctgtctctacaaaaaatacacaaatgagccaggggtggtggcatgtgctggtgatccaagctactagggaggctgaggcagtatatgattgcttgagcctgggaagttgaggcttcagtgaaccatgttggcgccactgcactccagcctgggcaacagagtgaaacgctgtttcaaaaaaaggacaaaagaaagaaaaaagaaagttctcttcaacagaaggctgtacttgcatatagtatatagtcatctggagcttgggaatttttttgactaggttgcatcaattgcaaataatgctgtgacattcaaactttaat

SEQ ID NO: 13083 - DNA, 1025 bp, Homo sapiens
tggttttgaactcctgacctcaggtggcctgcctgcctcagcctcccaaagtgctgggattatatgtgtgagccactgcgacgggcccttttttttttttttttttttttaagatcaggtatattttaaatgttgggatgttgtgttttatctcacagttctgtgtgttcataacattggtaggggttgagggagggtgtccatgttagtttagtctctcattttccagaaataatattgtcctaactggttggttgtatttaggaagggtgctgatttggtatatattaattttctaatcattaatgaattctgtaattattttccaggagttttttatgttgtttctcttaggttttccagaaatagaattgtgttatccaaaaaaacagtgatgctttgcctttatagattagccttgaagtttttaaaatctcatttctttcttttgttagttccagttaatttctccagtagacattcctgtgttgttccttacttttatttgaattgggtacttttgagaatcatttttcaaatgccctaaagcagttaatttatcatatattacttttaaatatctcagtttgcatgttcactttagaagttacagtgtaattattgtatactgatgtcatcagaatgtcatttcaagagtaaatgacaaaaaaaaatacaaaaaatgaaatacgaaagtgaaatattcttaatttagaatatttaaaatacaaattttcatccttctagattgttgttatgctgatcttctatgtattactatatttgctgtagtgctctgttgattgagtgtcagttaatatcagggtgttccagtaaccattggtagccctttccctgctgtatatggaaagattgaaattatacaagaatatttatgtgtgaaacatgaaatttctaatgaagaagaagaaacttctattacagtgtatctgatgtacctcattattaaaagaagacctttagttttattatatcaaatggtttcctgaaacccttttagcgta

SEQ ID NO: 13084 - DNA, 1029 bp, Homo sapiens
tttactttactgtgcaccagaatatttttatctcctgaaacttaatgaagtatgggttcttaagcaggagaggatggtaattattaggcctatttgtgagactactgtgtgccagacagtatactaattaaatactttacatgtcttactttatttctcacaaacatcctgtgacatattattttcatttccattttacatatgaggaatactgaagttgacaggttaagtaacttaaccttcaggaccaatggctggtaaacagctgactgattccagacttaaaactaggttgttctaactgtaccacaatatttcttaaagcgtattaaagtatctttccttagcttactctgtataaatgaaatatgatataatttagtaaaatttcataaataatacagtaggaatacatttgccataaagatctcaaaatgcctgcttgtaatcagaaattcagcatcgtctagtgagtgttgtctcttgattgctaaagaattaaaagaaatatgtctggctgttacaccttaagatggatctttccaggtaaggtgggaaggaacttacttgtcataacctttgaaatattcatcttggaatttttcttaactgtttaatattgtatttgaggctttagccaggttttgcaaaagtttaaaaagaaaaaaaaatggaaggcacaaagaccggaaaggagaaaataaacctaccatctataaatcatgtgactgcagattagacattatttgaaataacaaactgtagaaaatggctggatgtaagattaatacatcagttgcatttctgtaggccagtacccagttaacttcaaaatataattaaaagcaaatgctacttaaaatggttttgcaatatcagtatgtaggaataaataacaacaaaagataggtaagatttcagcaggggagatttatttattacgcagtattaaataatataaatgaaatactgtagattagtagaggttactcatgattaggaagacagaacaagtaagatgtcaatttt

SEQ ID NO: 13085 - DNA, 1084 bp, Homo sapiens
catctagcactattgtaaagaagggtttgagaatggaaatgggtaagtgcagtcctacttcacttttctttctcatttccatagtagtgaaaatgtagagaagagacatgtttactgtttctccattggctgttacagttttccagaggaatgaaatgtaatatttaagaatgaacttgacttgcatgaattaaaatgttttcaaaattttgtgtgctaagatgacggcagccaaaacagctatgtttgggttatcttgttttttaaattgcatgttggacatccaagtaattcctcttttatcttgggtaggtatttgttgactgaccaaaacaggatgcgaagtgtaaatgacatcatgcccatgattggtgctcgattttatactcaattggatgctgctcaaatgagaaatgatgtcatagaggaagaccttgcaaaggtaaagagtgtaaattttttttttttttttttttttttgagacagagtcttgctttgtcacccaggctggagtgcagtggtgctatctcggcttactgtaacctctgcctcctgggttcaagcgagtctcctgcctcagcctcccaagtagctgggattacaggtgtacgccaccacaccccgctatttttgtattgttagtagagacggggtttcaccatgttggccaggctggtcttgagctcctgagctcaagtgatccgcccgcctcagcctcccaaagtgctgggattacaggcgtgagccattgcacctggccagtaaagagtgtaattaaaagaatgtacacacaacttgcatctgtgtatataaatagacacaaaataatcattgtactaaatataatgccttatttgctaagatttcagatatttttgtcggcactgaatgtttggtattttaatttcttatgtcctctggacaacactgttcttttcattcatggctttgctacagtcatgtgacaaaaatcttggtttttcatgtgagttacttttccaattcctatggacagctccataatcttcttgagtaccattatgaaatgaaatggacatattgtgtttgtttaaaagtataacc

SEQ ID NO: 13086 - DNA, 1030 bp, Homo sapiens
atcatagccttttattttagagacttgtttaaagatattcagtttatttgcacattctttgctttggaaatacttagattttgcacaagttcttattagataattttctattcatgtttatgcctaattcaagaattggctatcggctgggtgcaatgggtcacacctctaatccaagcacgttgtgggggctgaggtgggaggatggcttgagcccaggagtacaagaccagtatgggcaacatagtgagaaccttttctacaaaaaattaaaaagcaattagctgggcatagtggtacatgtctgcagtcccagctacttaggaggctgaggcaggaggatggcttgaacctaggaggtccatgctgcagtgagctgtgatggtgttactgtacttgagcctgggagacaaagtaagaccctgtctcaaaaaaaaaaaaaaaaaaaaaaaacaaagaactgattattattttttgaacatttctcaaactgggaaggtttagcgttgcaaacctgggcttatactccatgaaaataatacccattttgaaatattaaggaagtttacaattgtacagtgtttcttgatttgagggataatcttcctcagaggaaatttgtacaagctgaatttattgagaatagtagcaaattttcccttgattaagtgtggtaaatgtgagtatatcctgaccactgttaccacgatctggcagtaatagtactgcgatagcaatttcatacactggacatcattaactacctcatgaaactgcctacaagacttaccaggcactatacttgcaatgtgtgagtaagttcaaataagttcttgccaccttaattccagcagggggaggagtcatatggaatggtcagtagcatcattgaagatgagtattatacaaaataaatttaacttcttttgctttgaacatgtagcacaccctgggcctgactactatattaatattccttgtgcaccattttactatttatattgccggggggagaggcatttctgaaatg

SEQ ID NO: 13087 - DNA, 1035 bp, Homo sapiens
ttaacctgttccactggtctgtgtgtttgtttttgtaccagtaccatgatgttttggttactatattcttgtagtatagtttgaagttgaatagtgttatgcctccagctttgttctttttgcttaggattgctttggctattggggctcttttttggttccatatgaatttgagaatacgtttttctagttctgtgaaaaatggcattgatagtttgataggaataacattgaatctgtaattgctttgggcactatggccattttaacaatgttgattgtttctatccaagagcatggaattttttccatttctttgtgtcatctattatttctttcagcaatgttttgcagtttttgtagagatttttcacctccctggttagctgtattcctaggtattttattctttttgtggctatcatgttcttgatttggttcttagctcaaatgttattggtgtatatggtactgggttttatatattaattttgtattctgaaaatttactgaggacgtttatcatttctaggagccttctgaaggagtctttagggttttctaggtatagaatcatatcatcagtgaagtgggataatttgacttcctctcttcctatttggatgcctttatttatttctcttgcctgattactctggctaggacttccagcactatgttgaataggaatggtgagagtggacatccttatcttgttccagttcttaatgagaatgctttcagcttttgcccattcagtatgatgttggctgtgggtttgtcatagatggttcttattagtttgagatatgttccttaaatgccttgtttgttagaggtttttaacatgaaaggatgttgaattttattgaaagcttttgctgtgtctatgagattattatgtggtttgtagtgttagttctgtttatgtggtcgatcacaattactgttttgcatatgttgaaccaaccttacatcccaagaataaagcctacttgattgtggtggattagctttttgatgtgctgctaaatt

SEQ ID NO: 13088 - DNA, 1038 bp, Homo sapiens
gttgttactcctaactccatatgacttctacataaaaccatgatagatgctagtataaatctgtccaaacatggattataacacagtgtgatttaattggtcctagactatatccattaggattgggttcaggcatgaataacaaaatcccgaaacaatggtagcttaaggcagctgttcatttctctcttacataagagtcagaaggtgagcgctgaggagcagctgtggttctgctccccgtcctcggggacccaggctccttacagccactgtcctatgaccgcaaggtggaggaccatgatgccccccgaccacggtgcagtgtgacacttggtgtgacagtcatcacatctatattccaggtggcaggctggaagaaggaatgaacaaagaagcagagaaagtgggtctgctctctctggggggaagtgtccaggaactgcacttgactatacatctctttggccagaactaagtcacaagtcaaatttagccacaatggagctggagaaatgtgctttttttctcgttggtgaccttgcccagatattattttattactatggaagaaggggagaatgtgactagcaccctatgtcataggtcctcaattgcctcaacacttagatggggatagtagtcctgtcgtatgtaagtatgaggtaggtgagggcaaaggatctagcagaatgtttggaagaatagtgggtgctcagtgtgtgttaattcccttaaatttcagattagattctgctgtttcctctctcgcccagctttaaagaagctgactcaaaattaagaaaccaagaaaccagcagaaaaaataacgaaccttgggatcacaaaaagaatgtacgttttctgattcataaaaatatctgttctaagcacaccaactaaaagacagagtttgtcagattggataaaaaaagaaaagcaagacttggctacatgctgcctaaaataaacctgcttcaaatataaagacacaaataagttaacagtgaaaggatgaaaaaaatatatactatacta

SEQ ID NO: 13089 - DNA, 1083 bp, Homo sapiens
cttggttgcgtaaagatgttcgtttttattgccatttgatttgcgagaggagaaaatacatttcaaggtttttttctttttttttaaccttttggaggtccttgttagctattagcatatagtagttactctctcatctctttggtttatctttgcaactgatgggaaaagttatgaatttctaatgtacctggaagagtattttggaaattggttagtccaaaaccagtatatatactctgaactaaagagagtatagaatcttgtaaattctaaaagatccttttagaagctctaaatcgcttttagaattatagtaatttgtaccgactggtacggcttttatatagcagctcattaaattctgtaatactccacattttattgtatttgacagtttatgagactgtctcatacacttttaattctcagaactttgcaagatttgtattcctatttcatgaataagaaaataaattgatttcagagggtttgggaacataagatcctgatacagtggcagagctgtggttggaatacagacttctaatttcagatctgtttattccagcaaaaaattagcagttcatcagaattacctggagtgcttttaataaatttctgagtatcacccccagatgctgattcaatagagttggcccagaattctgtggttttgtaacatttgaggatgagtctgatcatcatcagccaggtttggaaaatactagactaaatcacatggttgttaatagatacttatgctgggtataatttgaagtaaagtaatcccaggcgtgtctacaaatataaatttctttatgtttatattcagtaattttttttatgagtgtcactgtttggcactgttgcagatacaatgttaggatacaataataaaacaaaaatttcttgcccttaaggaagttatgtcatagagtgggaaagacagtgaacaagtatgtgtttttctgtcaggtgataaaaagtgctgtggagaaaaataaggcagtagggactggaatgccaaagtagggggagtttgcaattttaaataggatggtgaggggaacgcttcaatga

SEQ ID NO: 13090 - DNA, 1103 bp, Homo sapiens
cctgtaggatctgacatggtctctaggtagataacatccaaatggaattggattataggatacccatttggtgtcctctggagaattgcttggtgtggggaaaaagcccccacacatctggtcacaaaagtgtgctgggaggatagaatatgtgaaaattgtcataatcaaaatggagtcacttgtgttaaaaaagaaaaaaaaatcctgactggccaggcacagtggctgacaactgtaatcccaacactttgggaggctgaggcaggaggattgcttgatcccaggaattggagaccagcccatgcaacatagtgtggccttgtctctacaaaaaaaaaaatttaaattagctgggcatggtggtgtgagtctgtagccccagctacccgggagggggactacgggtgcacggcaccatgcccaggaggtccaggctgcagtgagctgtgattgtgccactgcattccagtcaggatgacagagtgtgagaccctgtctctattaaaagaaaaaaaaaagacaaatagatccaggaaaggctatgaagagagagctttcatgcataaataccaaaatatctcaaaagactctgcaaaaaccacacccttgcacaaaggccatcatgaaatacttctgaaatacacagaaaatacatcatgaaataaatacacagaaaatacttctgcaaggacatctgcccagcaactgcctggtccatctgtggacgggtgtcatccttgttattgatccttgtagccaagggtaattatctcaaaacaagtatgtgatcctccttattttcctttaaaaaccttttgtcttcccttacctccctgaacacacacagtttactatggcatgtgtattcccattggaatactttattcctgaataaatgtcactttctttttagaagcttctcttttctttttatttagattgataagtagaaaggaaaaaaagcttttttccctttggactagttgaaggcagttgcagtattctgggggagagggtggtggcagaggtgttgaggcatggttggagtttatttatactttgaaggtaaagccaacaggatttgctgaaagattgggata

SEQ ID NO: 13091 - DNA, 1115 bp, Homo sapiens
acacagaaattactctgtgcacttttaatttgaaaatacttttaaaatgtgtagtataatgtagtgtctgtcccaaaagagtaacattcattatagtgtttctttacgttgttgaaaattttaaattcacttaacattagatttttattaaagcaaaaatatgttttccttattagcttacccttttgtaactcagattaaacccttgattgttcaaattaacctgaaaaaaattattcttttggaggccaaacttttgattaagtagttgtttgtctctaattttttcaaatttatgtgtataaatataacctgtcatcaaatcaatgctaacattctatacatgtttttcatgatatgaaaactataaaacatgaagttatttgaatttgtgtagtttttatcattttatttttactttccagtgcatctatcctttgggctctaaatcacttaataacctaatttctcctgatttggaagaatgtcacactccacataagcctcagaaaaggaagagcttagaaagcagctataaggattcacttcttttagcaaattccaaaaagactagaaattatattgctattgacggtggaaaagttttgaacagcaaacataatggagaagtatatgacgaaacctcgtcaaacttacctgatagtagtggtcaacagaatccaattaggacagctgattccttggagcggaatgagattttggaagctgatactgttgacatggctactacaaaagatcctgctacagttgatgtctctggaactggcagaccttcccctcaaaatgaaggatgtacatctaaactggaaatgccactggagagcaaatgtacatcatttccccaggctttatgtgtccagtggaaaaatgcttatgctctctgttggttagactgtatcctgtcagctttggtgcactcggaagagttaaagaacaccgtgactggactgtgctcgaaggaggaatctatattctggcggttgcttacaaaatataatcaagcaaatacacttctatataccagtcaattgagtggtgttaaaggttggtactaatattttatttttatttacttatttattcatctggagtca

SEQ ID NO: 13092 - DNA, 1023 bp, Homo sapiens
tgcctgggtgatagaatgagactctgtctcaaaaaaaaaaaaaaaaaaaaaaaagtaaagtaaatgtggctcaacatgttgctgtcagttggaacatttgtttctgatcgtgtcttccacccacaaattgaatgctttttccatcttaacacttatcaggcactgtggccataacttgagcagttgagatgcaacagcaaaattagcacaaatttctttttctttcttcgcagtttcatggataagagatttgttcttagatctcagcaacctcagcatatgatttttttctttaagttgagaactttgacctttttacttagagaagcattttacagcttctctttggcatatctgaattgccagcattactatgctcgtgctttggggccattattaagtcaaataagggttgcttgaacacaagcactgcaataccatggcaatagatcgcatcaccaagatggctgctaagtgaaccacaggcaggagtgtagacagcatggacacattagacgaagggaagattcacgttgccagtggaacacagcaggacagcaagagagttcatgatgctactcagaatggcatgaaatttaaagcttataaattgtttctggaattttccgcttaatattttcagaccacggttgagttcaggtaactgaaaccataggaagcaaaacacggatgaagagggaccacttcgtattgcctaatttagtttgttttgatcttctgggacctttttttcttgttgtaaaaatttatggggctgtttatagttgtggctcattgatttttcattgctacataatacttccattttgtaaatataacagaatattcatctacctgtcagtggacagtggggtttttttgccattataaatgctgctgctgtgaccatttggggggcaagtctcctggggcacagtatgagtttcccttctgtataacaaaggaatggaaaattatagactttcgtgtccaaatttacaagataatgacaattgttttcca

SEQ ID NO: 13093 - DNA, 1049 bp, Homo sapiens
tctgcatgcaccactgttcctggtgtttccctgtacagtagtcaaactcatgaagaaattttagcggaattattgtctcctacacctgtttcaacagagctgtcagaaaatggggaaggtgactttaggtatttgggaatgggagatagtcatatcccaccaccagtaccaagtgaattcaatgatgtttcccagaacacacatctgagacaggaccataattattgtagccccaccaagaaaaatccatgtgaagttcagccagactctctgacaaataatgcctgcgttagaacattaaacttggagagtccgatgaagactgatattttcgatgagtttttttcctcctcagcattaaatgctttagcaaatgacacattagacctacctcatttcgatgaatatctgtttgagaattattgaattaatgcttgttaacttttttcatataatatttattattattagaagaacttacaatgtgttcaggtagtgtttatacactggacttgtgtaattacttgtgtaataaccatgaacaaaatgcaaggtttaacctttggttctgcccatgaagcatgtaatctttcttacacattaaaatcactgaatgtgttctcctttttggtttcattttgttcttgtgagagtatgaggatttcaaaatgttaaagatgaaaagtggcgtctagtttctgacagtttgtacagttggatgcattacatttttagatttgaagttttggttatgttagtgttatgagtgatctttgtggtggttttcttcccctggaaacctgttgctcgtggcgctttgcccacggtgcccgagttcttgtcctgtgtccagatatgcagacaaatgaagggtgaagaagaagaagaggagctttatttagtgttagaacagctcagaaggagacccacagtgagcagctcccctgtgtcggcgggcaggtcgtccctcaagtgttcagctctcagcagagaaaaggccctggagagggtgactcctctcagctctcagcagagaagcagccctggag

SEQ ID NO: 13094 - DNA, 1082 bp, Homo sapiens
tcaggagaaagatttggccagaagatggtagatttgagagtcagcagcatacataggtagtggctagaagcttgaaggtgctgcttccaggggaagccatgggccctgcgggaagaccagtgtctaggggctgggcagagtcggagcagactgaagggccatacgaagggatacagagaggaggggcagtgtgggatgctggctacctgaggactggcccgtcaaattgccatcagtaatgcgacattctctggagaggcctcagagagactggtctcagactgcctgactaattgggactgtggcctgcgcactgacctcaggatgcatcccactcagtgtgcttcgttgttgctggcaccaccactgttattattttttaattgtaataaaaaacacctaaaatgcacgtcttaagtgtacaactcagcagtgtcaagtggaatcatgttgtgtaacagatctccagagcttttttatcttgtgaaactaaaatctgtatgcattgaacaactccccattcctccctaccccaacccctggctaccaccattctacttgctgtttctgtgaatttgatttttctggatttctcgaagagtggagtcataggtatttgtccttttgcgactggcttctgtcacttactaatgccttcaggatttatgacagactctgtgttgttgcaggtaacctcagtccactgtgatggacattttcatctgtagacacctatttccttggatgctcatttggcatttcacgtatgcacccccaaggtgtactttgtccttcagtgtatctgttctgccttcaggctccagagggaggtgggacctgttccctattcctttttgcatcccgcatagcacgtagtggattgccaaacacacacagcattagaacctgtatttccattgattcattgtccttagcttttgaagcttaggaaatagctacatttctttaaagtatttgactttttagtgctttattctatgcatctatttagctttatcacgcttatacttaatttttattgtcctttatttgcagttttctgtttagacagcctgttgagt

SEQ ID NO: 13095 - DNA, 1051 bp, Homo sapiens
ctctgtattatatagacaaccaagaaggccagtccaggaatgttgattccctttgtgtcctttccttgactttacggcccacattgtaggtagcgtaacaacttacagttacttaggtgtttcttctgtcctagtccccaggacaactggttacctaaagatagctcatgagacacactttcttagactgtttccaaccaaaattttatttggcctaacaattccacatcagttttgagttcacactgcctaatatttcctggcagtccatccatttgatcaattaaaacaatactttcatttttggagaaattttcattaactaccaataagatgatttcttcaaatatatgtcattccaggacactgtttctggttttctccattgtttttccaccagcaaaccttatcgagatttccttcagcaggtggctctgttgactgattcacaagtgggactgaaaaagttagcctggaagtgggactgaaaaagttagctaggaagtgggactgaaaaagtcagctaggaagtagaattgaaaaagtcagctaggtattgagttgaaaggaccctcagtcatttgcacatctgtagcctaggtggttgtgtcattagaactgtgctattgggggcatgacttaacttcttttttttttttgaaacggagtctcgctctgtcgcccaggctggagtacagtggcgcagtctcgctcactgcaagttccacccccgggttcacgccattctcctgcctcagcctcccgagtagctgggactgcaggtgcccgccaccacacccgcctaatatttttgtgtttttagtagagacggggtttcaccgtgttagccaggatggcctcgatctcctgacctcatgttttgcccgccttggcctcccaacctcgtgatccgcccacctcagcctcccaaagtactgggattacaggcatgagccaccacacccggcccaataattctaaaaattaggaaagctaagtaccaaacttcgtgttttccaggaactgaatatttaatgaggaaacatttcat

SEQ ID NO: 13096 - DNA, 1030 bp, Homo sapiens
gccgaatgttaattcccaagatgggggaaatgtctccaggtcatgtcagagaccttcgcagcagctccttcccctgctcccctacctccgcatcacaggcccagaggcccaggaggaaaaagtggtttgtttcgtgggctggactcagggtccccatgctgtgtgcagtctggggacttggtgctgtgcatcccagccactccagccgtgtctaaaagaggccaaagtacagcttgggctgtgacttcagagagtggaagccccaagccttggcagcttccatgtggtgttgagcctgcgggtacacagaagttaagaattaaggtttgagaacctctgcctagatttcagaagatgtatggaaatgcctggatgcccaggcaagtttgctgcaggatagcggccctcatggagaacctatgctagtggggaagggaaatatgaggtcagagcccccacacagagtccctactggggcaccacctagtggagctgtgaaaagagggccactgtcctccagaccacagaatggtagatctactgacagcttgcaccatgcatctggaagagccgcagacactcaatgtcagcctgtgaaagcagccaggagggaggctgtactctgcaaagccacaggagaagggctgccaaagaccatgggaacccacctcttgcatcagtgttacctggatgtgagacatggagtcaaaggagatccttttggaactttaagatttgactgtaccactggattttggacttgaatggggcctgtggcctcttcattttggccaatttctcctattcagaatggctgtatttacccaatgcctatacccccattgtatctaggaagaactaacttgcttttgattttacaggctcataggtggaagggatttgtcttgtctcagatgagacactggactatggacttttgaactaatgtggaaatgagttaagacttttggggactgttgggaaagcatgattggttttgaaatgtgaggacatgatatttgagaggggg

SEQ ID NO: 13097 - DNA, 1113 bp, Homo sapiens
tgatgactgtgtattctccaagctgtgatacagcagtttttttttattgtcacagggaaataaatggtaccagaagtccctttcctgttctgtctcttcattgtaatggaagtttcagttgggcatgagcctggagagatgtgactgtctacagttctatttgtatatataaaaagaagactgaaagtcttttgacatggatattgtgaatggtatgaacttttaaaccatattattgatgatgaaaattatttcctgggaactcagtaggaataataccgtattaaggaataatactgtacataaaacatcatgaaaccctagatatgaaatcccctgaagtctgtaatcatggtggttatgttttgtctattcttttgctgtttgtgcctcataaaaagagaatgaggtcttctgctagagcttcgtattgctttggaagttcatctgtgttttatttctccctgaagccctatctttatggcttacttgtaacatgaaagtagtagatgctgccagaaaatagtgtcctcaatattttaaaacaatgttgacatgttttgttcaagtcagcaagctctatgtgagtctcaggaagtgaattaaatttggaccttatgttttactcttgttttttttttttttttaaatgttacttaatgactctctcctgactcaggagagaaaccccttgtggaaggacagcatggtgatcaggcaatttctctgggttcccaaagaatgacatttgaacacagtattttgaaacagctctagttttcaaattatatctttaatatatagtaatgtaacatattcagtattaatgtataaaaagcactctaattatataattcagtttttgtaaaggtatttgcataaaatttaatatgtcttaaactaattttggtaaattacttcttttttttctttttaataaaaactgttactcattaactttgcttataatgctttttatagcccagcacagaatttaaagccataccaccaaaagtacctgtgtgtgttaatatgtttttcttgtagcatagattgactatttgcaatagtattagtatttaccatttttccaaattagcaactaccagacct

SEQ ID NO: 13098 - DNA, 1070 bp, Homo sapiens
gaagccctaaggctcaacatactcagtgtaaccttggctgagaggatgcaccatgaggcaagcggctaattgcacctgcatgcacctgcacgcgcatgcctggcctcacaagtttgagaggtgaggatgtctgcccacatacctgaatggagactcagcctcttaattatatggtggtgcttatttacaaaagtgcagtaattaaaaagcaataaaacaaactctataactatgactggctgttttgcaaggtgttagaagaaaggtaattccataagcgtttccaggtaaagctttccatatttttttaaatggcacattgtggggaaaatgtaattatatatatattagtcccctccaaagaattcacaggccaataaatagatcagtcgctggctagtgagatgtactagctttcattcgatgttcattttggtgttctcctctttatcggcacgtctactctgtcatgctgccctttgatttgaatggaggtgggaattaaaatggccttgatgtctggaaataaaatgtcctatgtagacctgaatatggaggctttcctgtccccttggatgtctgtcctgttgctcttccctgctcttatccagcctttccccagctgtctagtggttctcacggctgcggccccttgttaatcatggccacagcctccacatgcccttctcagtttaacctggaatgctccagtggtgtcctcacagtcaaaggctgctccccagctcccttttgcctctgagtgtcagtggtagccactcaggaccctctttgagctcctcgttcatcctctctcatgtttttctgctccagccaaccaagcttaatctactcactctcctctgtatttaactaacatgctcccaaattcatgcctgtacacccatcagtctcctaataaggcctcgcttacctagaatgtaaaaatggcagggccaaatgggcttcagatctcttgctcctgcacttgcatggcttcggacagttaagtaatcactctcagtttcctcatctgtaaaatgtacgcaaaaataatgggtacctcataggag

SEQ ID NO: 13099 - DNA, 1048 bp, Homo sapiens
gtgttggagaatcaaaacagtaaggatttaaaaggacataatcaacaataaaaagaacagactgattctcatattggtgctaaagaatttgggttccctagggttggagggagaagataacctcttgagtactcatcttggcaaaggagaaaatgacatggcttcccccagaattaatctgtcccaccgtttatatgcctcctcatggatgatttatcctatgagcattgagaggccaatactctgtaagtcccaggtgatgcaatgtgtctcataagtacccagccatccacctggagcttgccttttccaggcctgcagataagagccatctctagaacctcagacctcactatttacatctgcagtcttacatcttggtttctgttatagaacaaagatcccaagatggctcgagttgcactggaatctctctacagattactttgggtttacatgattcgaattaaatgtgaaagcaacacagctactcagaggtaagatttggcttgtgtcaatggtaaccatatcactcagccactgcagagggtgtttcttttattactacctatgctaactcaactagaagctattcaaagctgacagtttctaaaagatctaagtcctaaggaacattttcaggctttccatagtcattggctcaacacccattacaaaagctccagcctctaccaggatcaacaagttccacttccagagttgcatttgccactttaacaaaaaagcagctgtaattttccaactgctcttagttttccagaaaaacttttcatagagtaattatgctaatggaaagaggtgaggtggtttgttttctttttctgaattctctctgattcttagataagatgaaatatctgccattttcccttaaagaactggagctcagccaatcttgcttgttttctcttttcccccttatctttcagccgacttataaccatcatcacaacacttttccccaaagggtcccgcggtgtggtaccaagggacatgcctctgaacatctttgtgaaaatcatccagt

SEQ ID NO: 13100 - DNA, 1052 bp, Homo sapiens
cagttttggaggccaagaattccaaggttaaggtgctggcagatttatgtctggtgagggcctttttcctggttcacaggcagcagtctttttgctgtgtcctcacttgacataagagacaagggaactctctggggtctttcttatgagagcactaatctcattcacagggctccccacctcatgacctaatcacctcctaaaggccccacctccaaataccaccaccttgggggttaagatttaaatatgaattggaggttgcggggatacaaacattcagtctatagcatgagggaaatgcaaataaaagccacaggagacaaaattatataccatataattccatttatatagacctcaaaaactgcccatactaacaagtagtgctagaagtcaagatagtggtttctcctgggtaggaaagacaggctggtgtttaagagagtgcccaggggagggttcagtggtgctggtaatattctggtttttgacctggtggtgatcataggagggtgttaaaatgactcatgatatacataggaactgtatactatttctgtgtattttatacctcaatataagtttctaaagtacaataaaagcttgattcttctctcaagtctaactttttaatgactttttttgttttgtttgtttgtttatttgttttgttttgttttgtttttgagacggagtctcgctctgtccccccggctggagtgcagtggctggagtgcagtggcgcgatctcggctcactgcaacctccacctcccgggttcatgccattctcccgcctcagcctcctgagtagctgggactacaggcgcccgccaccacgcctggctaattttttgtatttttagtagagacatgttattttaagtcatttgcaataatatcgtcagcttttatctgctgctaattacttaaagcgagttgggggaaactaggttgaagatgtttgaccatccagttagaatatcactcccacctaggcccaaaccctgtaagtaaaaaaacatgaagaagccagaatcttgccttttc

SEQ ID NO: 13101 - DNA, 1046 bp, Homo sapiens
aatacatgtgatcactgatgaaatgcaattaagaactggttagtagaaaattcagagggtcaagaaatttaacagagcagttgaactcatttgcctttatcgttgagattagatcatctttcaggctgttagtatatggaccctgtttttaaaaattgtggttttgtttttttcaatgtgaaagaattaagaaaattgttacttttctaattccttttctgtgccttgcttttctgttcacaccagtattaacagcaatgaaattttttcaattttattttccaataaaaattactttgagttttttttatggtagctagctacttccttgacctagatactaattttgattgagttggtaactattattaaaaaaacaacttaggtctaatttatcttgagctaaaaaatgtaataactgaaaaatagagcatatttaggattctttctgctttaaatttgacattcagttattttcatgtaatttgtgttttgagcactaccttttaattaatttatttatttttattttttagagactgtctcattctgttacctagtctggagtgcactagtgtgatctcagctcaccgtagcctcaccctcctgggctcaagcagtccttgcacctcaccctcctgagtaactggcaccacaggcatacaccaccacacccagctaatttttatttttcatagagtcatggtctcactatgttgcccaggctagtctcgaactcctgggctcaagcagtcttcctgcctcagcctcccaaaagtgctgagattacaggcatgagccactgtgcccaaacactacctttttaacttagtgaaaaatatttagtgaatgtgattgatggtactttaattttgtcactttgtgtttttatgtttaggtttattgcattcttctgtgaaaagaagctgttcacagaatgattctgaagaaccaactttgtccttaactagctcttttgggacaattctgaggaaatgttctagaaatgaaacatgttctaataatacagtaatctctcaggatct

SEQ ID NO: 13102 - DNA, 1049 bp, Homo sapiens
agtctctttgctctaaagcatagcaagagtgacctttgctccagttcccaataagatcctcatctccatctgagaccacctcaggctggacttcactggccacatcactgtcagaattttggtcaaaaccattcaacaagtctctagggagttccagactttcccacatcttcctgtcttcttctgagccctccaaactcttccaatctctgcctgttgtctagttccaaagtcacttccacattttcaggttatcggtatagcagtcccccactcctggtaacaattatctgtattagttcatcctcatactgctataaaaaatacctgagactgggtaatttgtaaaggaaaaaggtttaattgattcacagttccacatggctggggaggcctcaggaaacttacaatcatagtggaagatgaaggagaagcaagtaccttcttcacaaggtggcaggaaagagagtacagggagaactctcacttttaagccatcagatcttgtgagaactccctcactatcatggaacagcatgggagaaactgcccccgtgatccagttacctcccaccaggtccgtccctcgacacgtgaggattaccgttcaagatgagatttgggtgaggacacagagccaaatcgtatgaagctccttatcatttaagttttattgtgacattgcagtaattcagtcacatcttcaggctttacttctaattctagttctcttgctattttcaccatatatgcagttacttcctccactgaagtcttgaaccccccaaagtcatccatgagggttggaatcaacttctggtaaacttgttaatgttgatattttgacttcccatgaaacactagtgttcttaatggtatttagaatggtgaatcctttctggaaggttttcaattcactttacccatatctatcagagaaatcactatggcagctattctttataagacatgtttcttttttttttttttgagatggagtttcgcacttgttgcccaggctggagtgcaatggcgtgatcttggctcac

SEQ ID NO: 13103 - DNA, 1032 bp, Homo sapiens
gttgtcccctttgtgcctcagttttacctacaacacagaaacaatgatattacctaccccatggactgttgtgaagattaaatgaattagtacatttactacacatagatctatttctcaaaataatgagcattcagatattagccatctgtaatgtagttggtgatgattatgattattagagtacatttataattggaggatcatttttgccgtagggaaatagaattattaatagtttgaggcacctgagaatattatgtgagaaactgattacattaaccacacccttaagatgagctctaattttgttgtatttgtcctgtttaaagccatctagttacaatagatggaacttttttgttctgattgctttttattccaatatcttaaatggtcacagggttatttcagtgaagagcagttaagagccttgaataatcacaggcaaatgttgaatgataagaaacaagctcagatccagttggaaattaggaaggccatggaatctgctgaacaaaaggaacaaggtttatcaagggatgtcacaaccgtgtggaagttgcgtattgtaagctattcaaaaaaagaaaaagattcaggtaagtatgtaaatgctttgtttttatcagttttattaacttaaaaaatgaccttactaacaaaatgattataaatccagataaagtataaagttagtttatatcagagaagcaaaatccactactaatgcccacaaagagataatataaaagaggatctgtatttattttgaaacaaacatttaaatgataatcacttcttccattgcatctttctcatctttctccaaacagttatactgagtatttggcgtccatcatcagatttatattctctgttaacagaaggaaagagatacagaatttatcatcttgcaacttcaaaatctaaaagtaaatctgaaagagctaacatacagttagcagcgacaaaaaaaactcagtatcaacaactaccggtacaaacctttcattgtaatttttcagtttt

SEQ ID NO: 13104 - DNA, 1055 bp, Homo sapiens
tgttggaagtcttgtgaatatttctctgagactattattatttaaagttctccagtagagattgattgagcttagttgagtttgtcccttttgtaactttttcttgatgtgtgtacaaagtaaacacaagtttataagtggacaggtttgtgaatttttacatgcttatgtaaccagcattcagatcaagagacaacatcaccgacaccacagaaccacctccgttgtgccccctatcaattattattaccccaagggtagccactatcctgattttgtgatagcatgttttgtctattttataacttgatataaattgactcatatctatatatagtttgttgtatctgacttattttgttcaacatcatgtttatgaggtttgtctatcttgttgcatgtagtagagtaagcagggatactcctggtacttttgttatgaaattcttatacattattttcagttactcatcagatagtttttcatcaattgcaaaattatattatccaaagctgaattgagatttgtgggaatcagaattttgatagagtgattaggaagatccctggtatacaaaagtgaaatgtatacctatcataatttattatataaagcatgtgtattgaatcatcaagaatagatggctcctactgggatcgattgtactttattatattttgccttttctataatttttagttgtgtcgtttttataatgagtgaagagaaagtctgtaccctttagagacacttattgaacttctagtcatcatggtgtaatgaagagtgtgtgaattttggaattacatctggaattaaattccagctgtatcaaatacaagtattttcaccatgtgagctctggacatgttgcttctcttaataagcatggatataaaatatctcatggttgctggaaatataaatcatagaaagtacatataagtaacttatatagtccctggcaataggtgctctgtgaattttagttttaatctttattatgtgattagtgcaataattcatcaatccagagtagacttttgttttcaga

SEQ ID NO: 13105 - DNA, 1530 bp, Homo sapiens
tttattttcagcctgaataagaaattaacctttgatgtcatgaaattctcttcccataaaattgataaataggaaggacaaacaagttctttttaaaaccaaaaaagaaagaatagcaaaatagaatttgttcttctttcttcatggctaggtagtctggtctgattcatagacctaaaaaagtcacataaaaacaacccaagaagtaaaagtaagcagaaaagacatagaaatatgaaatcctccactctgtactttcagtatagaaagctaaagcctaattaagccagttgtgtgttaactgtcacagaagagattagggcagcttgtgtggtataaagaatccttgactccttctccgctgagactcaggaaaccattgaggatacatggcagggtatgcttttggttaattttttatgtttttggaagattttatatagaaagaaacttgacagttatgccatgcatctttgccaatttcagtagtaatatgataaatgatctgagtgtggaaactagttagagctagctatatggtagggaaaaattgtttaaatttggattttccttgtgtttgtgtgtgcttttaattggattttaattagtgttgtaaaccgtgtagatatgtacacatcagaatgtaaaagaagacaaaggattaggaagaggtagtttttcatcaaaaataaaaaattacatatttcaaacatagaattgccttctatgaaaatgtaagaaggctgtatctatgggatgatgttttcttccatatgtactaaggtgaacaagctattatccctcacccttgggagattaagacattgtattagggtcttctagagaaacagccaatattgagtgagtgtatgtatatacagacacacatatacatatatgtgtgtatattcacacatagtgtatgtatacacacacacagagacacatgtatatgtatgagagggaatttattaggggaattgacttatgagattacagagtctgagaagtccgagagtaggctgtctgcaagctggagaaccagggaagccaatggtgttactctcagaggcagaaggcaaggcttgagaacctagcaggggactgggctattggtgcaatttctggagtccaaaggcaggaaaacctggagttctgctgtccaaggataggagatgaatgtcccagcccagaggagagtgaattcactttcctttgcctttttgttctattgggccttccagcctatttggatgatgcctgcccatactgagggcagatctttccactcagtctacaagccaatctcctctgcaaacatcattgcagacacacccaagacacgttgctttaccagctatctaggtatcccttaatgcagtcaagttgacacataaaattaaccatccagaaatatgcacaaataatataggatagaatataatcagtattataatggggagcagagtatatttgaaaagtagaatgtttattgaaatgtttcagtctgttttattgtatacaagatgg

SEQ ID NO: 13106 - DNA, 1035 bp, Homo sapiens
gttcttaaaatattgaagaacattagtcttataatctagtcaaagtcaagacctgttcaaatccaaatgtctaaaataagtttagaattgtccttaaactaagaaactagtaattgttcctggagacagacattttcatagatgcttccaacctatgtaggaactatgctgtagaaattctagcttcaggccgagcacaggccaaggtgggcagatcacctgaggtcaggagatcaagaccatgctgaccaatatgaaaccccgtctcgactaaaaatacaaaaattagctgggtgtgatggcatgcgcctataatcccagctactcaggaggctgaggcaggagaattgcttgaacctgggaggcagaggttgcagtgagctgagattgtgccattgcactccagcctggtcaacaagagcgaaactctttatctcaaaaaaaaaaaaaaaataaataaataaatgaataaaacagcagatattttaccagtttcatcctttttgggagacatcccacttggagctttctgatttcctactcaaatttgcagtgcttagacagcttgctctgagcttctgctctacagcattgaccttagggccatccattcttcctcccatctttgctctccccttccatcctcctcccttctttttccctcctttcctcttcgtctgtgagtgtgtgtgtgtgtgtgtgtgtgtgtgtgtgtctgtttctacacctcccctttctccttccctttttctctggatgttcctttttctttagcatccttttcttgtgttgctaatacagtattttctctgagagtgtcaatggtaggtagttttttggggaatttttctttttcttccaaaatgtctgtatctgctatttgtttttttcaccttatatttgcttttgtctttttttccatgttaaaggctttcctcaaatgattggcaatccgaggccgtctgctcatgattaagagtgggggggctaaatcaaaagctgtttggaaagccctgagtatatgctttcctcaaa

SEQ ID NO: 13107 - DNA, 1030 bp, Homo sapiens
ctgtctaggttatcttaagtctgtaatgttcagtttagattctcctttcctgggagaaagctttgattggtattttagaagatgcatgagtgtgggggataaacatggcatgtctttctgatgcatcagttagatagtccctggtatattatggcatagaataaacaattcatatgaatttaaggtatgatgggaagtttcaaaggaatttcatcaggactatccataatattctttagtttcctctgtgatttagggctgaaacaaaaaaaagtcggaagcagtgctttaattgacacagggaagtcgagaagcatggaatacttaccttaacagcagtgcaattttgtctgtgttccagtatttcccataattgcaaattgagctgttatcctgggataatcatagttcaagattttataatcagaagaataaatcttcatttcttacatggcactgcttacttctctatgtatatctcttcttctagttcttggagagaagatggaataggtggttctgatactggcgtagtcataggtggttgctttcacctctacctcatcacttctggcttacccattagtctggttagttgtgattggggtaccatgcttttatatggagaagaattgcctatgggtcttttccttagaaagagactgggagtaaagctagctcgcaattagagtttcaggtataatttctgttattcctttctgttcatgtgtactttattctagaaactgctgataaatagaacaaaggcattattattattttctttttttctttttttttttgagatggagcctcactctgttgcccatgctggagtgtagtgtggtgtgatctcagctcactgcaaccttcacctcccaggttcaagcgattctcctgcctcagcttcctgagtagctgggattacaggcacacgcccccatgcccggctaattttttgtagagacagggttttgccatgttggccaggttggtcttgaactcctgacctcaggtgatatcacctgcc

SEQ ID NO: 13108 - DNA, 1111 bp, Homo sapiens
tcctgtcataacatgtgatgtacccatagctcaagtgactggttcttatccttgtaagagttttaacaaatttggagataaattacacagagaaaaaggacttactacctttagtcctaactctcattcctatgctacttagccaggtgatgaagcaactgtagcctgagttgggagctttgatgttaattttttaaagaagtgttcagtcatccgggagatgctaactatacttttgtttaaatagcaaagccagagagaatttttcttattcaaagatgaattaacagaatacagataagcaagttaacaaacacaaaacctatgtaaatatcttagcattccaaagtaactgataagcaatacttaaataactgtcttagttatttaagctgccaaggaaggtaaacagcaaatgacatgagagaaaaaagataacaaaaatgaagtaatacatgaaaaagagctaaggatattgactatagaatataatttaatataagtagcaaggagcagaataaacaatgtggaagatggaatcagtaagctagagatttggcttgaggaaatctgcatagaatatagagaaattggagagaaaaaatggagttaaagggaatgaattgcagatagtgaaaaaccataattgacatctttggagaagacagtagaataatgggaaatggaaaatattcaagaaaataataataaatttgttctgaatgatttaaaatatgaatctggaggtgaagactcatttttggaaaatatactggtgcagtttgctaaattttcagggattgcaaaagtgatttcacaaatatcaagaaaaactagttatatcggggaacctgccccgataatcatgtaggttcttttctatttttcctaagcggcggccggcttgagaaataaagggacagagtacaaaagagagaaattttaaagctgggcatccaggggagacatcacaaattggtaggatccgtgatgccccacaagccacaaaaaccagcaagtttttattagagattttcaaaaggggagggagtgtgtgaataggtgtgggtgacagacatcaagtacttaacagggtaatagaatatcacaa

SEQ ID NO: 13109 - DNA, 1032 bp, Homo sapiens
aacttcttggtccctcagtttccttacccacggaagtaggaggtaataattatgtgtacctggctcatctagctgttatgatataactaaataagttagtatacctaaagcatttaaaacactacttagcacataataattagaagcattgatgataatggtggttattatgtcagtgttagttaaaatttaacgtttgtcctctgtgtaaaccaagtgccatttggtgcccctccttggtaatacaaaataggagaatagctctgtgctccttaatatatctaaagactttaataagaaaacatacaaagatgactgccagctgccttctgcctttccatcttgtatgttttgcttatactgtattctccttgtatgttttgcttatactgtattctttgcatagaatgttaacagaagcacatccttctcaaacaaaacatataaaaaaaaacttggtaagctattcattctgtatctgtttactttcttttattctaattaatctattctgttttcatgtctctgttcccctaatttatatatgccaatgtttaggagttacaaataataagtatgttttcatttaaaatttttactgaatttgaaataattttgtattgatcagctcagcctggtaaagaaattttcctcagtgttaatacatttggccttataaatcaatttattaattatattattttatatttcttatttggccaattatattcagctatataaactttcatcagagaggcaaagttctttggtggtttacaacattcaggcagattgaagacacactacacaggttcaaactgaggttctaccatttatcagctgcttttatttatcagcaagttatttaacttctacgtgtcttagattcttcatctgtaaaatgaggataacaatagtatctccttatagagtttatgtaaggattatatgtattaaaatttcgaatgtaattggaataatacccagtatataatgtcacttatgctgtgttttgtggaacccatatgacat

SEQ ID NO: 13110 - DNA, 1042 bp, Homo sapiens
gggagtgctattgtgaagctggcacaagaaccctgttaccatgaaatcatcacattagaacaatatcagctatgtgcattagctatcaacgtaaggaaatggctgtgtacaactactttttgaaggtctttgacttttaggaaggaaaaacatccactgtgatacatagattaaaatcttgaatgtgtatggtttgtttgtttctgaaaaatttatgcatgagaaacatttcagagttctgaaactgtcatttgagttttgggttgctaacatagtacagttgatcttcttctttgtaatagttttgttctataatgttatcacaggcattcagttagcagatactgaacagttgctcttaggagaactcacagaatagattccttcaagcccctggccacaacattttcatcatccagttaatatacagccttgttttatgtatgtttctgtttaaagactatttattatatatagttgtctcaactgaactcacagccaacagcactgtaactcatacctgaacaaagcttatctagcacacacattttctctgtaaggaatatcagagccttcttgtgctttggaacgccagacagcagttcatcgctatgcttgtgctttgaaacaccagacagtacttcatcatgaaataacaaaaacatcaaccacaaaactgtgaaaaatgtggcactgaatagacctcaaaaaggacactgtttacgtatgaaagctgaaacaagaaggcacagtgttgccttctttgacattagctgggaatgtgcacatctggctacttacattttttgctgctttgtgtatttactttgcaaatgacccaaaaattgcttcaagtattaattttggtgttacaaataaattttaacgagtatgcaaattcctaaatatagaatccacaaataaggaagactgactgtatgtgttcagttcctgaaaggaaaacaacagtatcgaaatttatacttttataaagacatgacatagaactaatttcaggttagaagcattccttattactcag

SEQ ID NO: 13111 - DNA, 1906 bp, Homo sapiens
caccaagactgttgggaatcttttttattgttggtaaatttccctaattacagttatgatcatgtcattcctctgttaaaatatttagggggttgatgcttgtaaaaacaactgcacgtattttacaacctggtgtttgagcccctctaatattttaacccaaatgtacgcttaaaaatcttgttgagcacactctcctttacttaacctcatttcatgtagctgaacagctttttttcttttttgtgccttgtactttgctgcctttaattttctctttactctcccatttccacacatccaacctaaccctttctgcaagtcagtgctcagacacaaccttctttacaaaacttgctctgagtcttttattttatctgcagtcctctgatacgtacaggactatgctttgcgctttagtacatgtactttatttcttgaggctctttaaatgcagtattgtatctgggaggctgctgttatgtatttgaacagaaagtacatttggagaaatttaataaaacaatatgaattttaacataatttaataattacttagatattttagaacttggaattcagttcatgaaagatttactctgtacttctgtgtgctgtacattgttctaagttctggaaatacaaagatgagtaagtcatggttatagcccaaagaagctaacaatctcttaggagaacagaaaatagagatgtatcaataatacaatgagatacacaaactaattacatggtattaatggtagttttgagatactttgtactagaaaaggctactaaaagtgaatttacttaagctgcagactaaaattaattttatagtcagtagtgaataaaagctttgattggaactttatctgggggggcggggacatttgtagtattagacaccatctgtttttttcttatgtttaaccaattatatccagtgtttgcttttttgagggtacatttttttcagataaaattgtattactctattctttacttcacatttaacttttgtaataccagtcaaaaggataatcatctttgcagaaaaatatttgaagacttcctcagttcccagtagcgctttttatacttatttattcacatgattctcttgaagtacctatgtgtgtgtcatcattcctgttaattttctcttcttcagttgttatttatgttagtggagttgcctatgatttcacagttctctaacatcactttgatgactttttgaaaacctgctacttgtgtgatgcttcaaggattgacattgcaattaatttgtcttgtattgttgcatcctgaatgattagtcagagagggacaaaaacctggacttgattgggattttaatgaatggcctgttcatttgtgaatacgcttgtgatatgtggatttttacttacccagtttgtaattgggtattttcatagtaaatctataacggagactcctctcctctgtgggactgatactgagggcggggtgagttaatgttaactttgtttcgtggagtatgagggtagataactttctgtgaaaactagactgcttcttccccttccctccctacagctaattcccccctcctccccccaaaatggagtcttgctctgtcacccaggctggagtgcagtggtgtgatctcggctcactgtaacctctgcctcccgggtttaagcgattctcctgcctcagcctcccaagtagctgggattacaggtgcctgccaccacacctggctaattattgtattttcagtagaaacagggcttcaccatgttggccaggctggtctcgaactcctgacctcaggtgatccacttgccttggcctcccaaagtgttggaatttcaggcgtgagccactgcgcccggcctccctctgtgtgtgtgtg

SEQ ID NO: 13112 - DNA, 1050 bp, Homo sapiens
gggactgtttctaatagtccgaagtaagaaaggcctgaatctcagagttacagaatcctaatctcatggatgatagggtctgttcattagtcagtcctttattttaaaaagttttctaggagattctgatagtcaggtttgggagttcccgctttctagcatttagttttgtatcttgcatgtgctgtcacgtatataagttatacaaaattagtgtcaggcgaatagtaaacttttcagcatatatatatttatatatatatatatatatataaaagatacacaatattttgtgtatctacccatgaaactccaagttttacacatatataaaaaattgggtgtatctactcatgaactgggagtttcatgggtagacacataaaatatttgttacttaaaaagtagtttggttctacctagagcagttcagtttgactagggaaaaatgccttgttcttttttttcaggtgcagtgtggtgactttcctcatctgttagtgtacggaccatcaggtgctggaaaaaagacaagaattatgtgtattctacgtgaactttatggtgttggagtggaaaaattgagaattgaacatcagaccatcacagtaagcatttcactttgaggccctgaaagtaatttatagcggggactttcagtcttggtcatgtatgtccccccaactcagttgcttcctaatgtatgatttaaataagaattccacaggtagtcttggggcacaggatttgagagctactgatatggatctgttataaccagagcaaagccatttatgttagataggaaataagagcaacagagggtttggggtaaaatgtagagggtgagattaatttcagattacctaataagacaatgtcttagctgaaattagaactcaggtttccagacttcatttttctgagagcagtagtggggatggaaagaaagagaatgattttgagaaaaatgttaaacatggtatcaagtgacttggtaaagagtgggcaactgactgactgggaaaggaggcctgcaactctgggaag

SEQ ID NO: 13113 - DNA, 1333 bp, Homo sapiens
ccatggactgggcaggggtgggggatggtttcaggatgaaattgttccacctcagattattaagcattagattttcatttggagcgtagatcccttgcataagcagttcacaatacggttcacgctcctatcagaagctaataacatcactggtccgacaggaggtggaactcaggccataatgctggcctatccgctgctcactcctgctgtgcagcccggttcctaaccgcacggaccagtggttggggactcctgttttaggacataagcacacttctgtttaacttcttgtgttctctttttgtcatgtagatatccttttactgcagatcaagaaatccctgagacagattgggaggtgtatctgagggagactgcaaatgctattgtcagtcagcaaactccacaaaggtaccagtataaaatgatgacagtaaagctttcattatcaggatatcataggacacatattaactattttatgctaatgtcattttgaattataattaaatcctgaatctatgtattaactttttaaggaaaatgtagcatttaacttcagaaatttagtggttcagaatagttggtgtgtgatattatggcttttattaagctgtaatatcatggcttacatgtgatcatgtaaaagtggaatttatattaattttaattttccttttaggatctcagattacttaacattaacatacaacacaaagctagagataatgtgcgtagctttctagtaaaggacaatgtaaaactttgtaatcaatgatgcatcatgtgctagaaagacaccagactataagtcagacttctagttcttgtcctgaactcctagctaagtgttcttgatcaggtaacttcattttagagttttatcttcatttgtatattgaagatattattattgcctcaccaagggtacttttgcatttgttgtgaagagcaaaagagttattaatggtttgaaaactaaaaaaccctgtgcttatagatgaccatgcgttctactaaggatagcattgtgtatataccatttttactcaggaagtattttttgacacatttgctcaaaattgcttccgttacttctgtaggtctattatttgtaggttgaccattctgaaaatacctcagctgctagttgtttgacttatggcagcttcgattgagaaacacagtttgctttcctccaaataaaaaatgacaatgttaaggcccactaactttggagagtatgaagaaggttcctcagacttggctaaagcacagtctcatatccttgttgggtttctgaactgagaaatgatctttggaccttaca

SEQ ID NO: 13114 - DNA, 1079 bp, Homo sapiens
actcagaggtttgaatgttcctattcgcttagcctggttgcgtgcttacctgtaaacctttgtgccgccccttttatgacagggacagctctgtatccctgccacattgcttttttactgtgcaatctaggcagtggcattgtattatatttcatgcgtatattatcttgtgtcacctatgtaattgactttttaatcttttcatgaccatttcctggatgtttcaggtatctgtctggagaaaagaaaaacatattacttgacatgtcattaaagtttgttaaattccatggtgtgaataagctcaacccgcgctcttcatgaagtctcaatttctatctggtattttcatggtgttttgatataattaggaaccctgaatatagacgtctcattttaaaagagttctgaaaatgttctgtttcaaaaatgaactgaagttaggagaagcctccatatgtttatcctaagtatggtaaactatttaagaaacagttattatttcttactggattgtttgttaattcataaagttaggtcataaagttgttaattctgtattggattgtttgttaattcataaagtaaaaccatacagtgggaatttggaaaaattacctcttattttcttcacaaaataccaattattttgttttatgtaggctccttgaagttcgtggaaggctgtatgagcttctaactcattgtattcctcctgagataataatgaaggtaacccaatttcagatcttgaactttttacagctataaaatttggacgctgggtgtgtgatcatagggctttttgcagtatcaagatatcacctctttctctccagcgcattaattgcacgtatttactgaacctctatggtgtgccaggcactattagaggaatgctgaagaaaagaagggagggcctgcctaaagtgaagttatattctagtggtgtgaaaaggagaacaaataaagaagagaatttcagagtgttgtaagtgctgtaaaggaaataccaaggtgcagggatgataatggagggtggggctacaaagaaaaaagtgaagttccacccatccgtt

SEQ ID NO: 13115 - DNA, 1049 bp, Homo sapiens
gaactattaatcatcctctgagttaaataattgctcctatactattgaagtatgtagttttgtacataacttagagactttagagtctaagaaaatgatcttaatttactttaagcattggttattcaagtattcattgttgatcctcctattctcttccgtctaatctctcacctgctaaaggagatttacacattagaaagcaaagattattttcatttatccagatgaccattttctgccacaggtaacatgattgtttgacacaccattatatttaattctagtttctctcaatgaataattgtatttttgtaggaaatgtaagatttcattctgaaacataattattggtatggacaaaattgcagataccatttctgttgaggctgcagatttccaacttttatttcagtggttcagattagtattaggtcggtactaagaaataagcatgttttcactaatttaagtacttgagactcttgaagaaaattcagaatgaagttctggagaaaggtatgttactgtagtaattactctttgaacaggttttgtgttttgtcattagctctgccctttttaattaaatattttggttcatggaccaaagggtttacttgacaaatttgtgtgacagactccgaacaattcctttactacgaagtataatttataaaataaaatatacccattttaagggtacagtttgatttttgaccagtgaaactatgatcccaatcaaggtatagatgccgtcaccccaaaaagttccctccatatccctttgcagtcagttcatccctaccctggcccagatgatcactgatcttgtcattatagatgagttttgccagttcaagaatttaatggaatcagatattgtaagcattcttgtgtaatacttcattctctctcattattgagattcatccatattgttgaatgtttcactagttaatgtttattgttcaatatttttgtatatacttttaaagcctattcacttgctgatggatctttggtttgtttccaggtttggttattat

SEQ ID NO: 13116 - DNA, 1041 bp, Homo sapiens
acaattacagttgatccttgaactacagaagtctgaactgtgtgtatccatttatacgtagtttttttttcaataaacaaaaaatttttttgagacttaatttgaaaatactcatggaaaaatgcataacctagaaatatcttttaaaattttaaaaaggtacatcataaatgcctaaaatatgtgtagctactagtctgtttcatcatttactgtgataaaatatatacaaatctagtacaaaaagttaaaatttatcaaaactttcacaaactcagaccatacatggtgccattcacagccaagagaaatgtaaacaaatgtaaaattcaggggtcctcagccccctgtggcctgttaggaactggggccacacagcaggaggtgagcaaccagtgagcaccagagactattaccacctgagctccaccacctgtcagatcagcaacagcattagattctcataggagtgggaactctgttgtgaactgtacatgtgagggatctagattgtgtactccttatgagactctaatgcctgatgatctgagatggaacagtttcatccttctccaccccttcctccagccttctggggtccatggataaattgtcttccacaaaactggtccctggtgctaaaaaggttggggagtgcagtattaaatcataactgcataaaattacagtacatactatgctgcctgaatacttctgtagccacctcctgttggtattgcagtgagcttaagtgttgtattcatttaaaatgccatgtggtacctttacagattgaggtctaaagctgtggttgccctcaatttcagacagtgtattcattttgaagtatcagtacagtactgtaggtgtaatttctcttccatatcactcaatattttctgtagcttatataataatacagtatataagacatatacaaaatgagttgactttatgttattggtaaggctttcagtcaacaatagactattggtaattacattttgggggagtcaaaagttatacaggggtttttgactg

SEQ ID NO: 13117 - DNA, 1157 bp, Homo sapiens
aaaaaaaaaaaaagaaaaatccagaaataatttgtaagtttcaaattgcatgccattctgagtaatgtaatacgatctaatcttccaccatcctactccatcccacctaagatgtgaaccctctttgtccagtggatccagactgtatctgctacttgcgtgttagtaatcaaccaaagataacaaggcaactcttaacgtaggagtgcttttctgtgtaactcccttctttccagatctctgcccaacataggcagccacctcagcctctctgaattctgctccttttcctcaactcactgttatcacagttctctacctgggtttttccttcctaccctgcagccaaatgtagggtgggaaggaaggtttttctttcccaccccgcagccactttcttccaggcagaaagccagaatgatggtatagagttgaccttactggttgctttatatattttgtccagttttttagttgtacagtgggagggcaagcccattaacagttagtggcagtataagtcttgaagctaggattctaacctaaggccctggtttccatgtgtgaatcagtgttttatgccattctttaaaaatctatgattttatgtttcatataaattaaaaatttgttcatgggatttgtagttgtgcagtatacatcacaacagaaacttgtagttttaagtgctgttttacactctgagatttatcagaattgagtaatagtacattaaatattatttccaaattatagcacttaatcacaaaacacattccttaaaaagtaaaacaaaaaaacaaaaaaaacctcaactcttggcagcaattttctttgtaccttgttcccaagtaaaacatagtcatctcatatttttcaaattgatgaacagatttctctagctatttgctcctgtttttttttttcctgtttacaatttctatggaaatttggagcattatcacaagatgttctctatcagtttgattatagtgtacaagatttacaataaattactttcctctctgcagctttgcaaaaatagtggtctccacaaacctcagctcctatctaaattgcagcctaatgccaatttacaaacactatatggtacctttgtggcttagtagcttatgctccttttgcagttgtttaat

SEQ ID NO: 13118 - DNA, 1217 bp, Homo sapiens
acacgactggcatctaattgttgtatcctctttctcttgttctgtcttctttcagttcttggattttttagttagttcagctgagagtagagggttaggaattggaagatggaatagcatgaacagtgatgctgaagtgagctcatgaagggtggatatgagagtgagtggaaacttgtgattatgttggggagtgtgactggaggtcaggggtgacctggagatctgtttggagagttatggggctgggagtaagttgaagagatcaccagtagtctcgagttttcaaactatagaatttttttctttagggtaatgagaagcctttggaaattattgagcagaaagtgatataatccaataaatggtatagattttagatactttatggagttatttgataggggatcacatttcaacatgagatttggaggggacaactcaaatatgattccaagaacctaacctgagctatggtgagttatgcaggaggaaggggagttctgtcttggacatatgatgttgcagaggcgattttgagatgtaaagagaggtaaagcctagggatgtattgatgaaaataatcgattgattgtagctcaaactgtagaaatagaagagagaagaagaaagagaacaaaattcattttggaatagtgaggaacagtcagaaactggacaaagatgcaaaattagaagaatgaagacatagaaacatagaaggaggatttctaaataggagtgttatcaccagcatcagttgttgctggagaggtttccagggatatagtggtttcacagtgcacagtaatcctcccaattcaaaacacctgaaagttctataaaaaatatgaaaaaaaatatttctataatgattgtggaaattgggaaagtaaggggaatttgttgcatggtgcctttgcctgagggagttgccttgtaagaagctgttgtttcctttgtgctcaccctctctagtgacagctctaggtctggaatgggaatgcatggattgagtgtgtgtgatggaggagttggtgcctgagaaattacaaaggcaaacctaggtggagaaagctggcataagaaaagagtaacaggactttgctaaattcttatgagcaaaatctacagggaaatgaattctgaggaagctctaccaaggagggaaaagcataattatagaccaatgtatttatcaatcaatcaatcaatta

SEQ ID NO: 13119 - DNA, 1027 bp, Homo sapiens
gttcccctaactacatcctccaagaggtcttagaaggaactgtcttcaccaacgctttcacaaatatattgttgaggtgagcacctttgagatgtggtccaggggttttttctgtaggcagagatgccaatgggaagtgctgcaggggcaatggtctcataaactcaatgggaagcacccagagacccaagcaagtactagcagttatttgggagaggtaacatggtgtgcttaccttcatggtcagctggaagggtgtgatccatacagtttggaggtggataattgatcatgagttctttgattggaagctcactatagctttcttaatgaattcaaataagaaataaaaccatctctaggtgttgcaaagagtcctgacttgagcttttgtaatggagagtcattatgcctcatacagttctcagccctgagccacatcaaaaagctggagccccttgagtaaaggcaggtctgagccccctcagaaaaggcccgatagaaagtcacaaggggatactctttatatttctactggtttttccttaaaagccttcttggtagtgatttaccatggtaactgggccctgggaaaaaggaaatacctaaatattctaagggaagattttccaatggctctaatctagactaatttctgaaattccactaaggcctaccaggaggaataggtatttaaaaagccagatgataattagggtccagtttagggtaaatagggtaaataatcatgtttttgaacatggttattcattcttgtacatatgtgtacatataaatatatatgtatacataagtgtgcatattctatacaattggaatagatttcctgagtaattggcaaatatcttcataagtttcctgatctacgaaggaaggactgttacagtaggaagggccaactggaagtttaagtgcaataaaagaaacaaggcaatgctaatactcttggagttcccagatctcatctcatccccatcactagaagcagttagctttatagaatagt

SEQ ID NO: 13120 - DNA, 1032 bp, Homo sapiens
ggaaaaggggaaggagaagtgggtgcttcaaatcctgcagggaaagtggggagagagacaaggacttcattattcagaccttttcacattgcgagagttaatcttttcctagcatatgtccggtgtcttaatatgctaaaataatgactatcaccttcttaacttcaagtcacatcctagaaggcctccattggattacttaagccttcagaggctgagcaagttgagcaagatggtcagcgtaaaaaacctgatgctgtacaaatctcggagaaagaagtataccagtctaacttgcttatccttgtttggtggttccacaaagggaacgagcaatccttgatcaaatggacaaaataccatgagtgagctactgtcagatttgctaagtacctagaatctagttcttaaaggtgtgctcggaatattttggattctgttttgattttggtgaaaatcctcataaaatctgacagattgaaagcaatgaacagctcagcttcataaaaaatcatttgcatggaactggtgaagggcaaagcattgcctggttgtcttcagctcacttccagtgccaggtgcctgggtgggcttgtttattcagaagaaatgaaacataaattggcaggatccctttaatccatttaattttctctggtgtgtacagaatggggacaggtgtgaaaagtgatctattttgttggaaaattcaaggcacatgacatctcaatgatggcaaaataagaaatagctgacatcatgtttctaaatatacaacattttgcaacagccacctggagcaaaaacagaaaggttgagaaggcagaataatgactttttgtctctggaaggcatccatgttcaacagtctgtcaggaagagagacaggtggggctggctcaccacctggggtgaaggctgctgcaggacttttattaaaattattgcacaggagtggagaagataaacactcagtgggtgcaatggaacagccggcccatatgtctggctagaactaaggtctttctctaa

SEQ ID NO: 13121 - DNA, 1035 bp, Homo sapiens
tgcatagtattccatggtgtatatgtgccacattttgttaatccagtctatcattgttggacatttgggttggttccaagtctttgctattgtgaatagtgccgcaataaacatacgtgtgcatgtgtctttatagcagcatgatttatagtcctttgggtatatacccagtaatgggatggctgggtcaaatggtatttctagttctagatccctgaggaatcaccacactgacttccacaatggttgaactagtttacagtcccaccaacagtgtaaaagtgttcctatttctccacatcctctccagcacctgttgtttcctgactttttaatgattgccattctaacaggtgtgagatggtatctcattgtggttttgatttgcgtttctctgatggccagtgatggtgagcattttttcatgtgttttttggctgcataaatgtcttcttttgagaagtgtctgttcatgtcctttgcccactttttgatggtgttgtttggttttttcttgtaaatttgtttgagttcattgtagattctggatattagccctttgtcagatgagtaggttgcgaaaattttctcccattttgtaggttgcctgttcactctgatggtagtttcttttgctgtgcaggagctctttagtttaattagatgtcaattttggctttagttgccattgcttttggtgttttagacatgaagtccttgcccatgcctatgtcctgaatggtaatgcctaggttttcttctagggtttttatggttttaggtctaatgtttaagtctttaatccatcttgaattaatttttgtataaggtgtaaggaagggatccagtttcagctttctacatatggctagccagttttcccagcaccatttattaaatagggaatcctttccccatttcttgtttttctcaggtttgtcaaagatcagatagttgtagatacgcagcattatttctgagggctctgttctgttccattgatcgacatctctgttttggtaccagtaccatgct

SEQ ID NO: 13122 - DNA, 1039 bp, Homo sapiens
ttgccttgaatgaagcaggtaagctaagcttaactaagacaaaaattagaggaaagttgaagaaaggatccaagagagaacatcaaaggcagagctccaggagccagaataagggatgtgggtccctcatatgttaatagaaggtttcatccaactgaaactggagggccttaagacttaaagaaaggcagcctcagcctgaaaacatcttatatcctttctgctccaaataaaactgtaagcattccaaagctgggtattggtgccgtctcatttctgtttccctacttcattctatctctattttctttttgatatccccatcagtctttccacttaagatttgttacctcaccttatccaaacatctgagcctataattctcaagttagtgtttttgtgtctcccaactcccagccattaccaccaatcacactttcacttatgaacattttttctttactgtcaaacctcaggcagttccaaaatagcagtgtagaagcaagatgacctcactcccccagacaaaaaccaaaaacaaatagacagcaccaagattatcaccagcaatatctcagagctcaagtacaaaaaggagacagtccctggggccacagagaaatgaaaaatctctgagaaggctgtaaggtaattgaatttctatattggtaatgccccttctgtccagcaccaagtgcacaaagtatttccctccattcacaatttctacactcaaaaaagtgagatcaaggtggacaagcaggttttccaccatcttgggagccttggcaggagaactgtccctgccttaactcatggaaagcatttcaaatgccagaagggacaatatcactgaggacaggccgagagaagggaaggaggtggaactaccatccccagccctggaaactctgatctgtaacttgaaaaagggagatgccaaatcagagtggttgttcagcagcaccacaccattggaagtacattccacaggacccctgggcatgaacccttagccagccttcccacactgccagga

SEQ ID NO: 13123 - DNA, 1008 bp, Homo sapiens
aggcatgaaaatcacctgaactcaggaggcagaggttgcagtgagctgagattgcactgctgcactccagcctgggcaacagagtaagactttgtctcaaaaaaaaaaaaaaaaaaaaaaaaaaaaaaaagcaagtaacatataaagaggctctatcctctttttgtctagcaacagatttctcaatggaaactatataggccaacagggagtgaaactgcatttttaaagtgctgaatgaaaaaaacctctcatccaaaaatactgtatctagcaaagctatccttcaaatatgcaagagagataaaatcttattgagacaaaagctgggagaattcaccactagtagaactatcttaaaagaaattataagggagttcttcaacctgaaagaaaacaaaaaaattaatgtacaaaaagaaaaggaaaacaaaaataaaatttgaagatataaaacccatgggtaaaattaagtacatgtaaaaatccagaatactctaatactgtaactatagtgtgcaatccatttataactctagtttgaaactccaaagacaaatatatcaaaaacaataatagctataacaaccagttaagagatagacaatataaaaatatgtaaattgggacaagagtcaaaatgtgggggaatgaagttacattgtagatttttttttgtttctattctttgtttctattttttgtgtgatctaagataagtcatcaactctttaaaaataacttgttacatatatgaaatttttttgataagcctcatggtactcataacataaaaacctataatagagtcactaaaaataaatagcaatgaattaaaacatactgccagggaaaaaattacttaaccataaaggaaaagagtaagaaaaaaagaaaggagttagaaaacaaccagaaaataagcaataaaatggcagtagtaagttcttacttatcaatattaacacttaatgtaaatagaatgaattctccaattaaaaggcatag

SEQ ID NO: 13124 - DNA, 1064 bp, Homo sapiens
gtttctgaaacttttgttcctttgctcatcctgtcactcatgagcatgttctgattgactttgtgggaagaggacacagcattagcatttcacctggtctgttaggaacaaacaaaaaaaccaaccaatcaacaatgtcttaagaatacttgacaaaacttaaatctatggctgaatctacataattatgttagaatgacctggtaggggaaaatgtgctgggcctaaagtgttgtttcacagctcaagctgctgcatgaacagcatgggcaggtcccctgaatgacatgctgggagctatgtatggctccgggtccactgagctggtctcatcttccccttatgagagcgatggtatgacaggtgcagtgtgtgcacttgtatgggatgacgggttggggtgactgcaggtgaaggaggcaggaagaagcagaaagccttggtcttatgcatactgcccccaaggtgtggaagccacaggtggtcattattatgaaatctgggaagtgtaatcactgggcagatcataataacaggtaacccaggtggcaggtgagggttactatcaggtgggcacagtggctttgggagacaagaccgttaacccctagattggacttagaggagatcctaggggtggatttgtatggagtaattttcctagactaaattactatttagttataaccatggatgctattatgggttgaattttgtaccccccaaaatacataaaagttgcaaaccccagtacctgtgaatgtgactttatctggaaataaggtccttgaagatgaaattagttaaggtgaggctattaggataggacctaatccaatatgactgaaaaaaggggaaaatttgtccatagagttggaagcacacacagggaaaacagcacgtgaggataaaagcagagactggggtgatgcatctgcaagccccaaagaatataaaagattgctagcaaattaccagaagccaggagagagccctggaacagatttcccctcaaagtccttaaaaggaagcaatcctgccgacatcttgatctcggacttcct

SEQ ID NO: 13125 - DNA, 1048 bp, Homo sapiens
tgtttactatagggagagtgtgggatgatgtctggagtttcaggtaaggcttgatgtggcttctgggaagactgtggaaagctctgaatgtcaagtatgtttttaatccaccataatgttgacaccagccacttgaccttacttgcagagatgaataccatgagcatcctggctgccctctgcatcttggctgccctacccccatgattacctggcacttcccatttgcctccatgatctaggacatgcctggtattgcagagggcctccaaggccatactggcattcattatgactagttggtatttattcattactggttattaaatattttaaatgtcacttatattagttccacagaactattattttaaaaaattctgcatttaaatagctttggagatacaagaaagacataagattctgtgtctccagacatgcttgagagcctctttcaccccagttgctgctcagggacctagagatccacagagtgccctttggtaacactcctgatctgcttcagtgactttatttaaatgtctcttgtgttaaattcctcccacatgtaagccacctccaccctgtggtctctgctctccttctaaaacacaactatgattaggttatttccctgcttacaaactcgataacttctcatacctgcagaatacaggccaaactccttattaagggcttccaagactctttgcaaatggttacctctccacacgtcaacacctgttattcccagttcttccctcaaggcccctgtgacctagacacaaatgacgattttgaacacagcaaagacttcatagctcctggcttcctcttgattcccttgccatagacccctgatcttgcagaccccagcataaattgcattcttcctatgaaatcattctcaatctcctcactcccagtgagtctccccactctcagctctcatggcaatttgtttacatccagaacatttatctcaggcccagttgtacttatttattgttagccttgtccattttggtctccaccagacagtgatctc

SEQ ID NO: 13126 - DNA, 1230 bp, Homo sapiens
gggccgagatacaggactggcagtaacagtgggtaccacacatggctaataagagtgcagaggctgagggtatctgaagaagacactgatttttggccaaggtctggtgaatttgcactcgtggctgcagaaatcatcctggcgcaaaacaagctttaaatctttcatttgggggaaacgatcatgaaagtgcctagaaaataagttagcacatgatatgcttctttttttctttttatttacttgacttaaggcaaactgttgtagtaataaggaacattgttttccacttgctcatctccagtctcactttgattgtgtgtggacacactgccctggctctcacaagtagcccattagcagtcacatctttgtgcatctggggcccagactgctgttttctctgctgctaaacaactctatttccttccctaacctctacctcttccccagcatggaatgatggtccctgagtctttatttttgtcatgaattaaggattcttacctgactgtatttgctaactttacaaaatgagagaatagtgaccacctcaagtacatccgagaacaattctccaaattttaagaaagtaagaatatgcaatgtcaattagtggaaaactatacaaattatttgatttatcagaatagattttaaagatgaaaaaggctcagactaattaaaaatgagcaaaagtgtagacactgtactgaagaagaaataaaggtgccaaataaacatataaaaagttccccttcatttatcacttgcatatttcaaattaaaacaacgagatatcactatatacctttagaatagctaaaattaaaacaacagcagcaacaacaacaacaaaaccctgataatactaactgatggcaatgatgtggaacaagaggaactctcattcattgctagtgtaaatgagaagtggtacagccactttggaacacagtttggaagtttcttgtaaagctatacattgtcttaccatataatccagcaatgtaatgctactagatatttacttaactgatttgaaaacttaaaaacctcgtataaatgattatagcaacttcatttataatcacctcaaactgaaagtaaccaagacgtccttcaaaggtgaattgatgaacaaactgtagtatgctcatatagtggaaactattcaagaatgcaaagactgagctatcaaacctgccaaggtatggatgaatcttgaat

SEQ ID NO: 13127 - DNA, 1026 bp, Homo sapiens
tgaatattcagttggtgttactaagtgattccattccatcttaatcatctatttggggacactgcatactgcattggtcatgatttctatggtgttttttgctctcatttgtaaatagctttcagaaacctgaaatgaaattgcatttacttttcattttcctccttcagtctgagtcagcttgacttggaatcagcagtaccttctggcccttttaagcaaccttatttccacgatggagaaaaatgatcattctgcaggatactgtgcaacgtaaggggactgcacgggaagacaagagtgaggccactgtccccacactactcaaatgagctcatttccgccattcctttcagctaagaaaatgtgcaccagctcagttgcctcagattaaaatgcataagtataatttccttgcacatattttaatctgattagcattcagcctatggaagtccccattccttcccctgctctctaatagcttccctttctaaattgtgtcctctcttgtagaactcaggtgctcatattagctttgcacaattttagctgagaacagagggaaggaaatcaccagggtaacattggccgcccacactgcagtttgtgtgtgttttaagagaaataagaagcagatagactgttcctccttaatgtctgtaataggctaaaatttcccaagattctgtgtttttcttaagcaaatatgaaatttaaccggagccacaaaggaggggggcgttatttggttgtgaatgacctaagaggaacagactgcaaagcagtattacccaagaggagcagtgcaaagtcaacacaaatgctttctttcatgtggccctgggtatatctgaatgtaaagtttaggcagagttttttttgtttttttttttttgttgttctgaacagaggcatattaggaatgtttaaaatatctctatttcagatatttgaccccaagtcttctgtttagttatatatggaaacagagctcacctgagatataaaaagaagcggttgttg

SEQ ID NO: 13128 - DNA, 1037 bp, Homo sapiens
attcacaactatattctacttttcaaaaattattaatatatttctctaatgatggttatctaggttgcttccaatatctgacttccactagtaatggtatgttgaaaatcttatacatatctcctcatcagcttgtgagataatttgtctggatggaaatgttaagatgtaggatatacctggatggttatctgaatgactacacctgcttacactcctcagaatttccattgccctataaccttgctaatgcttggcaccatgcaacattctaaatttttccaatctcatgggtgtaaagtggtctctcattattttaatgtgcatttatttgcaaattaaaaggttgagtttaattgtgaaattgaatatttctacatgtttagccactaagatttttcctcagcttattaatatcccttttccatgtctctatttgattacttttctttatcatgttgatttgtagaagttctttgtatgaacaaattatttgatctatgttgatcttggatatctgtcagtctgttgtatatcttttaactttgccgatgatttccatggggcaaaagaaatactttcattcttgaattcaatggaaatgatgggatcctgttgtggcgggggccaaggggcagcaatgcactcatcaccataacaagatgggctggttaccataataaatagcagaactaaagcactaaccatagtagttttacccacagagattgtcagcattgcctaattattcatggtgtccttagacctgaaatagttggcttattaagggcttacttgattcgtgtaagtaaaaagctgcatgtatttatctggaagactgacttgaatcacgaaaggcagtcatgatccctcaattacaagaatcgagccagatgacaggtccagagtcccttaaatgaagaggagaccaagtccccttgaggagggacaacgcaacatagctaaaaattgatgctgtcattttgtagttttctccgaggggatctgtggccatttaccagggtggttatgcatta

SEQ ID NO: 13129 - DNA, 1033 bp, Homo sapiens
aacaaaggcctgcattcttttacttctaaggcaattctaagctccagcagtgtagctgctagaaggaaaatctgcgttatggaggctaataagtgagatcttctgagatatagtggtagtgaatgtgttcattttggccgacccaaggaattccattagcaaggacagggaattcttgttactctgaccaatgatatatggtttatgctttgaaattagttatcatggtgtttctttaaccttctccagtcttctaagtgcagttattgtttcttaatgttcttttaccattgtatattaattagaagttatagttaaattcattatatagctatataattggtcaggtttgaggtaccaccaagaagaatattgtcataacacaaaaatttcagacttgaggttagatgcagtaatttgtctttgtcttttttcaccctctggtaaggtggtaagtacactttctattgtgtctaagatagccatgttaaacatggatatttaagtagttatatgtatgaaaagaagtgagtgtctgagatgggtgggtagccaaggactctaatgttatagatttctgacggttttggctgcctagcatccattctttctgctgttaacattctcgattttttgatactcttttagggagtcattcttgatttttatggtctggggcttcactggactttatcctgctttcctggaccagacagagaaactgacgtctggcccaacagtaactggtattggttataaaatttagctgcatttctgagacagcttgataacttctttctgaagaaagaaaaaggtgctttcgctggggttgctgaaaatgttagaatgtaagtctagaattgattgcagtctgcaccatgaagtcagattctacttgagaacagagctgttaaagaggcacctaaaaccaagccatacattgctgatggcagctttggatcccctcaagtcagttttatctccagatgtttcagtgcatcattttgccttaagccagtttgagttgggtttc

SEQ ID NO: 13130 - DNA, 1880 bp, Homo sapiens
aaatgttaaatatgaaaaaatgtttattggaaaaaggaaatatggtattctgaattaataactttatgacataggcatttgtattcccatttgtatataagaaaaatgaagtttggtggaatttgaagctaagaactttgggcaatatggagcaagaggcttttataagagagtggcatgagtgaagtagtgtgcccattgcatgtagattcatctgattggatagagtagtgtcctcttatcctttcagtgtttcttatatttcttttcctgaaacgggacttgtcagagagcacagcctcttctgtagcgaagtatgtataagttgggaggtgcttctttctagccccaagttgtgcttgtttctcttaggtcttttataactgtaagctgatgtacttgactctctacatttatatttgtaggattaatgaataaatactattagaatccaatcagtttttgtgtcctggttttctgtaaataacttggcctttgtggtatgactaatctgaatccaaatcctggtctgtcttttcgtggctttgtgaccttcaactatgttacatatctctgagcctgtgttttttttttttttctctctctctctctctgtgtatgtgtgtgtacctgtatattctcacatatatgaaaatgaggtaaatgatgttatttttccttttatttccctcataagtggaaactgtatatatgagagaattctatatataacagatcattatattattgtttctgctactatactgcatgttcatttagcacatttattagtcaaaatgtggtccacagatgaggtttgcatattcatgaaatatttgctgttctaagaggagataaggaacttgtgccagaatgcaaatcatctgtgctaagtacactatttctttcaactaacctttcttttttttttttttttctcataacaagactttcttgatgaaggaagcagaatgtcgattcatattttacttctatctcctcattggctggcactctgagtagcctgaatgtagagtgctttgggaagatattttgaagaaagcttaattttatttatattacttttcatttttggtgttagaaaggtttgttattattagtgaaaaggttattaaatttgaacttggattctaatcgtgtctttgctactgattagttgggcaactgaattaaatcttctaggccttattttcctgacggaaaatgaaggttgggttagatatctgtggtttttgtaggctttaacatgttaataattatgttttttaagtactatttttttcttttacctttttttttttaaaaaagcaaaactgagacctcgtcaaagtagtagataagaagcactgcaatagaaacatactttaagaagcctctttttggaatagatgttttattaagctgtagtcaaccatatggcaaggatttgatgctaaggctataatgattgagactgtttttgtcttcaagtagtaatatcctgggaaagatagacaagtaaatacatacaaatgtaaatacataaatcggtagtgtgttagagatatggaccaaaaatgtgtgaaacaggaggctgtgaaagactctctagaacaaaggtaagcaaacattttctataaggatccaaatattttagcctttgtgggccacatggtgtctattacaactactcaccctgcagttgtagtggaaaggcagccatgtaaataaaaatacatcatttttcaacaccaattctctggcactaattaagtgtcctaaaattcaatcctgatactacatagagttagtgcaaacctcttaaattagaggcagaatccttcaattctgacactaattgaaagttagtacagactcca

SEQ ID NO: 13131 - DNA, 1050 bp, Homo sapiens
tacatggattataagagatacacacacattcactctatatatgttatatagattatatatttataatatatataacacacacacacacacacacgttttaaaagcatacacaaatgcagggatactgatcgagcaagcatttaatagctgtatcctttaggaaatagaggggaaggggttgagatggggaggtgtgaaggtcaagtggaaaattttgctttatctttatagataaatgcttttacattaaaaatgccatcacatattattgtttttttaaaaacctaaagaagtttaagcagatataccaaaaatatcaatagcaattaaatttgtttttttactttccttttttgtttttgttttttagtgtaattttgaatttcaaaaaagaaaaagccttgagaaacacttggcagcaatgataacatagttggtttttttttgttgttgttgttgttgttaagagaggaggtcttagtatgtttctgaggttgaacttgaactcctggactcaggtgatcctctcatctcagcctcctgagtagttgggactataggtgcttgtcaatgtgtctgatttgtggcgtagttcttaaatcttttcaaacttctattaaaaataataactagggtaactgaaggaagaaacaaatgctgggtaggatacagagaaaagggaactcttatacatggttggtaggaatgtacattaatacaaccattatggacaacagtatggaagtttctcaaataactgaaaatagaactaccatatgatccagcagtcccactacataggatatatccaaatgaaagaaaatcaacatatgaaagagatacttgcactcccatgtttattgcagcgctattcacagtactcaaaaggtggaatcaacctaagtgtccatcagcagatgaatggataaagaaaatatggtatatgtgcacaatggaatactattcggctataaaaacaagtggaatcctgtcatttgtagcaacatggatggaatggaggtcattatgttaagtgaaatgagctaggta

SEQ ID NO: 13132 - DNA, 1044 bp, Homo sapiens
gactttccacagttcatttagccatgtactttttgggagggcatctagttgtttctactttatggctattacaaataaagctgctattaacaattatgtacaggttttgttgtagctatgtttccgtttccctaggataaattcccagtagtgaaattacttgataatatgctaactgtatgtttagttttgtaatatactgccaaactattttcagagtgattgtaccattttatatccttacaagcaatttatgacagatccacttttttttttttgcatccacaccagcacttgctgttactactgttttctgttttaactgttctgatatatatgcagggataactctttgtgccatccatagatcctctttgatcaaatgcgtgttcatgttttctgcccattttctgattcaatggccagcttctttactgttgatttctgttacattctagatgagtcctttatcagatatgtggtttacaaatactttcttccagtctgtagcttatattttcaactttttaacatgatctttctcagagcaaaagtttttatttttatgaagtccaatttattaatgttatcttgaatggatcctgcttttggggtcatgtctaaaaacttttagccaggctctaggtcctgaatattttctgctatgttatcttctaaaagttttatattttacatttaaactatgattaattatgagttaatttttataaaagatatgaaatatcttataggtggaggttcatgttttttggcctgttgataaccagttgctctgacattgtttgctaaaaaggttgttcatcctccatttaattgcttttgtatcttttttgagaataacttgttgataatcatttagggctgtttctgggttctcgcttatgcttcatgatctatgtgtctatcaactcaccagtgctacagggtcttgaattattatagcaagtcttaaaattagagagtgattcctcccactttatttttgtttgttcaagaaaaaatttaaggtattgtaattccttt

SEQ ID NO: 13133 - DNA, 1033 bp, Homo sapiens
aaaaactacacagttatgattcagtttattatatttaatttgtaaaggacaacagtagttttctcatgcttatgaggaaatatattctttcataatataaggcataatagtcattgtcagtaaaatagagatgagatttgaatatggttatcttttggcataataaaatactgaagtgggacactgtttataataaacatgtgatgattacataatgatgtctgtactttacatgcagtgctactctgttggcattcctggttgaactacttaaaagttcagtagccatgcaagaacagatgctgggtggaaaaggctttttagtcattggctacttacttgaaaaggtaagtgatatgtgttgatggttttattgtgtagcttcacagttggacagctgttaatcactaatttttttttctgtaatttcactttccattgactgtgtagagattatactatttgctaattcacaaacgtcttagatttaagtgtagacatggaattaactgggtatcggaagtgtaattaagaaattttgaataaaaaaatctaaataaaaaatttacatctatatctattcaagcaataagtatcatttctcttaagttttctaagtagtaccccctttatttctactctcactttctaaggtgtcacttacccatggtcaactgcagttcaaaaatagcatggaataaaccatttataactttctaaattgtgtgctgttctgaggagagtgatgaaatctcatgctgtccctcttcatcaagccctggacatgaatcctccttttgttcagctttttcatgctgtatacactgtctctccattagttatttagtagctatctcagttctcggactgaaaatcgtatttattatccactaggggtcttggaactatcgcgtcaggataaggagggagtactgtagttgtttctttgctatcttttcacttagacttttttttttttttttttgagacagtgtctcactctgtctcccacagtggagtgcagtggcatgat

SEQ ID NO: 13134 - DNA, 1028 bp, Homo sapiens
tgtgatttagtatgtcagtgagtgtataatgaggtcctaggtgaacctccatcaaatccagtgccatactgggtgcagttagccttagctatcttggctctcatcctggcttttcagggtcttgtcaacccctagtttctgaagctatttcaacagtttccttttgctagtcatgcgaaactgctgcctggagttttttgttctcctgcaaccacccttattattcctgtttcatttccccttccccttcagagatgtccatctcttattcttatgggctgatgagggagaaggtcggtcttctttatctacttcctgctgattagagatgttggccctgcctggcaagggtatggaaatctttggctgcctggcctgagggttctaagggtgagtcatcaggagactctgaatccaaagcagggattggaatcattgcatgaccatcattttgacatggaactgttgtaatgtaaaagacacaaaatttacaaggaggttaaacaagtaaggacaaagattcatagtaataagagagctattaaaggtcgaaggaaggaggaaccatgtcacagttggtaggtatcctttgatggagtcccagatggtttgagcagtgggattatattgaaattatgtagccaggtagcctgttagtaaatcttttgaactttcagttcaactaatcctgaattgttaatataagaacaacaggtgtggtttattactgtgcaaacccctctttgttcagccagaacataaagcctcttgttgtttccttgaccattcaagtagttcatgctttggcacggttagagcttcatacagtagcttagcaatgagcctaaatcatgggatcaaaatcttgcaaattcctgtcatacccaggaaagttttgagttgcttcttcggttgtagaggcctgacctttaagatagcttccttttgttcgatggacatggtgtagtttcttgggcttaggatgtaccccagatattttacttccagtttagaagtctgggccctgg

SEQ ID NO: 13135 - DNA, 1059 bp, Homo sapiens
acagttttccaatctagaatgctatgattctttttattactagtgttttataagtcacgaattaaatatctatagatgagttagcgatcttgattatttttaccctagagttttatcgtacatgtaaagtacctagtagtttcagtttattctaaaatggataagaaattgttatgcattctaatttgacagccatctcattttgatactaagttaaattaccatgtattttccctattattcatcatacatctataggaaagaaaaatcaaagcatatatttttattaatgggaatgaagattttagaaaagaaatatcaatttaaaatctttataaattacaaaacaaaactagtataagtacatatatgtggttctgtctaaatatctttgtgaaatgatcttaagtttaggatgtcatttttataactaaagacatttaaaactaatgttgattttaaaatgggcttttcctttattcaaggataattgataggtaaagtaaccgaatttggtaaccagctctggtgatatatggaattagttgaacatttattttatttataaaatatggtaaatatactaaatttatgttcacttgtagtatgtatgtatatgtattatatttccaaatttccaaattttaaacaagacttaaatcttctacttttttaaagacggaattggaaaatattgaagtgacacaaggcatgtcagctgagacagcagtaactttcctcagccggctgatggctatggttgatgtacttgtgtttgcaagctctctaaattttagtgagattgaagctgagaaaaacatgtcttctggaggtttaatgcgacagtgcctaagattaggtaagtctgttaaaacaatagtgcatgtcaaataattatctacagagcagctttataaagcactatggtacataaaatattaatgatataagttgatgattatataatatggagattatcttgagatacagagattatttttataattaatcagaattactaaattttaaaaaattatgccttcacattggagatttcac

SEQ ID NO: 13136 - DNA, 1026 bp, Homo sapiens
cttcagagatgcattcgttattgctagtattgtttgcatgttgcagtaatacagaattgtcatggatcttcagtggaccatgtggcaggttgttacatgctggctcaaatttgattccatgattttctccacagttgtggtcataccatctatccctcatccaagtttgaaccatggattccttgccaagttaattcctgagcagagctttggccactcattttacaaaggtaatactgacctcatctcctgacctgtttgggtattcttatttcatgaattgttttaaaataaatattcatgatatacttgtttataaataagtatatacctcaggtttcatggagatatgatatgttgtatttatacctagctattgagagcgaagtatagcttttatatttgtattttattacatttctttaagtatcatctataaattaaggatacctaattatatgtatattaatatgcatagtggtagcactcaggagagatctcaggagagtcacagtttagtagtgggactaaatgagcctaatataaaggctactctagaataaaccttaaaaacatgccttgaaagcatcaaactgatctatacgttatttaacttccagttagaacaaagccccaacactgtaaaggaatgcgaaaagtccatatgaaaaaccataaaattaaatattagacatccaacaaaaattattaaacatgcaaagaaggagaaaaatgtgatgcataagcaaaagaaaaaaaatcagtgaatagaaacagattttgagacaacagaaatggcagaactatcagatacggacattatagaagccattacatgtatattcaagatgtttttcaatgtaatggaaaaagttaacatattgaagagagaaatggaagatataaagaaaaaaatgacaattttagagatgaaaaatacaatagccaaaatgataatatctctgtgtaggagtaacatgagattactgacttcagaacaaaggatttataagaggtagaattctg

SEQ ID NO: 13137 - DNA, 1094 bp, Homo sapiens
caaaacatatttatttgaataaaagtcattgaaatatcaaaattactacttcctttttgaaatcattcttttatcagcctcaataaaaataaaattgagatgtttttagtactatgtaaatattttgatgagctatttgaaaatattctaatatttgatttctagaaacttctaattgtgttttgtaatctagagatcaacatttatattgaagtttcaactatctagttagaaagttaaacattttaatatccattgtaagtcaaatagttgagcagaaaagcaaaatattatgtagttggtggcaaaagtcttttgatgtggtagcttgtgaacaccaaatcagattttatttccttaggtattttgtttgctagtgaaatgcttatattccagtctaatatagcttgagaagtttaaactttttgtatagctgttaatgtaacatgtcatatataacgatacttagacattatattaatggaaagtcaaaacactagaccatatctgtaaattagctaaattcacactaagtgttagatatgattgtatgacttctgataattaaactctataaaaattagcccatgctagtaaccatgacactgttttgtttttgttgttgttaaagtttttgtttctgcatttacattttctgtcctcttgtcgctataactatttaaactatttaattctctcctgatactttgctgcaattgttttctctcaaaaaatgtacaatccatagatacaaatgtatgttaaaatatattcagtggtatctctaatagtgaaaataactgcctcagtcatcttatcttctcattctagatttgtaggttattttatcaacttccaaaattttggctattgcctcagtttgaatgatcccaaaatgtacggctattcttcttttgacctacagatataaatatcttagagattctgtagactaaaagtgattcaaaatttagttaattattttcctgaagaaatctcattttcttcctttctcagttagtgacgtattaccactctttttcttaacctagatatttcagaaatacccttagtcttctcctccttctcattta

SEQ ID NO: 13138 - DNA, 1055 bp, Homo sapiens
tatatctgttgcagcaggattataattcatcttcaacctcatgtttgttattttcaatccttcatttctttgcaggagtgttgtggtgcctgtaaagaaaccacctccaggtagtttagctgtaaccactgtgggagccactactgctggaagtgggctgccaacaggcagtacctctaatatatttgctgctactggagctacaccaaaaagtatgattaatacaacaggtattgtacttacatatttttgtgatactcatctttttatgttttctgtatcatttttctgcttatttgatcttaaaaattaaaataccctaatcatttaagattatcttaatttttaagaaggttatattttatgttatgacttttagaatttgtctgtagttgtagagtgcattttttagtggtcattttagaggacagtattggttttgagtcttctcaaaacagtgctgtttattttcagagtgaaatcagattactgaaagatatttggggagcagaagcaaaggataatttgaacactgaagtttgatatgtaaaaatcagtaaaatgtatcaagaatatcaagatgtactaaaaatgttagtgacagaaagtagatttggggacatgattggttgagttctaatatatattctttgctaaatcccctaagggaggcagagctcccctaagaaccttgacgatatgcaagcgcctcaacttgataaaaagtgcatgtgaataagaaccattgtttgacgttgaattaattcatatacatagattataacttgatccaattcattgcccaacaaattcctaatgaatctaggaacaaaaaatttcaaatcaattacaaatattaaaagtctgcctaaaataaccttttttttttgtaaatttccagaaatgttcctgttgattattagctaaataaatccttacccaaatctttgtgattccattttaggtatttatacagcgcaagatgatccctgacttttcttccctgactatagtagtcttctcttctccaaactgtatagccttgaacttttcca

SEQ ID NO: 13139 - DNA, 1058 bp, Homo sapiens
ttcaaagaaatagaaagtagaatgttatttgccagtgactgggggtgatgggaaataggagttgtttaatggggtatagagtttcagttttgcaagatgaaaaacctctggagatgtgaatatatttaacactactgaactgtgtgctttaaaatggttaagactaatttttatattatgtgtattttactacaattttaattaaagtgaaaagtttacccatagactggaaaggtatatgtctaacaatgataatcaacaaatgttgatatctagattacacaaagaaactcctaccaatgaataagaaaagcacaattctatagaaaaaatgggcaaaagaataaaaatctgttaatttgtggatgggttaaatacaagcagtcagtaaacatgtaaaaaaaagtcaacctcatttgcaatctcataaatggttaataaagccaaaatgaaacaatttcactcccatccaataagtataaaatttatacttaaaatccatttattaggaaaggtgtagagttttctagtgggagtctaaattgatgaaaccactttgaggaataattttgcattatcatgtaaagttgaatttgtaaatgtacattgactcagcaatttcattcttgggaatataccatggaataatttttgcatgtgtacacaagaagatacagatgtaaaatgcttattaaaaacagtgactttacccaagacatactgagaacaacctaaatgtatattaaaagaaaattgtataattaaatggtatactatgcagtagtgaaatgggatttcacaaaaatgatatttaccataaaagcttaacacatggataaggatactgtatcttctttagggacacattcataagtgataaaaatataaatgccaatcaagatgataaatttacagtagttattacatctaggggaatggtatcagtgctgtaactctaacgttcatgggggatgcatgtggacatcagaatggaagcaggtgtaagggttccacagaagaaaacatggctgccaaagctcagcctggccttagccatt

SEQ ID NO: 13140 - DNA, 1034 bp, Homo sapiens
ttgcttaccagctcttgtgctctcagaatgttacccacctgcccacggggcagtccatgctcctccacctgctctagtgctacctgcacctccgcgggccaactgggccacagctctgatgattgttaacaccagccttccttctgctcccaccccagaaatcactgtgaaattttgtgattggtttcaagtgaaggaaataaaagtaaaatcactccagatctctaaatactctatcaaatgaagcactttcatttttctcacatccatctacttttttatccacttctgtattagtccattttcatactgctataaagaactgcccaagactgggtagttcataaaggaaagaggtttaattgattcacagttccaaatggctggggaggcctcaggaaacttaacaatcatggtggaagggaaagcaaggtaccttcttcacaaagctgcaggaaggaggatcgccaagcaaagggggaagaaccccttatgaaaccatcagatctcatgagaagtcactgtcccgtgaacagcatgggagaaatcacccccatgattcagtcagctctgccaggtccctctcttgacacttggggattatgaggattacaattcaaaatgagatttgggtggaaacacaaagcctaaccatatcaactcccctgccaaaaattccaaagtatatatgcagactggctttaagccccaattcggggcctgctggagctctggcctaggcactggcaattgtcataacaaaggtagggcagtgtgtgatcgactggggagcacagttgtcagcctgagtaatgtgtagcctctatcctgtccttgatggttgattaaagatttgaggatgatggatatgtagctgaaccgagaaggcaggcctcagttttactagctgtccctgcacagatgcagctgaagagaggtgctaaccaaggtcagagaggaagtggtctgtggtctgtctcttaccctaagagtggttctctctaacagtgtgaccagccaaagcaggtgtttgt

SEQ ID NO: 13141 - DNA, 1049 bp, Homo sapiens
gacagaaattatgcaagccagaagataatggaacatctttaaagtgctaaaatgatagactgccaacctgttattcttaattcagtgaaaatattcttcaaaaatgaaggtgagataaagactttttcagacaacaaaagctgaggaaatttattgccagcagatctgtattgtaacactgttaagaaaatggttttcaagcagagggttaaagataccagatggaaacatggacacatacaaatgaaaaaaggagtacaagaaatggtttctgtgtgaatattcaggtgctcctcaacttatgatggggttacatacccataaactctttttatgtaaaaaataacataagttgaaccatcacaagttggaggtcatctgtatattaaacattgttttctcatttttagtcgatgcagaaaatgcatctgttaatattcaatacctagtcataataaaatctcagaaaaataggacctgaagtgaaaaaaagctgaactaattggtatctaggaaaaaacaacttatgacatatttgacagtaaaagaccaagtaagattgggcaagagttttatgtctcattactttaacattttactgaatattctaactagtacagtaaatatgggggatgcatattccctcttactacatggaagtggtcaatattatagagaagtcaacagaaggaagattaggaacagaccacatgatgtcatcgttagaatctttgatttggagacagacctcagaagagtagtggaaacgaatatagaactgtagggtgtaaaatgtttgaataacaaactgagtaaacagaccattcgttggagaaatttgacaatgaaacaaaagaggaaaattggtggaggtttgtgtaactgttgaagattttattcatggaagggaaagctatgtttgtttggatatagaggaaaaagaaccattggagatgtaaaaatgaagattgacagagataagagaaataatgcagaaaagctgtcatgagttaagaaaggacttagaagaaatagagaagtttgctctg

SEQ ID NO: 13142 - DNA, 1034 bp, Homo sapiens
gctttaagatttgtttcattgctatcataaattcttagaccttactcctatggaaaagggcgatagaaatagaaatttttagacctgactcctatggaaaggggcaataagaagcataaattcttgtcataggtattgcacttttccataggagtcaggcctaaaaattcatcggtagcttaggataaccaatggagaagatgccctttgttacacttttcctataggatacatttttcttctcattccgtttttttctttatacttatgcatttttgtttgccacccaatactgtgtactgttgtctacctaggatgtaaagggattggacttctcaactaaatatggtaaaaaaaaaattatctttgccacttttacaactgtcattcacaaattattaaacatgctttaaaaaccacatgcaatcctaacattttctgaggaggaaaatatactttatcttgtgaagaatattttatagtcccttttctgtctctcatttagtaggtgaaaaaaataaacttctgttttcttcattgaccacaacaatgagagtccacaatatgtttttttttttttaattttactttaagttctgggatacatgtgcagaacatgcaggtttgttacataggtatacatgtgccatcgtggtttgctgcacctgtcaacccgtcatctaggttttaagctccgcatgcattaggtatttgtcctaatgctccccctcctctttccccaaccccccaacaggccccagtgtgtgatgttcccctacctgtgtccatgtgttctcattgttcaactcccacttatgagtgagaacatgcagtgtttcattttctgtttctgcgttagtttgctgaggataatagtttccagcttcattcatgttgctgcaaaggacgtgaactcgttcttttttatggctgcatagtattccgtggtgtatatgtgccacattttctttatccagtctatcattgatgggcatttgggttggttccacatctttgctattgtaaatagtgct

SEQ ID NO: 13143 - DNA, 1046 bp, Homo sapiens
tagaatatcagtctttaatttgtccttatgggaatgaagataaaaatctttaagtagaaattattataaatgtttatcctacttaacagctacacttttgaatacaattcatcaatcatagctggagaaagcaattgtgcagttgtctacaattaacaggacaaaaacagttgataaatgtgcatctgaattaaagtactccctgggaccggctgaaattatacactggatcatttaaaggaatctaacaaaggatctttataattaaaacaaagcaaggttaatgggatgtaaaattgcctgtaatatcttggcaataatgattggaatttgaattattaaaatatgcattgaagaataaggcaaataggaagtacttatttaaaatacagaatttgagtgatctttttaaataaattaatcatttgcctgaaataaacctttgtcactcttttaaaagaatatagaatttaatttttgaatattcatcagaaaagaacagataatatttatgtttagcactgaatttaagctagagctctcaagattctgattttttgttttgtcctttagaataggggaaaatatacaccatgcatttcttaggtttttaagaggagaagcatattgcatccaagtataattttttagtgattgtatggcaccaatttgaatgtattctttaatttaacaaatgctagttaatattttaaccaacaagcattggtttgcttgagtttatttctcttatgtctttgatttggcaaaaactgtatttaaaaataaaacaaaccaaaaaaaacttccaaatctgtaaaataagaaactatttcctaaagtagatattctggtttaatttggagccaataatctctggaagctactggaaaacagaagtttcttttccatgtgttttcttataaaatctgacctatgccaggttttctttaacattcttttttaattattattattttctaatattatactttaagttctagatacatgggcagaacatgcaggtttgttacataggtatacacgtg

SEQ ID NO: 13144 - DNA, 1030 bp, Homo sapiens
aatcctatctgttgatacctactttagtttaaagtaaaatatataaatcaattactactatgtaattcgttatcttatataggtcctttcaatctatattaataataaagctttcttcccaggtaaattccagctatttctaatttactatcactcacattattttacattaaacttcaactgtggtcaacccaaatttgatcaataaaatagtaatcatcttataaagaaacctaaatatactcctgtctcagcctttttgtgactggtctgtgctattctgattttggtgtataatacaggacataaaggaataaaatacctgtcagatttgtcacttttcattgtttgaatttcttctctatctctattctgtcccacttgagatcatgccaataaaatattttttattttgaaattgcaatctcatccatcttcacacaatcaaaaattatttgtttttatttcatttattataaatatctttactattattgatactactattgttcgtttgttacttcttgaaacaatctatactccagatattttaagtggctgtctgaacgatttttaacatttaacaagactattatttttaatacacagtacctgccacttaggcttgaagattaaaaacatgcaaatgtaagtaggtgttagttattattatgtcattccttgttacgtatttaccaaatgaggcaatttgttaatgatataaaaatattaaaatatctaaattatacctaaaatctaatatatattaactcagttcagtatatttttttctttcagatgctaaggttagaaagtgtggctaacaagaatcctctattctagcctctgaccaattaacaaatacaaccaaaccatctaaggcacacatcagtgctccgaagtgtttgcctgcattttcttgtagtcattttatagctttgggttttaacatttaggcctttaatacatctttagttcctttttttatatagtgagagataggagtccggtttcatgctgcagatggata

SEQ ID NO: 13145 - DNA, 1025 bp, Homo sapiens
catggttgatagtgtgtttcagactgtttctttactaatatgtttgtctactcattctccctattaaaagagagatgttaaaatattctaatatgattgtgagattatttattcctatgattctgtcaattttgcatcatatattttaggctctgttattgactaagtacacatttgtgaatattatgtttcttcaataattgaactctttctcattattaaatatccctccttatttctggtaatggtacttgttttaaagcaaactttgtctgataataatatacatagctactctggcatcttatgcttattatttatatgcttttctattcatttattttccactcatctgtgtctatgttttttagtgcattttgtgaacacacaacatatagttgagtattgctttcttttttgagacagggtcttgctatggtgcccagtctggcctcagactcctgggctgagatgaacctcctgcctcagcctcccaagtagctggggttgtaggtgcatgccactgcacctagtgggtattgctttttaatctgttttgatctctgccttccaattagaatgtttagtttattagtgttgattataattattgatgtgattggatttagctctaaaattttaatatttatttgtttctgtgtgtctactctgtttatttctgctttgtgctctattctccctttcattctttttttgaattatatgaatatttttagaatttcattttaatttatatattacatttttcctatgtatttttgcagcatatttttagttgttgtctagggattattttatacatccttaaatttcagtttacatagagttaatagtgtatcactttatgtaaaacatagaaaccttgaaaccatatagattcatttgtagcttatcagacagggtcttagtcaccttgcgccattgctagggactgcagttgaactcaatccaaatgctcagaaatgggtaactcaccaattcctccaaattttcctcacctccaa

SEQ ID NO: 13146 - DNA, 1079 bp, Homo sapiens
atgtccataaagcgaaaacagatagaattgaaaaaagaaatattaaattatccaataatagttggaaacttcaataccccgctttcaataatgaagacaataactagatgtaagattgacaaggacatatgctcctcaatttacaagggtgttgcatcctgacaaacccatcataaattgaggagtgtattttatatgtatcatttttgcaccactgtaaagtcaaaaaatcataagtcaaaccatcataagtcagggcacatctgtaaatagaagactcaaacaacactataaaccaaccagacctaatacacatctgcagaacactcccaagaacagcaaaatttcttagtgcacatggaacattctccaggataaaccatatgtcaggccataacacaagcctcaataaatttaaaaggattaaaataatacaaagattttttgacacaatggaattaaaaatctttctacagttgacaaactgaacagcaaatactttggatgataggcaagattcataaatgatatagaaaccatgccatgtgacttgaaagaactgaggctagtgtacccaactaaggagtctaatttggatggtagagatggggatgaagtaggatataatagtttcctctaagaagcctgtcgtttatagcaaggagaatattaatatgtatacatgaccttccagaggacacaagtaagataattgggtggaagttacagcacaaaataaggaagaatattataactgtacttttcagttcagtaagatataggcagtattgtacttccctttttaaaaaaacaaggtctcattatgttgcccaggcctgacacaaactcctgggtttaagggatcctcccacctcagcctcccaagtagttgagagtgactagagtcacatgccactgtgcctggctctactttcatatattgtgttccttaaattggatttttaaagtcctatgtagaaaagccaaacaaggccaggtgtgggggctcactcatataatcccaatactttgattggctgaggcaggaggttagcttgagcccaggggtttgagacccg

SEQ ID NO: 13147 - DNA, 1047 bp, Homo sapiens
aaaaagtctgtgctttgtaaaagcccaagctgtaggggcccttcttgttggtttaaaccagggccttgttttgacaaattttgatctgtgcagtttttagattttctgacacatttttgtttccttcccctttggcctgcactttgtgctctctgccttgttgctgcttcaaaatcctaacatagtcttcccaagagaaaaagaaccaccgttattgagggcttaaaagaaacaatagtgtaatacttcataaaatagcaatacttaatctatttccatggtgatctgcacaatggaggaaaaacaatcttgggacttgtgataagccaattacaagaaaggttaagagtttttttagtgccagaaacatgccatctacatgaaaacataggatcattactaacagtctacactgtcaaatacactgctctttagaactgccagaaatttaagctgtcttcatttttgagcttttaggaagctgacagagttttctgcctgtgttcataggcttcgacgtcagaaagagaaattacggaagactgtagaatacttgctaattaaaaccagaaataaattcaaaaatcagatttagaaatatgcttctttgtcaatgatagggcccctttaagactaacgatttgccaaaaatggagtgcatttgaaacatacatttctacagagtcatgatttatcattctcaaccccaaattcaaacttttagaactgcagaattggaaagaaaaaaaaaaatcttcagccaagaaattattattctgggttgcacctgtaattaaaaagtagctattgacatctgtgccttagagacttgccgtagtcttcctactatcatagttgctgatagctgctttccattaagagaaacattttatcttaatttttagtagatagaacatgcccaaatagaacatatctgaccatatttgtctaaataatcttagtgttgctgttagctatatttcctttcacatgtaaagatacaaaatataataatgtttgtatctcatatgctttgtcattggtgta

SEQ ID NO: 13148 - DNA, 1037 bp, Homo sapiens
gagcagtactcattacactcaattagtgacagccccaatttttattctataatatttatcaatacacttggcccttagaaatgctcagcagctagaccattaggcttctgcttgaagagttgatttggagcaattaaataagcctttaggatttaatggcaggaaagtcactcagggaggacctacctcaaggagaagctcaaagcattttgcttcagctcatcaaacagagctctggagcattgcgaaaacgattttaaaaatggcaagacaaaaaaagtagaaaactatggaataatgttttgcttcaggtgtagctaatccaaactgccacaaaggaaaattggggcactggtggtgtgggatgagagggttcagtagtcaggagacaatcttttgttgaaatgatcttttatattgcttgaattcttaccatgcatatatgaccttttcagaaatgttgttcttactacaaactaaaacaaaatcttgttagaaattgatgtctaggcatggtggctcatgcctgtaatcccagcattttgggaagctgaggaggtggatcacctgaggtcaggaatttgagaccagcctggccaacatggtgaaaccccttctctactaataatacaaaaaaaaaaaaaaaaaagtagccgagcatggtggcacgtgcctgtaatcccagctactcaggaggctgaggcacaagaatcacttgaacccaggaggcggaggttgcagtgagctgagattgcaccactgcacttcagcctgggcaacaaagtgaaactgtgtctcaaaaaaaaaaaaggaaagaaattgagatgtatagacaacttgtgcttacagtaattgctcctttgctttctatttttctaaaaaatttcaaaaagtgttttacttgtgaatctttatttacatatatgtaacacttatgtgtagtgagatttacaggccttggagtttacaggccatcctggggtccaaaatatatacttccctgctggagatacaccaagaaagtataatctaaaaac

SEQ ID NO: 13149 - DNA, 1052 bp, Homo sapiens
tcagaggttctctggggacccttccctgtctgcctaggcatttggctctctcatgcctctatcaataggaggcaggaattgatgggtttatttctagcaaccaaaatggcaagccttctcacatgatcttggaaaaggaagtaagaattttgaacagaaatctcttaaatagctgacatacaggcatagcaagttgaacaagatattgatcagaaccagagtagcaaccatataataaactgcaggtactgcctgtattttgtgataagctgcttacctgagacctcttgatgaacagcaggcaaagtttatcaacattccaaacacctgaatgataggcacaactacaggtttggctactgtttccatgtgttagataaccaaaaagccccaaagcacagtggctcaaataacaacctttttttttttctttttcctcacaatgttgtgggtcggctgaacttagctgagagtttcttctggtagtcttgcttggggtatctcatgaggccgcattcagatgggagtgtggctgtgactggacagtcaagatgacctcccatcctccagagctggaggcttcaaaccaaaggcccctgtgcaaatccaacccatgctcagtttttgtactgccatgagcagtaatttttacatttgcagtaattaaaccgcttttacattttttaatagttgaaaaagaattcaaaacaaaaatattttgtgatatgtgaaaattatatgaaattcaaatttcattgtccacaaagttttattggaacataatcatgaccaagcttattcacttatgtattatttacagctgcttttgcactacagtggtagcactgagtggttgtgacaatcacagaaaccacatggcccacaaagccaaaaatatttactatctgggcctttagagattctgctggccccttctccagagcctctgtccatagtcatctcttttttttttttttttttttttgagacagagttttgctcttgtcgcccaggctggagtacaatggtgcgatcttggctcactgcaaact

SEQ ID NO: 13150 - DNA, 1028 bp, Homo sapiens
ttaatgtggcccaacacaaatttgtaaactttcttaaaacattgagtaattttttgattttttttttcactcatcagctattgttaatgttagtgtgttttatatgtggcccaaaacagttcttccaatgtggcccagggaagccaaaagacaacctgttctagagcattaaaaaaaaattaagaaacaccgcatgttctcactcataagtgagagctgaacaatgagaacacatggacatagggaggggaacatcacacaccagggcctgtcagtgagtcgggggctaggggaggaataagattaggagaaatacctgatgtaggtgacgggttgatgggtgcagcaaaccaccgtggcacgtgtacacctatgtaacaaaactgcacgttctgcacatggaccccagaacttaaagtataataaaaaaaattaagagtgatatagtagagatgcttttgtgctcgtaaaatggaacaataaaaaaattccagtaaaactaatgactgtcatgccgaactgtctaatatacaatagaaaataatttagaaaatctggtacgttttgattgacattgctatgcctttagcttagatttgttggttttaaaggaaactataaactcagtttcagggatacatgttaagcaacttcagatttaaactgtttacaactgctagcttttgtgtatggttttcatttgacattataaatttccactctgcatgggaatcacctggaattcattccagatgggtgattctcaaagacactttcagttagttagaagtctaaaactgtctgacttctagtctctgctagagtgtgttctatttttttaagttctagtaagcattttcctgaagtaatagtagccaactctttatttctagtgactgagaatttcattcagaggcgatgggtgatttaatttttaggaatggaaagctttgctaatgaattaagttaaaatattttcacacagtggtccaattgaaatgtaaatataatacacataatatgtaaca

SEQ ID NO: 13151 - DNA, 1059 bp, Homo sapiens
atcaccttatagatttttggtggctatttcccctgcaagactgaattcatgaggacaatgaccaatgtttaattttctattttcagtatttatatagtcagtccttagtatatagtagactttcaataagagtttgctgcataaaaactattcttacaacaatcttgtaggataggtactatttttatagaaactgagactcagagagtccaagtgagttacgaaattcacacagcagcaattgcatgcatgccgaaggattctattcatagttatgactccaagttcaaggatttcttctaaaggcagccaatgctagaaatgtgcttcccgctgagactcagtgttgtttatagtttttaattgatttgtgactttgaaattaatggaaatattatttatatttttcccatttgaggtataattttttgacagttttattgagatgtaattcacatactatgcatttcactcatttattactttttaatatattcacagatatgtgcaacatcaccgtagtcaatttcaggccatttgtatcaactcaaaaagaaacttagtatccattaactaacccccacccccagctaccactccccaggtaaattcttaaggcgtaagggtaattcaaatatttgtgtgctgtaagtttaatgtccctttcacagcctttactagtaactgtttaagtgttgtcagcaggttaattattcctagttaaaaaacatttaaaggtaactttccaattaaataatttagaaggtgaaacttcaagactgagtgttgtcaatgtgtgtataatggttataatattttcatgccacttactcaggcataaagaagtaatattttttatgtttgaaataactcatctgaatttctatttcagttcctcatggcagaacacatagtcttggtgcattctgggtaaacacagtaattttgcaattaaacccagtaacattagttgtaactctacaggatagcattgggaagcagtgactgctggttgttgccatctgtccagtttgtcatctgtttaggtgcaacttgctc

SEQ ID NO: 13152 - DNA, 1023 bp, Homo sapiens
accaaattagtatacttcaagagaaaccgaatgcaataatgtgatttttttcagtaaattcttctgaagtacaatattgtgtcactgcttaatttcttaaatgtccagagttgtcagataggttttaacttatatggtacctcctggggagctgtgaggaaaatgattttcaggttggttcctggctttaaggaaacagtacaggaactgaatgattaatgcccattttgtgttgggggatgccttgtctggcctcattcctaacagtggtgccatatagattatattgtacacaccactttggataacatataaattttgatatgaatttaattttttttgagatgggggtctcactgtgttgtctaggctggtcttgaagtcctgggctcaagcaatcctcccatttcagcctctccagtagctgggactacaggcacacaccaccacgcctcactattaattctaatacgatcttgtagatgaactgtaatgaaacaatgagagctaggagaatgatttgaggaatgaataacttcaatattttgctaaatgaaatcataaacaaaatattgatcattttctttactcattacagaacccttgttaacccactgctctgggcagggcacaaatcctgtttgcttcatggcgttccttcatgctctcactgaactgtggtcttttgtgcaatagaccaccatggcaatgtgtttgtatctttcactgacacttttcacattatatcttttattacttatttatccttgttcctcattattttgttttcttatattaattaatttttaagttcataaaagttgtatatatttatggcatataacatgatgctttgaaatatgtatacattatggaatggctaaattgagctaactaacataagtattacttcatatatcatttatttgtggtgagaacacttaaaatctattgtcttaccaatttccaagtatacattacattgttattagcaatagttaccatgttgtataatagatgtct

SEQ ID NO: 13153 - DNA, 1087 bp, Homo sapiens
aaatgtaaaaactcaattgaagaaagagaaagaaacagtaactttctccccagacacccgatagtctcagattatgccacagtttctgggttttaattactattcaaagttcaagtacagttatcacaagaatggagatttttcccagtagctctgactccgaataaacaggaagtatagtatcagaaatctggcatgagaacctggtcttgtgaaacttctcatcctaagtacttgaaacttttcatgcttcttgctaaatcttcacaagtgtgcccataattctgtattacctaactagtttgaactctagaatattagttccaaaaccatatacagaacagatgaaagctagatattacaagactaaaagctgttgcaacaaaatcttcctgacaaatggagctgtcagtttgtgtgactacagggagaaacagagtgggactatgaagtgctaaagtattgtaggactgcatttgcctcttttagttactccaaatgcaaatcactcttgccctgggaaaagtggtatagttggaggacatagttacagtaaaacaaatttggactcatttttttctatgaacctcaagtttaaccacactaaaccctctttatcagagattccatgaaaggtcatattgttttatttctttattatggccatgaacttcctaattaaattcagaatcatagcaagagctccctagcttgtgaaagtctaaatttgctgacatcttaatgtcttaagtacccagccaactgttagtcttgcatcctatgaatggtttcgtgagttggagcttcttagtccttcccctacttctgactttgaatcagcaaaatgggcaacttttacattttatgttttggatggcaatccaggcacattgtaggggtcagtaattcttgctggctatgccattttagaagtatactgtctaaaactagtagttttagtagaagaacatattgtcaaggggaataggtgcactccctcttcctttacatgggattcaagggctcctgttctgacattagatgattcaggtgttgtgccccatgctagttgctttaatctgtgatc

SEQ ID NO: 13154 - DNA, 1038 bp, Homo sapiens
tagaaattaattccaactggtgattctatgctttcctgtaactaaaacattgaaaataagacttatctgaccacacaagcctaaagtaatacagaaatttcttagagttactagtgcactatagcttggccatgcagcaaagtttagtagaaatgattgatgtattgttttgtcacctcagagtcaacaataattgctgacatttataaagtatcttttattgcaaaatatggcaacataccagaatctctgggacacagctaaggcagtgtttagagggaagtttatagcactaaatgcccacatcaaaaagttagaaagatctaaaattgacaacctaaagtctcaactaaaagaactacagaagcaagagcaaaccaaccccaaaaccagtagaagacaggaaataaccaaaattagagctcaactgaaggagttgagctctaaaacaccatacaaaagatcaacaaattcaggagttgattatttgaaaaaaattaataagatagatggacttctagctagaatattgaagaaaacagagaaaatccaaataaacgcaattagaaatgacaaaaggggacattacaactgaccccacagaaatacaaatactcatcagagactactatgaacacctctatgcacacaaactagaacatctagaggaaattaataaattcctggacacatacatcctcccaagattgaaccaggaaaaagtgaattcttgaacagaccaataacaagctctgaaattgaatcagtaataaatagcctagaaaccaaaaagaagcctaggacaagacaaattaacagctgaattttaccagctgtacaaagagagctggtagtattcctacagatacaattataaaaaaattgaggagaagggactcctcccaaactcattctatgagttctgcatcattctaataccaaacctggctgagacaccacaacaacaaaaacaatagcaacaaaaacttcaggccaataaccttgatgaacatagatgtaaaaatcctcaacaaaata

SEQ ID NO: 13155 - DNA, 1013 bp, Homo sapiens
tataggtatgtgatttttattctttagcttgtgaagtgagggattacattaatttatttttgattgttgaactagccttgcatacctgggataaattccacttggttatagtatataattatttgtatgcattgttggatactatttgctaaaattctgctgaggacttttgcacctaagttcatgtgagatattggtctatagttttcttttcttgtaatgtctttggttttggtattatgataatgctgatcacatagaatgagttaggaagaaattcctctgcttctatcttctgaaaagagattatattttccttaaatgtttggtagattttagcagtgagcccatctagtcctactagtttctgtttagaaaggttattaattattgtttcaatttctttaatacatatagacttattcagattatctatttctttttgtgtgagttttggaagatcgtgtatttcaaggaattgctgcattttatctaagttataaattttgtgggcatagaattgttcataatatttttgttgactgtgagctaaagctttctttgttcatttcttgtatctaaagtactcttcaatgtcatccttggcctgagcttctttgccatagtccttaactactacagaactgcaaccaatcactttaaaaagttttctctctttgtcagttatgcagaggacaacccatattcttagtttcttgtcatcaactttaattatgttgattttgtgtttagcagaaaggacatccaccaacttgacatacataggctcactgcagttggatgcaagcatacaaagacgggcttagtgcttgtttaaggcttggcagctctgtgaattccatgtactgggctcctgtggatgaggatagtcttcagcactttttgcaaagcagtattaatgtccattatacctttagcagcaatgccttcatcgaccatggtggtgggttatggatgaagccaaatattgaatgcacctgagcctccacctc

SEQ ID NO: 13156 - DNA, 1022 bp, Homo sapiens
ttgattgatattggctgctttttcaagaaatgagatgtgttaaaaaatgaatcagctaatatatgagcagaagtgaagggggattgagagtccgtaaattcatggattgtttttgaattttatataaatgaaattatacaatgtgtattttgtgtctggcttcctttgttcagcattatgtttgagattcattcatcttgttctgtgtaactgcatttatttagttttactaaaatatattatttaattatatgaatatatctcaatgttttatccactctactgtcaatggatatttatgttgttttttagttttgactactgtaaataatgtcattgagaacctttttgtacatgtcccatctatgggacagttatctaggaatagaattactgggtcatagaatgtgtgcattgtcaatgccaatctattttccaaaatgtttgtatcagttcatacttccattggcattgtatgtaagttcttcttacttcacatctttgtcaacatttactcttatcagccttttaaatatttttccatttagtggatgtgtgatggcttagtttgaattttcttgattaataataaagttgaatacctcttcccatgtttattggccttgaattatgtctgctgtgaagtacctgctcaagacttttgttttctagagtcttcttgcattccttggcttgtggtctcacattattttggcctctgcttctgtcatcgtatctctgaaactgaccttcctgtgtccctcttataaagccccttgtaataacaacattggcccacctggataattcaggataatctacccatctcaagatgtttaacttaattacattggtgaagtttcttttgctatagaaggtagaatagtcacagattctggggatatgaacatctttggggggcactattcagctatatcctttgtggcttattcaccttgctatgtgctcaagaaagctagactcctgccaataatagtgaataaaattaaaagtccattgtc

SEQ ID NO: 13157 - DNA, 1049 bp, Homo sapiens
tgaaacaaatataatggaaacacaacataccaaaacttatgggatacagcaaaagcagttctcagagtaaagtttatagtgataagcaactacatcaaaaaagtagaaaaacttcataaataacctaacaatgcaccttaaagaaaacagtatggagattctttaaagaattaaagtagatctaccatttgatccagcaatcccactactggatatctacccagaggaaaataagtcattctatgaaaaagacgcttgcacatgcatgtttattgaagcacagttcgcaattgcagaaatatggaattagcccaaatgcccatcagtcaatgagtgaataaaataatgtggtatatatatcatggaatactactcagctataaaaagtaacaaaacaatgccattcgcagtaatctggatggagttggagaccattattctaagtgaagtaactcaggaatggaaaagcaaacattgtatgttcttataagtgggagctaagctatgaggagacaaaggtataagaatgatacaatggacttggggacttggagggaagagtgggagggggttaagggataaaagactacacactgggtgcaatgtacactgctcaggtgatgggggcaccaatatctcagtaatcactactaaagaacttatccatgtaatcaaacaccacctgttcccccaaaaactattgaaataaaaaaagaaaagtgaaaaataaaaacgaaataaaggtaaaattaggagaaaaaaaaactagaaaagcaagagcaaaccaaaccccaaattagtagaagaaaaaagaaatagaaatcagagcagaaataaatgaaactgaaaagaaaacattagaaacgattaatgaaacacaaagttggtttcttaaaaaagataaacaaaattgacaaggctttcgctagattaagaaagagagaagacccaaataaaatcagaaatgaaaaaggagacattacaactgataccacataaattgaaaggattgctagaggctactatgagcaatcatgggtgccaataaa

SEQ ID NO: 13158 - DNA, 1051 bp, Homo sapiens
aatatacataaatgggctaaattgagcaattaaaagatggccaattatcaggtaagatgaagtaaaaattaccgtcatatgctattatcaggaaacacacctaaaaaaattaaaaagttgatgtaaaaactggaaaaagattcttcaggaaaaaagaagattgaataattacattaatgtcaaaaaaaaaaaactttaaggttaaaaagactgacaagatatacagagcgatactacttagtgataaacattttaatttgccataactgcaacaattctaatcatgtgcacttaagaaaatatcttcaaagtgtataaattaaaaattaacagaaacatctagaaaaataaaaatctattgtagcgggggatttcaatatactatatctcaatgttgataggttatacaaacaaattttcacaaggatatagaattggcaaatacaattcaaaaacatttaataggcacatatagaatgaaaaaacaaattgtggcatatttacatagtcaaatattatacagcagtgaacgagacagaactaaggactatatgtaacaagatggtgacagtaagaactgtaagattaagtgaagaaaagacaagtaagaaaagaccacattgttatactattttataaagctctaaaacagacaaagctaaaaatattgcctagggatacatacatatgcgatggagttatattttttaaaaagtaatagattaaatggcatagcaactttggaaaacaggttagcattttcttatatagttaaacatatacttatcatattaaccaggaattccacctctaggaataagaaatgaaaacataagagtaatgaaaacgtatccagtacaaagacttgtattcaatactcatagcaactttattcataatagcccacaatggaaacaacccaaatcgtcatcaactggtaaacagacaaacaatttatggtatatccacacaatggaatgctactcagcaataaaaaggtactatggtacacacacaaacagggatgaatctcaagatcattacggtaagt

SEQ ID NO: 13159 - DNA, 1034 bp, Homo sapiens
ttgcattaaaagatgttttcatttttgatttgtttttattggcttgtctgtggacactcaccaacttaatatacagatagaaacttattttaatgagcatcagtatgacatctaggtatattgtaaggacatttccaagtctccgatttaaaagtgaattgaactccaagggtttagaagttctccaattgatgcagagttttaggaaaatgaatctcagattcttaactacatatacactgcaaaaatactttgtaaaatactgttgcctagtttgtaaactatgacattgccagttcgttagtttttaaacaaatggctatcctttatatgtttttatttttttccaccccccaaaaacattagtaaagaaagggtaaaaatgatacccattttcatcctttaatagtattttggagttgtggaatgagggcagccaagaaatctattcacatttctattactgaaaactggtaccatatgctgttcctgttataatgattcttatagtcagagatctgtagactgagtgaggagcctgggcatatacatgagaataatggtagctggtattgagacacttaagaacaatacaataatatggtggacaaatagagaagtttcagtgagaaatgttagcttgtaagtctcctctgctttgaaagattgttttctgttttcactcattgtaatttatgttaccttagggatcttattttttaaaagaagttttaaaaacctcttactgtgtcttaaagtgttttcttaaggtataaagtaaatttctgttttgattttttttattggaaagttcatacagattgaccctgggactaagtcattaagaaaaaaaaaatatatttattcatgatctttaaaatacttgccgttatatgagtcagttaacaaaatcactcatccctctccaaaatgttatttcacattttacttagcccactttaaatgatggtagaaaaatcacttcattattggcattttgacataatgaacttcatgcattttcattaatttgg

SEQ ID NO: 13160 - DNA, 1050 bp, Homo sapiens
ttaatgcaaccattgaaaattataagaatttaatgaatttttatgagaatttttatgaaaactaaaaaggtgctgatttttaaatgttttttaaaatgcaacattatatcacattatattctatatactcatattttactagtcttgattccaaaattgcaatttcatagaatctttatcatagttttcaaattttctatatgagcatgtggactgtcagtaaaatttgttgttttgaaaagtttctagttttttaaaacatgtttgaattttctgtttcataagaaacaatttttttcatccaaaattattagaaatatctataatgcaactttttggacatgacacttgaaaaagtagcttgatctgttagaaatggcacccaaatgtgacttcggagacttagggttcctgttgtaggtgcgtcattagttagctatgtgacatgatgcaaatccctcttttttattctgcaaaatggaagtagttaatacctgtccttcctctctgatcaagtgatttcgagtaaaaacattatttcctgaaattttctgttgaagttaaaagtgctaaacaggtacgttgtaacccaaatcaaaacgttttggttcagaatcttttgaaaagtttatagtcacagaaaaataattttcttaactacattaataaaaaatagcttaacacacaatcctgccctgtacttcactgatttatggcaagtcagccaatccatcagtgctcaaagctccttgtattgtcaggaatcactaacattatttgtcactcattcagaattaaactgccaactagtagcatttgttttgtgtctgatagattcttcatgcagaaagaataagtaaaatgagatgggacacaaatctgagtatagcattgtcattactttttgctgcacagattacttgcaagaaatattctagtctggggcataacagaatccacaaattccagatttaagaagtagatctatataagctttatttaatatttgttatattttttagttactcattgtgtgtcctttataatgca

SEQ ID NO: 13161 - DNA, 1171 bp, Homo sapiens
agcagtcatgaaaaattcaagtggagataataattaaagaagtagattaattccctaaagcagagaaggaactttaaaaaaaaaactgtaagaaatgggcaaatgggcatatagacaggaaagccgagaaagcatagtcaagtgaaccagcggtgtaattaaatagttctttgtaacctgtttcataaaatatgcaaatgcatgagacattctatatgttgctctgactatatatttttaccgtttatagatttcatgatcctttggctgcatggagaaaatgggacagggcctgctaagttcaacatacctcacagtgttacacttgattcagctggtcgggtacaaatacagcgtcattgtgtctgggactttgtgtctgaatatgtttgtgtgtgtgtgtgtgtgtgtgtgtgtgtgtgtgtgtgtctgggcatgtatatatagattgtggtatacatgtgtgtctgggcatgtggatacatgtgtgttagtgggtatgtctgggtaattactctggggctgggtgtgcacacatactttcttacaagtgtttgagtcctatagtgagggggttccccaaacatttagaaaggagcaaaatggatttcctgtaccatttaaaaggatagaaggcacaaataatggatctgaacataaagttacctgaaagaaaaagttgccctcttactgggaaaactccactaaaagtgtttgaatatcttttcacttctcaagaaaaaaatgtgctgatctaaagtggagtgggagaggttaaccttggaagtctgaaaaagagtcacctaggcaaactcttgttctcactaactccacattgtttagggaacagaaagctttagccaacaaatttcaatcagtttctctcttttctaccctactcactactatctcttttgcatttactcaatttctaagcatagatctcacttctttgaggttaccttttcacaacgaaaccgccaccaaaaaatttgtatattagtttctcctgctcttttcctatagcagcctgtacttcgtatcatagtaactatcatgctatattataatcatttgtctgtctcccctaatagatgtcaggctgttgaaagtgcttactgaatctcttttgctttatttctttgtgcctagtacacagtagtcatattta

SEQ ID NO: 13162 - DNA, 1034 bp, Homo sapiens
tttactcgttggtgtatttatttttatacattttatcatttgtagattcctgaatgcgccaccatagtcacgatatagtacacagttccatcaccacaaatagtgtcctgttggtgggtggacagtgtgagaaaagttgcagactaagcccatgtgggagatggttgactctgcaaagcagccagctctgtgaggaaaggcagtgttaaatttctttatcagaattaagcctgtgccttcaccataaaattagattgcattttataacagttcttttgaaagaaaagtttcctagaaaaacacattccctgttagagaccttgacattaatttttctctaagttaatgctgaacacaaaaacaagcattactttaattgaaaattgtgattaaaactaagaggataacagatcaataatcctgtatgcaaagcctttttaaacttttcctgttctcagttaaatctttttgttttaatttttagtgtaataggtattacagttgtttgcaactaatcgttgatttgattgtctctgtttctcctaaactgtgagctccttgagaaaaatgacaatttcttattctcctttttgtatttgcagtgcctgctattttacagattcaataaataatttttgagtaaatgaatatggaaagcaactataatgttaggaaaggaacataaaactgaaaaataagcattgtattggagcttgtaatatggggctctaaataatgtatataggagacaatattagaacattgtgcttctgttcatgtgttctcaaaactatttaagcaaggtttatgtttattattttagtaagcctgtggaagtgttttggcctgatatgcttttgggaagtgaaaatttatgacattctggtatcccaagagctatagatatgatgtgccaagtgaacgtttgtgtgaatgtattttaggaaaattgcaaggcagaaattatgataacaggtctctgggggctggcagggagttgttttttcattttaaaatatctttttaacaagaaa

SEQ ID NO: 13163 - DNA, 1035 bp, Homo sapiens
gcttgattttcctacttttactaagtccattgctttatcccttattactgctgcctctgctttagtcccaaatcccagcattgtttcttaggaggggtaaaagtttttactttttgattgaattttcaatgagctgaagttatctcttaaatatttttttcttgtttgaaagcaatgttgcttgaccgaatatctaaaggagctttaagtgctttttaagtacttggttgtctcagaaattgcgtgaatagtctgatatagccactagaaacaaccccaaccattttttatataacttgtttcttctagatataccttagatgaatttggaacagccagaagaagtacagttgttcgtggatttattgatgcgctcacaagagggggccccggaggtacacctagaccaattgaaatgcattctcatgaccctttgaggtatagtaatcagacagcagaagaggagttgatgtttttccaaaggaaatcttcattaacatttagttttcattaggtatgtaggagatatgttggcttggctccatcaagctactgcttctgaaaaggaacaccttgaagctctcttaaagcatgtaactacacaaggtgggtccaccaattgtattgctaatgcctaaatatagaaaataacacaagcatctctgtttctgttcttgttgccatcttcttcacttagataaacaccttgatggtacaataagcatcctgattactctttctcttctctagattctccctcattctgctaatagactttctcttccatcacctttgtcctgtcactcaactgttcagttttatagtgaaacctagtgacctttcatatcaaacctagactcctctgtgtcacttttaagaaatttctggaatatttagcatacattttctcaaatcctctgcatgacactttaaaggtacagggtgatattatcttaattttatctgtgtgtaaacaggctgagtgacttgttttaggtctttaagctactaattctttcatttctgctacccagc

SEQ ID NO: 13164 - DNA, 1110 bp, Homo sapiens
ttttctcccttccacaagcacataaattctctctccgcgccatgctgccagtgccagggattaggggaaggatggtgtaggcaattcaagactatctttcttatcctctttagtgcctctttccttaatatgatgttaaaaccaagtactatgattgctcacctaatttttggttcttaggaaggtgattttttgtgtggatagatttggcgttcctgcttgggggacgatctctggaggcttctatttgctcatctttctcctaattgtggaattttaaacacataaaacatacgacaacaaaagtgcaaaagatgcagtgggagggaagtggaagtttggtgttttaatattgtaaggatattaagttatccatgaaatatataatattgattggaggtagactgtaaaccttcccacaaccattgaaacaaataaagttatttagcataccaatagataagaacaaatagaatttttaaaaagtaattgtatcaaaagaaggtgaaaaaggagggtaaaagaacaaatgagacaagtatgaaacaagtagcaggaagatagacttaattgcagcctaataagtaactgtactaaatgtgaaagtactacagatttgaactaaaagacaaaattgttagactggatgaaaaagcatggtacaactatctgctatctataaaaagtccattttaaatataaaggtggagatagtttaaaaggatgacaaaagatataccatgcaagcactaatcctaaagctggagtagctatattactataagaaaaattagactacagacagataataataccagagataaaacgtgacattttataataggattaatacatgaagtaaatatagtagtatatctgtgcatttaatagcagagctgcaaataacatgaaatataagcttacaggattgatgaggagtagctgtatcaagaaatacagttagatatttctgcatagtcctctcagtaattgatacaaaaaaataggaaattaacatgatgcttcatagttgaacagtactaccaatctttacctaatagaaatatttaaaatactacacacaaactatagaaaatacacattgttttt

SEQ ID NO: 13165 - DNA, 1029 bp, Homo sapiens
cacactgaagtattaatagtgcatgtttttcagtgggggactatgggcaatattttcctcctttcctttaggtttttttgtggcgttttattttgtcatgtcacgatgtatcttggctttggctgttgtaacagaatactacagattgagtggcttaaacaaacatttctcacagttctatggtctgaaaagtctaatatcaaggttccagcagatctggtgtctgatgagggcttgttcttaatttgaacatagccgtcttctcactgtgtcctcatatggcagagagtgagcgagctctctggcctcttcttctaagggactaatcccatcacaatggccctatcctcatgacctcatctacacctgattactcccaaaggccccatctcctaacaccatcaccttggggggataaaattcagtccatagcgctgtgtgtaatcaaaagaatatggttgttgcagtcaggaagacctgggttcacatcctagcactgccacttagtagctgtgtgactggccacattatgtcatctctaagtgtcacttcccatagggaactggggtgctgctgtctgcttcatagggttgtgggatccttagatgaaacagcacatgcaagtttccttcctttcatcattttttttttttttttgagacggagtctcactctgttgcccaggctagagtacagtggcacaatctcaggtcactgcaagctctgcctcctgggttcacgccattctcctgcctcagcctcctgagtagctgggactacaggcacccaccactacgcccggctaatttttttttttttttgtatttttagtagagacagggtttcaccatgttagccaggatggtctcgatctcctgacttcgtgatccgcccgcctcggcctcccagagtgctgggattacagttgtgagccacggcgcccggccctttcatcatttttttagacatggaggtctctctttgtttcccaagctggaatgcagtggctgttcacagatgcagtcatag

SEQ ID NO: 13166 - DNA, 1050 bp, Homo sapiens
tgtatactgagtgcaagcaggctatcaattttaataatagtccataccatgtatgtgtttctgtcagcagaatgtacatgttgtacaaaacctccaggttccttaagctttttgctgtccatgaatcctctgtggcaactgtaatcacagagccagaagccagagggccagggatatgagaggctgacaaacatcaggggacatctggggaggagatccctgtcatgtctcttgtgccatggagctattatggctggtcttccatttgctttttctttaagtgaaaaccatttttctactttgcttttctctccatacttaaatggtcagtagctactgagtggtgctttatctgaataggcctggatcgaagtaaaatagaaatgggactggctttccacaggaagtaaactgcttcagagcccacagtcccctgctcagtgtccggaaagaagtcagtcatccctgttggcagtaaatcttcccacaggccgtccattagagatttaactagatatgttcaatagaaagagtctgaggcaagtggaaatgaggaacggaaacttaggttgggagaatattttttttttattcattctgtttgcttaattcagagtacagtttgtgctatttcatatctgtactccaggcagaaatataacttgaaaatactgtgtctaaagaaatttcagtgttctatcattaaattatttacttaatatttgagtctgatgaatttcattgaagttctttacatccatgttgggaaacaactgtcaggaatgttaaagagttatgtatagtagtgtttcaaggcagtggttttattgcaacaagcattgttttctgtcagcaagacacctcatgtaaaataatttcaccataggtaaggtgacaaaaatatttctatgctctgaagttatggaacttggctcactagaattactttctccctccacctctttccctctattttaaaaaatagttaaactgtctgcttttaagttttggatgattccattccaagttactaaattctacttaagaaaa

SEQ ID NO: 13167 - DNA, 1041 bp, Homo sapiens
attgttgaattgtatcagttctttacatattctagacacatgtcccttatcagatatatgatttgcaaatattttctcccggtgtgtgagttgtttttttacttttttttcactcacattatgtatgttgatgttatgatttgaagcacaaaagtttcattttggttaagtctaatttcttttgttgaactactgattgttttttaagaaataaatgccctgtacatcaagctgtatacagagtgtactctgaaataggtcgaattaaaagaagtcctgattatggagattttcagtgagctgttaggtcaactcgtggttaattctctgggaatgagcctttttgggcttcaaatctgttcttttctctccagtggctgctaagctctactttccacaactactataaatgtgaagctattgagtttcaaggcttccatggaactggggagaggtgtataggattagagcaagttaaaacactataggctttccgttcttactgagattcagctgtttttcttaggtaaacattccttggaatgtggcaagcttttgttaatttccacaattctaataagtttatgtcaacagcttttgctaatgtcctcattgcttttatggaggagcagattctcggtgtgacattactgtaccatttggaatgtctactgatatacacgataacttggataaatctcaagagaattatgctgagtgaaaacatgatctcaaaagattaaatacagtatgattccatttatataacttttttttctttgagatagggtcttgctctgtcgcccaggctgcagtgcagcagcacagtcatagctcactgtaacctcaaactcctgggctcaagtgatccttctgtctcgacctcccgagtagctagaattacagccaccacacctggctaattaaaaaatttttttgtagagatgtggtcttgctatgttgcccaggctggtttgaaactcctgaccacacatgatcctgctgcctcaaccttccaaagcactgggattacaggcataa

SEQ ID NO: 13168 - DNA, 1044 bp, Homo sapiens
ttaaaacagtggaatcctgattttttctttttttttttttttttttttactttctgtgagcttatgaggccattctgcacattatcaaaatgaaatcattatgcagtaaccttatatatataaatccaattttttcctttgtagaagaaaaccaaaataattttacaaactacatttaacttagaatataaagaactgactagtgtaaaattttgaaaatctaccactttattttgaaggaaagtacacatccttcaaaaccccgctaacaattcctagttcagttttctattatacaaatcaaaaagttaaattccttgtggcactaaccaaaacttaaaaattaacagaagactgaattaattaaaaaaaaagcatactaactaatcaaaacaatccactgtgcaatgaatatttgaacaatgaaaaaaacctaccaagcatcctaatcaattatatagttcttgcttccatattttaattctggactttcaggatggtaaattattaaacaggtcgatttcatggactgtctaaaccttgtagtatttcaaaatattaccctttctaaaccaaatctgtggtcctaatcaactttttttccaagaaaaagaaacgatatgtgtttaaaatacattccgtagcagtagaaacatcttagtgtctcaaaatactatttacaaagaaccctgctgatcctgtgcatttcgctgaggtgctacttgcacccagacttcatcatctgaaaaagaacttgaacttcctgactcagagtccagctcactgaatccatctaagtcccattcagtactagactcactccgtgcatcatcttcctcagtaataaaactctgaccaggttcaaggcaggaaggataaacacgagcacaaaggcaaataaagccagagtcaaactgcaaaaggcctaacatggtacctatattaatccactgatcttccctagtatcatactcatacactgtcactcggttctttttccattgtggggttgtagaagtgatgagaagcaacttttggtcatga

SEQ ID NO: 13169 - DNA, 1048 bp, Homo sapiens
tttcactaccacaagaatagtatggaggaaactgccccatgattcaattatctcccaccgggtacctcctataacacgtgggaattatgggagctacaattcaagatgagatttgggtgaggacacagccaaaccacatcagcatattcctacagtgtaaaagtactcagaagtaagaaagaaacaacctctgatatataataatgtgaatggttctcaaaaattttatgttgagcaaaagaagccagatacacaagagtagacactgtatgaccatttgtgtgaagttccagaacactgaaaataagctttgatgaataaaaatcataatagaggcttcctctcttgtgtaaggggtagtggggaggtggcaaattgctagactgactagaaaggaacatgaggaaatgtctagggctgatgcaaatgttttcttctagaccgggctggtggttacatgggtgaatgcaattgctaaactcaataaactgtactcttcacatctgtgcattttgcgtactgtaattatcctctcaggaacagccacttcataattgttggctttaaataaaattgcagaattctttaccaggaagtcattatgaagatagttcagtcataaagcaaggttcttctcctctagaggtgtttgggtcaacattggtccaattcatacaaattatatcaacagatgtggtcttccatacccctggaacttgagtgcctctgggtaatcttcaaggatttcagcatgctggagtctttcagatttgtaaagtatctgagtgcctaacattatattcaaatattttccatttttgccacaaccatattaaaaacatactccttattatctgtggtccctcaagttttcttgtaatttacataattctctacaatagaatccacatttttcctggcacgaagataaagctgtttttgtttggtcattatgtctcactcatcaacaaaacatggttttaattcttcagaaatctttaacttcaactctcttcatgaatgttttcaacagcggcatctactgggg

SEQ ID NO: 13170 - DNA, 1094 bp, Homo sapiens
tctaaggccaggggaaatttccagtgtaactggaatatagagcaggagataaggctgatgtcaagaaatctgcacaaggacattgagaaacaataaaaatgtgaaacaatacattatatggtagtctgtgcttattagctcgataaataaaagtaagaaagttacctaacagaagaagtcataatgagaataccaggtgatctcacagaatccaaggataggaatgtggaatgtgcagggtcacgactaccacccgtggaatgagactgagccttgggaataaataaatgtagggactcatatcatcagggttctttctgtctatttctcatttttgcttttctctgtgtatcaatttcattctcttctcactgaagatgctttctcttggtggctgaaaatgtggcctctaacctcttacatgctttatatattgcagtttcagccaccaagagagagaataatcctctccatctctgatcttaaaatcctgggaagaaactcactggctaggacttatttgggtgtccactccaaacaaatccacttttgtcctgggtcaggatcacgatcatgtaagaatgcagcagctctgtcagaaactgtggatgtggtacgaagggcaagttctagaataagggaggaaagctaggcaaaaagttccaaaaacgctcacattctttcctatctaccccttccatttgtccaacagctgttgccctggggttaagatccttatcacttttccagcttcatctatgatttggttcctaagttattcactcttttttttttttttttctgagacagagtcttgctctgtcgcccaggctggagtgcggtggtgcgatcttggctcactacaagttccacctcccgggttcatgccattctcctgcctcaacctccccagtagctgggactacaggtgcccaccaccatgcccggctaatttttttttgtatttttagtagagatggggtttcaccgtgttagccaggatggtctcgattcctgacctcgtgatctgcccacctcggcctcccaaagtgcggggattacaggcgtgagccaccgtgcccagccaattattc

SEQ ID NO: 13171 - DNA, 1044 bp, Homo sapiens
agttaaaaattgtaatcaatatatagaattctgtatataaagagtacatatatatacacaaaatgtatttttgatagaaaaaaattataagaaagtcacaaagtggctgggcactgtggcttatacctgtaatcccagcactttgggaggccaaggcaggcagatcacgaggtcaagagattgagaccatcctggccaacatggtgaaaccccgtctctactaaaaatacaaaaattagctgggcgtggtggtacgtgcctgtaattccagctactagggaggctgaggcaggagaattgcttgaacccaggaggcagaggttgcagtaagccaagattgtgccactgccctccagcctggcaacagagtgagactccatctcaaaaaaaaaaaaaaaagaaagaaagaaagaaacggataaagttgtgttctttattatgaaaaaaattttttgtctattttggaggttaattaaacattgtttcaaaatatagaacagataggaaagaaccggtaagtaggagagtgatatgtgaagaaagtatagatatgaaaacgtatttttggtaagaaaggttaaaaagaaaagataataatgttatatgagaaaaaactttatatggtaaatttgtgtcctaaggtaaaatttaagagagcaaaagtataggataaagcagaaatttcaagcatattgtctatggtacatattgtcagagtacgttgtgataaggtttgtgaaaagaaaatttatgaaaggaaatttgcatgtgatcaggttggctataattaaaggaaattacttataagtctttctaaagattgagctttgatattaaattatactaatacaaaactaaaattttggttccctatgttagaataaagcaagtttttcatcaactatcaatttgcttttagtaaaattcagaggttctgaatttttaattctgaaatctgtatcttttaaaacttctcagacttatatctcggaagttcaacttttactgtaccttgctgcatgtgatttgcaggtcacatgtgat

SEQ ID NO: 13172 - DNA, 1050 bp, Homo sapiens
gcccggtatggtagtttacacctgcagtcccagctatccaggatgttgaggcaggaggatcccttgaacctaagagttgaggctgcagtgagccatgattatgctactgcactccagcctgggcaagagagcaagactttttctcaaaaaacaaaacaaaaaaaactggtttttaaaacattcttaattcattaattatttaaaaattagagacaaggtcttgctatgttaccaaggctagtcttgaactcctaggctccagtgatcttcccacctcaccctcccaaagttctgggattacaggcatgagccactacgcctggccataactgtttaactggaatatctatgtgcagctgctgtactagattatttgtgggtttgatatttacaaatttgataaactaataaggcttttataatggaaacctaaacataaaagtagcttttaaaaattattggttagtaaatattttaaaaacgtgagaagggttgccataaatcagtctttctgtagttgagacctcttcagatttgcatcttcaactctctcctggacatctccatgtgcttagtccacttcgtatcctagaatcagtatgtccaacatggaattctcttacttacttatgagaaggaggccactaggttctaacagttttctttaaatacattatttatatacttcttacttttgccctctactgccatataagccctcataccccatgcctagatttttgcagccactttaagggctctgctgaacttactataataataatggcaccactcttcaaagcgtgtatttttttcttcagctgtgtttagcagcttagatgtggttggagttaaaatcagttatctttaggaatgaggcatagaaattaagaatattggcaaaacaatggctgctaaagtggattgtgaagtaaattaagttaaaagagagctaggcttggtattacgtgtcttagtcctggctacttgagaggctgatgtagaaggattgcttgagcccaggagtttagtccagcctgggcaacatag
